United States Patent Application Publication US 2014/0128277 A1 - sequence listing, part 3

SEQ ID NO: 2121 - DNA, 3614 bp, Homo Sapiens
  NM_003744
gttgtcatgggggaggtggtggcgcttggtggccactggcggccgaggtagaggcagtggcgcttgagttggtcgggggcagcggcagatttgaggcttaagcaacttcttccggggaagagtgccagtgcagccactgttacaattcaagatcttgatctatatccatagattggaatattggtgggccagcaatcctcagacgcctcacttaggacaaatgaggaaactgaggcttggtgaagttacgaaacttgtccaaaatcacacaacttgtaaagggcacagccaagattcagagccaggctgtaaaaattaaaatgaacaaattacggcaaagttttaggagaaagaaggatgtttatgttccagaggccagtcgtccacatcagtggcagacagatgaagaaggcgttcgcaccggaaaatgtagcttcccggttaagtaccttggccatgtagaagttgatgaatcaagaggaatgcacatctgtgaagatgctgtaaaaagattgaaagctactggaaagaaagcagttaaagcagttctgtgggtctcagcagatggactcagagttgtggatgaaaaaactaaggacctcatagttgaccagacgatagagaaagtttctttctgtgccccagacaggaactttgatagagccttttcttacatatgccgtgatggcaccactcgtcgctggatctgtcactgcttcatggctgtcaaggacacaggtgaaaggttgagccatgcagtaggctgtgcttttgcagcctgtttagagcgcaagcagaagcgggagaaggaatgtggagtgactgctacttttgatgctagtcggaccacttttacaagagaaggatcattccgtgtcacaacagccactgaacaagcagaaagagaggagatcatgaaacaaatgcaagatgccaagaaagctgaaacagataagatagtcgttggttcatcagttgcccctggcaacactgccccatccccatcctctcccacctctcctacttctgatgccacgacctctctggagatgaacaatcctcatgccatcccacgccggcatgctccaattgaacagcttgctcgccaaggctctttccgaggttttcctgctcttagccagaagatgtcaccctttaaacgccaactatccctacgcatcaatgagttgccttccactatgcagaggaagactgatttccccattaaaaatgcagtgccagaagtagaaggggaggcagagagcatcagctccctgtgctcacagatcaccaatgccttcagcacacctgaggaccccttctcatctgctccgatgaccaaaccagtgacagtggtggcaccacaatctcctaccttccaagctaatggcactgactcagccttccatgtgcttgctaagccagcccatactgctctagcacccgtagcaatgcctgtgcgtgaaaccaacccttgggcccatgcccctgatgctgctaacaaggaaattgcagccacatgttcggggaccgagtggggtcaatcttctggtgctgcctctccaggtctcttccaggccggtcatagacgtactccctctgaggccgaccgatggttagaagaggtgtctaagagcgtccgggctcagcagccccaggcctcagctgctcctctgcagccagttctccagcctcctccacccactgccatctcccagccagcatcacctttccaagggaatgcattcctcacctctcagcctgtgccagtgggtgtggtcccagccctgcaaccagcctttgtccctgcccagtcctatcctgtggccaatggaatgccctatccagcccctaatgtgcctgtggtgggcatcactccctcccagatggtggccaacgtatttggcactgcaggccaccctcaggctgcccatccccatcagtcacccagcctggtcaggcagcagacattccctcactacgaggcaagcagtgctaccaccagtcccttctttaagcctcctgctcagcacctcaacggttctgcagctttcaatggtgtagatgatggcaggttggcctcagcagacaggcatacagaggttcctacaggcacctgcccagtggatccttttgaagcccagtgggctgcattagaaaataagtccaagcagcgtactaatccctcccctaccaaccctttctccagtgacttacagaagacgtttgaaattgaactttaagcaatcattatggctatgtatcttgtccataccagacagggagcagggggtagcggtcaaaggagcaaaacagactttgtctcctgattagtactcttttcactaatcccaaaggtcccaaggaacaagtccaggcccagagtactgtgaggggtgattttgaaagacatgggaaaaagcattcctagagaaaagctgccttgcaattaggctaaagaagtcaaggaaatgttgctttctgtactccctcttcccttacccccttacaaatctctggcaacagagaggcaaagtatctgaacaagaatctatattccaagcacatttactgaaatgtaaaacacaacaggaagcaaagcaatctccctttgtttttcaggccattcacctgcctcctgtcagtagtggcctgtattagagatcaagaagagtggtttgtgctcaggctggggaacagagaggcacgctatgctgccagaattcccaggagggcatatcagcaactgcccagcagagctatattttgggggagaagttgagcttccattttgagtaacagaataaatattatatatatcaaaagccaaaatctttatttttatgcatttagaatattttaaatagttctcagatattaagaagttgtatgagttgtaagtaatcttgccaaaggtaaaggggctagttgtaagaaattgtacataagattgatttatcattgatgcctactgaaataaaaagaggaaaggctggaagctgcagacaggatccctagcttgttttctgtcagtcattcattgtaagtagcacattgcaacaacaatcatgcttatgaccaatacagtcactaggttgtagttttttttaaataaaggaaaagcagtattgtcctggttttaaacctatgatggaattctaatgtcattattttaatggaatcaatcgaaatatgctctatagagaatatatcttttatatattgctgcagtttccttatgttaatcctttaacactaaggtaacatgacataatcataccatagaagggaacacaggttaccatattggtttgtaatatgggtcttggtgggttttgttttatcctttaaattttgttcccatgagttttgtggggatggggattctggttttattagctttgtgtgtgtcctcttcccccaaacccccttttggtgagaacatccccttgacagttgcagcctcttgacctcggataacaataagagagctcatctcatttttacttttgaacgttggccttacaatcaaatgtaagttatatatatttgtactgatgaaaatttataatctgctttaacaaaaataaatgttcatggtagaagcttttaaa

SEQ ID NO: 2122 - DNA, 7014 bp, Homo Sapiens
  NM_003749
cggggaccgcgacgagcccgggtcgccgttggcagcagcagcagcaacaccagcagcagcagcagccccggcggcggcgcggaccccgagcgcccgggcgcaccccggcttcccggagcgcgacgcggcggcagcagccccggtgcggccgcgcgcgccttaggctcggccccgcggctcggggaccccgactcccggcccagcgagcgcgtcccccggcgccgcccgagagcccgaggaggcagcggccgcaggcagccggggaggggggcggccaccgcccgcgccgggcatcctcaggagccccagagcgcggagggcgcggcgccgccgagcggtgctggcccccgcgggcctccccggaccttccccaccgcctgggcccgagggacgcgtgatcgggcgggcggccgggcgcaagggtgggagggagccgcccccgcccgcgccccctccgcccctcgccccaacccctgggcgccgggcccgggccgcgcggcctgaagcgcccgcgatggcgagcccgccgcggcacgggccgcccgggccggcgagcggagacggccccaacctcaacaacaacaacaacaacaacaaccacagcgtgcgcaagtgcggctacctgcgcaagcagaagcatggccacaagcgcttcttcgtgctgcgcggacccggcgcgggcggcgacgaggcgacggcgggcggggggtcggcgccgcaaccgccgcggctcgagtactacgagagcgagaaaaagtggcggagcaaggcaggcgcgccgaaacgggtgatcgctctcgactgctgcctgaacatcaacaagcgcgccgacgccaagcacaagtacctgatcgccctctacaccaaggacgagtacttcgccgtggccgccgagaacgagcaggagcaggagggctggtaccgcgcgctcaccgacctggtcagcgagggccgcgcggccgccggagacgcgccccccgccgccgcgcccgccgcgtcctgcagcgcctccctgcccggcgccctgggcggctctgccggcgccgccggggccgaggacagctacgggctggtggctcccgccacggccgcctaccgtgaggtgtggcaggtgaacctgaagcccaagggtctgggccagagcaagaacctgacgggggtgtaccgtctgtgcctgtctgcgcgcaccatcggcttcgtgaagctcaactgcgagcagccgtcggtgacgctgcagctcatgaacatccgccgctgcggccactcggacagcttcttcttcatcgaggtgggccgctcggccgtcacaggccccggcgagctgtggatgcaggcggacgactcggtggtggcgcagaacatccacgagaccatcctggaggccatgaaggcgctcaaggagctcttcgagttccggccgcgcagtaagagccaatcgtcggggtcgtcggccacgcaccccatcagcgtccccggcgcgcgccgccaccaccacctggtcaacctgccccccagccagacgggcctggtgcgccgctcgcgcaccgacagcctggccgccaccccgccggcggccaagtgcagctcgtgccgggtgcgcaccgccagcgagggcgacggcggcgcggcggcgggagcggcggccgcgggcgccaggccggtgtcggtggctgggagccccctgagccccgggccggtgcgcgcgcccctgagccgctcgcacaccctgagcggcggctgcggcggccgcgggagcaaggtggcgctgctgccggcagggggcgcgctgcaacacagccgctccatgtccatgcccgtggcgcactcgccgcccgccgccaccagccccggctccctgtcgtccagcagcggccacggctcgggctcctacccgccgccgcccggcccgcacccgcctctgccgcatccgctgcaccacggccccggccagcggccctccagcggcagcgcctccgcctcgggctcccccagcgaccccggcttcatgtccctggacgagtacggctccagcccaggcgacctgcgcgccttctgcagccaccgaagcaacacgcccgagtccatcgcggagacgcccccggcccgagacggcggcggcggcggtgagttctacgggtacatgaccatggacaggcccctgagccactgtggccgctcctaccgccgggtctcgggggacgcggcccaggacctggaccgagggctgcgcaagaggacctactccctgaccacgccagcccggcagcggccggtgccccagccctcctctgcctcgctggatgaatacaccctgatgcgggccaccttctcgggcagcgcgggccgcctctgcccgtcctgccccgcgtcctctcccaaggtggcctaccacccctacccagaggactacggagacatcgagatcggctcccacaggagctccagcagcaacctgggggcagacgacggctacatgcccatgacgcccggcgcggccctcgcgggcagtgggagcggcagctgcaggagcgacgactacatgcccatgagccccgccagcgtgtccgcccccaagcagatcttgcagcccagggccgccgccgccgccgccgccgccgtgccttctgcggggcctgcggggccagcacccacctctgcggcgggcaggacattcccggcgagcgggggcggctacaaggccagctcgcccgccgagagctcccccgaggacagtgggtacatgcgcatgtggtgcggttccaagctgtccatggagcatgcagatggcaagctgctgcccaacggggactacctcaacgtgtcccccagcgacgcggtcaccacgggcaccccgcccgacttcttctccgcagccctgcaccccggcggggagccgctcaggggcgttcccggctgctgctacagctccttgccccgctcctacaaggccccctacacctgtggcggggacagcgaccagtacgtgctcatgagctcccccgtggggcgcatcctggaggaggagcgtctggagcctcaggccacgccagggcccagccaggcggccagcgccttcggggccggccccacgcagccccctcaccctgtagtgccttcgcccgtgcggcctagcggcggccgcccggagggcttcttgggccagcgcggccgggcggtgaggcccacgcgcctgtccctggaggggctgcccagcctgcccagcatgcacgagtacccactgccaccggagcccaagagccccggcgagtacatcaacatcgactttggcgagcccggggcccgcctgtcgccgcccgcgcctcccctgctggcgtcggcggcctcgtcctcctcgctcttgtccgccagcagcccggcctcgtcgctgggctcaggcaccccgggcaccagcagcgacagccggcagcggtctccgctctccgactacatgaacctcgacttcagctcccccaagtctcctaagccgggcgccccgagcggccaccccgtgggctccttggacggcctcctgtcccccgaggcctcctccccgtatccgccgttgcccccgcgtccgtccgcgtccccgtcgtcgtctctgcagccgccgccaccgccgccggccccgggggagctgtaccgcctgccccccgcctcggccgttgccaccgcccagggcccgggcgccgcctcatcgttgtcctcggacaccggggacaatggtgactacaccgagatggcttttggtgtggccgccaccccgccgcaacctatcgcggcccccccgaagccagaagctgcccgcgtggccagcccgacgtcgggcgtgaagaggctgagcctcatggagcaggtgtcgggagtcgaggccttcctgcaggccagccagcccccggacccccaccgcggcgccaaggtcatccgcgcagacccgcaggggggccgccgccgccacagttccgagaccttctcctccaccacgacggtcacccccgtgtccccgtccttcgcccacaaccccaagcgccacaactcggcctccgtggaaaatgtctctctcaggaaaagcagcgagggcggcgtgggtgtcggccctggagggggcgacgagccgcccacctccccacgacagttgcagccggcgccccctttggcaccgcagggccggccgtggaccccgggtcagcccgggggcttggtcggttgtcctgggagcggtggatcgcccatgcgcagagagacctctgccggcttccagaatggtctcaactacatcgccatcgacgtgagggaggagcccgggctgccaccccagccgcagccgccgccgccgccgcttcctcagccgggagacaagagctcctggggccggacccgaagcctcgggggtctcatcagcgctgtgggcgtcggcagcaccggcggcgggtgcggggggccgggtcccggtgccctgccccctgccaacacctacgccagcattgacttcttgtcccaccacttgaaggaggccaccatcgtgaaagagtgaagatctgtctggctttatcaccaggatgtcacatgtcagagagtatcattaaaagaagacgctcagcactgtttcagcccgaagctgcttgcagttttcttttggatctgagcaatgactgtgtttggaaacatctgtggactctgttagatgaggcaccaacaaggcaaggtcacctgcctctttcccttgttcccggatggggcattcatcattgtgctgtttgcgttttgttttgttttgttttaacaaaattagctgaagaagttattctcaagaaaattggatgttttcattggccttcttaaattgtggccagtgtcttttaatttcttcttcttttccttttggcaaagcagatataaccctcagcatgctaggagagtgcacccgtacctatggaagtggtaaaatctggtatttactggcttacactcaaaacgaccacagtcctacctcagttcaaggtaaagccggatttccgtggcgggggtcccacaggacctcctgtagtagcccctgcgctgtgtgtctggagcgcggtcctcggccttattgaaatggtccaagtagacagctgcttgttggattccagtgcaggtacctgcgatgtttacgtccacaccgagcccagtgtgggactgacatttctcaatggaagtgaaatttgggattggactttgaagacggattactaaataataattattatatgtaactgaagcaacctacttttgaaaatcaactgtattgggtagtgggaggtgggagggaagggctttgggaaggggatgaatatctctttttacctttaacagacttgtttaatcttctcgatgtagatgtttatgtaggtacttcacattgcaaacgccttttattctatttacaagctcagatgtctctgctctcctgaatcttgggcatgcctttctgtaaccaaaaatccctgtaggcgtgctagcaattccagggtggtccgggtttggcagatttgatttttaaaaaacgtattatctttaataaaatgttattatgtcaaccagtgaggctgccctgaacaaaaaaaacaaaaagaaaaaaaaaaaaggaaagaaagaaactgataaaaagaggcattccagcccctatgttattgatggaaaaagaaaaagaagaaaagcaatctcgcagtacatgttacttgtcgaaaaaattccggacaagactacccttgttttatgttttcagtattctgaaaataccagtgtgtggcagttctcgcagatgttacctaaaactgctgaacttgaccggcagaatgttctgccgttttctgctccctcgacacttgattggagggctgtcgacctctcctcccgtgggggcttccccagtgcctatcttctctgatagtcatggagaggttacactaattcattggagatgtaagttgttggttttgttttgttttgtttttagaaaaatatatataaatatataatagatatctatcgctatagaataatgcattaataaaatgaggcttttttagaggaagaccaaaaaattcaatgtcttaaaaatatatttaatggcaatgcaaaagtcttcctgcttccgtgctgaactttagaacagaggattgtattgcaagacaaagttgaatgtaaagtgatctccctgaacatttttaaggttttacttttctgaaattatacatcacagcagtgcataggccatataatgttagctggaaggtcaatttcagtgtatgatatactttattaagatgtataaaaatcctgaagtttttatttagttttgggaataggcatcaatgggtggtatttgctttgtaactccccccaggtacgatagggactgaatatggaccctgctgaaagcagtgtattgacgcatatttaactcgccctctatccgtagagtagtcatgacactatacagatggttcgtgttcatactgcagcttaaaacaagcaaaatacacagatgataatatgctaaattttcctctatcctgtacatttcacaaaaaggcatatgcaatatttacatttttaatttagtttacagaatggaaccaaaatgtataaatgttatgtttgctaaaacttcacaatgtatattgggtctttgtacattttgcctgacttaccttaaatttaaaatattttttgctatataaactttaacagttattaaacagtgttttctttttgggtacgtattgtttctggatatcaagatgttaaatatatttcttgctattgtgatatgacaagagacttaacttatcttgctctgtcttccactgtacacgctgtatataggggtcaatgtgatgctgctggagacgagaataaactggactagaatagtgcattgtatttagtctgtattgatcatggatgccctccttaatagccatatgcaataaaataaagtacattatttatgaaatgaaaaaaaaaaaaaaaaaa

SEQ ID NO: 2123 - DNA, 5305 bp, Homo Sapiens
  NM_003750
tccttcctttccgtctctggccggctgggcgcgggcgactgctggcgaggcgcgtgggaccttacgctggttccccttcgtctcctctcccggcccgggccactagagagttcgctgacgccgggtgagctgagcctgccgccaagatgccggcctattttcagaggccggaaaatgccctcaaacgcgccaacgaatttcttgaggttggcaaaaagcagcctgctctggatgttctttatgatgttatgaaaagtaaaaaacatagaacatggcaaaagatacacgaaccaattatgttgaaatacttggaactttgcgtggatcttcgcaagagccacttggcaaaggaggggttataccagtataagaacatttgtcaacaggtgaacataaaatctctggaggatgttgttagggcatatttgaaaatggcagaggaaaaaactgaagctgctaaagaagaatctcagcagatggtcttagatatagaggatctagataatattcaaactcctgagagtgttctcctaagtgctgtaagtggtgaagacactcaggatcgtactgacagattacttttaactccatgggttaaattcctgtgggagtcttacaggcagtgtttggaccttcttagaaacaattctagagtagagcgcctgtaccatgatattgcccagcaagctttcaaattctgcctccaatacacgcgtaaggctgaattccgtaaactgtgtgacaatttgagaatgcacttatcgcagattcagcgccaccataaccaaagtacggcaatcaatcttaataatccagagagccagtccatgcatttggaaaccagacttgttcagctggacagtgctatcagcatggaattgtggcaggaagcattcaaagctgtggaagatattcacgggctattctccttgtctaaaaaaccacctaaacctcagttgatggcaaattactataacaaagtctcaactgtgttttggaaatctggaaatgctctttttcatgcatctacactccatcgtctttaccatctctctagagaaatgagaaagaatctcacacaagatgagatgcaaagaatgtctactagagtccttttagccactctttccatccctattactcctgagcgtacggatattgctcgacttctggatatggatggcattatagttgaaaaacagcgtcgccttgcaacactactaggtcttcaagccccaccgacacgaattggccttattaatgatatggtcagatttaatgtactacaatatgttgtcccagaagtgaaagacctttacaattggcttgaagtagaatttaacccattaaaactctgtgagcgagtcacaaaggttctaaattgggttagggaacaacctgaaaaggaaccggaattgcagcagtatgtgccacaactgcaaaacaacaccatcctccgccttctgcagcaggtgtcacagatttatcagagcattgagttttctcgtttgacttctttggttccttttgttgatgctttccaactggaacgggccatagtagatgcagccaggcattgcgacttgcaggttcgtattgatcacacttctcggaccctgagttttggatctgatttgaattatgctactcgagaagatgctccgattggtcctcatttgcaaagcatgccttcagagcagataagaaaccagctgacagccatgtcctcagtacttgcaaaagcacttgaagtcattaaaccagctcatatactgcaagagaaagaagaacagcatcagttggctgtcactgcataccttaaaaattcacgaaaagagcaccagcggatcctggctcgccgccagacaattgaggagagaaaagagcgccttgagagtctgaatattcagcgtgagaaagaagaattggaacagagggaagctgaactccagaaagtgcggaaggctgaggaagagaggctgcgccaggaagcaaaggagagagagaaggagcgtatcttacaggaacatgaacaaatcaaaaagaaaactgtccgagagcgtttggagcagatcaagaaaacagaactgggtgccaaagcattcaaagatattgatattgaagaccttgaggaattggatccagattttatcatggctaaacaggttgaacaactggagaaagaaaagaaagaacttcaagaacgcctaaagaatcaagaaaagaagattgactattttgaaagagccaaacgtttggaagaaattcctttgataaagagcgcttacgaggaacagagaattaaagacatggatctgtgggagcaacaagaggaagaaagaattactacaatgcagctagaacgtgaaaaggctcttgaacataagaatcgaatgtcacgaatgcttgaagacagagatttattcgtaatgcgactcaaagctgcacggcagtctgtttatgaggaaaaacttaaacagtttgaagagcgattagcagaagaaaggcataatcgattggaagaacggaaaaggcagcgtaaagaagaacgcaggataacatactatagagaaaaagaagaggaggagcagagaagggcagaagaacaaatgctaaaagagcgggaagagagagagcgcgccgaacgagcaaaacgcgaggaagagctacgagagtatcaggagcgggtgaagaaattagaagaagtggaaaggaaaaaacgccaaagggagttggaaattgaagaacgagaacggcgtagagaggaagagagaagacttggcgatagttccctttctagaaaggactctcgttggggagatagagattcagaaggcacctggagaaaaggacctgaagcagattctgagtggagaagaggcccgccagagaaggagtggagacgtggagaagggcgagatgaggacaggtctcatagaagagatgaagagcggccccggcgtctgggggatgatgaagatagagagccctctcttagaccagacgatgatcgggttccccggcgtggcatggatgatgacagaggccctagacgtggtcctgaggaagataggttctctcgtcgtggggcagacgatgaccggccttcctggcgtaacacagatgatgacaggcctcccagacgaattgccgatgaagacaggggaaactggcgtcatgcggatgatgacagaccacctagacgaggactggatgaggacagaggaagctggcgaacagctgatgaggacagaggaccaagacgtgggatggatgatgaccgggggccgaggcgaggaggcgctgatgatgagcgatcatcctggcgtaatgctgatgatgaccggggtcccaggcgagggttggatgatgatcggggtcccaggcgaggcatggatgatgaccggggtcccaggcgaggcatggatgatgaccggggtcccaggcgaggcatggatgatgaccggggtcccaggcgagggttggatgatgatcgaggaccttggaggaacgccgatgatgacagaattcccaggcgtggtgcagaggatgacaggggcccttggagaaacatggatgatgatcgcctttcaagacgtgctgatgatgatcggtttcccagacggggtgatgactcaagacctggtccttggagaccattagtcaagccaggtggatggagagagaaagaaaaagccagagaggagagctggggtccacctcgagaatcaaggccatcagaagaacgtgaatgggacagagaaaaagaaagggacagagataatcaagatcgggaggagaatgacaaggaccctgagagagaaagggacagagagagagatgtggatcgagaggatcgcttcagaagacctagggatgaaggtggctggagaagaggaccagctgaggaatcttcaagctggagagactcaagtcgccgggacgatagggatagggatgaccgtcgccgtgagagggatgaccggcgtgatctaagagaaagacgagatctaagagacgacagggaccgaagaggacctccactcagatcagaacgtgaagaagtaagttcttggagacgtgctgatgacaggaaagatgaccgggtggaagagcgggaccctcctcgtcgagttcctcccccagctctttcaagagaccgagaaagagaccgagaccgagaaagagaaggtgaaaaagagaaggcctcatggagagctgagaaagatagggaatctctccgtcgtactaaaaatgagactgatgaagatggatggaccacagtacgacgttaagtctcaagataatggatttaaactggtgtcttaaataggtttgatcacattcaaggattattatacttgtgcttcaaccaatctaaattggattctttaatgttgtttcaccataacacaaaaagcatgaacttgtattaatcctatataatagattgatcatgcaccatatccacaggaggttggaaaaaccatgccattttctggaatttaagggtgttgcattatttcatcaatcatttgttgacaaaaaagaaaaactaaaaaataaatttaaaatgtgacccttcaggtattgagtaacacctttatcttggtatagaactgatactttttttttgattttgaaatatctgataataatttggaatgaagtaaggttctgttaaaatatatttgaagaccctttaaagcagtgaatctgaaacaattttcacacccttaagtggttgatacgtacctattttaggtattttgaggtatttaccataaactaaatttagaaattttttagattcacttgaagtaaacattacaaacattggatacggtggggttttctttagattttacttgagagaaggtgagtacaaagcaatttgcagttgttgtaatgacaagattactgcgcaagtgtgaatccaaacagtatagcttttaaattttaaagcatttggtaaattatcgctgagtttttttctgttgccaatagcaaactgcttttccattaatggagaattcatgcctttcaagcattttaaatatgacaatatttataaatgtatggtttggaggaatcgtttaaattctctttcctaattttctttcttttgaagatagattctttcaacaagtaatttgtagtaatgactgtgttgacttcaattttggagcgcagtagctatgttaaagatgaactatttggtctcattgaagccaacacagaacttgctgctgtgttttttcttcagtgataaataaaatacttacagaatttgttttagtgttga

SEQ ID NO: 2124 - DNA, 1949 bp, Homo Sapiens
  NM_003753
gggagagcagtttacgacagcgccggtcgtgtttacggcggcgcccgctgcgcgcgcatgtttcctcttttcctggtttctcaagagtgctgctgctaacgcggtccccggcacgcaccatctgttgccatcccggccggccgaggccattgcagattttggaagatggcaaagttcatgacacccgtgatccaggacaacccctcaggctggggtccctgtgcggttcccgagcagtttcgggatatgccctaccagccgttcagcaaaggagatcggctaggaaaggttgcagactggacaggagccacataccaagataagaggtacacaaataagtactcctctcagtttggtggtggaagtcaatatgcttatttccatgaggaggatgaaagtagcttccagctggtggatacagcgcgcacacagaagacggcctaccagcggaatcgaatgagatttgcccagaggaacctccgcagagacaaagatcgtcggaacatgttgcagttcaacctgcagatcctgcctaagagtgccaaacagaaagagagagaacgcattcgactgcagaaaaagttccagaaacaatttggggttaggcagaaatgggatcagaaatcacagaaaccccgagactcttcagttgaagttcgtagtgattgggaagtgaaagaggaaatggattttcctcagttgatgaagatgcgctacttggaagtatcagagccacaggacattgagtgttgtggggccctagaatactacgacaaagcctttgaccgcatcaccacgaggagtgagaagccactgcggagcatcaagcgcatcttccacactgtcaccaccacagacgaccctgtcatccgcaagctggcaaaaactcaggggaatgtgtttgccactgatgccatcctggccacgctgatgagctgtacccgctcagtgtattcctgggatattgtcgtccagagagttgggtccaaactcttctttgacaagagagacaactctgactttgacctcctgacagtgagtgagactgccaatgagccccctcaagatgaaggtaattccttcaattcaccccgcaacctggccatggaggcaacctacatcaaccacaatttctcccagcagtgcttgagaatggggaaggaaagatacaacttccccaacccaaacccgtttgtggaggacgacatggataagaatgaaatcgcctctgttgcgtaccgttaccgcaggtggaagcttggagatgatattgaccttattgtccgttgtgagcacgatggcgtcatgactggagccaacggggaagtgtccttcatcaacatcaagacactcaatgagtgggattccaggcactgtaatggcgttgactggcgtcagaagctggactctcagcgaggggctgtcattgccacggagctgaagaacaacagctacaagttggcccggtggacctgctgtgctttgctggctggatctgagtacctcaagcttggttatgtgtctcggtaccacgtgaaagactcctcacgccacgtcatcctaggcacccagcagttcaagcctaatgagtttgccagccagatcaacctgagcgtggagaatgcctggggcattttacgctgcgtcattgacatctgcatgaagctggaggagggcaaatacctcatcctcaaggaccccaacaagcaggtcatccgtgtctacagcctccctgatggcaccttcagctctgatgaagatgaggaggaagaggaggaggaagaagaggaagaagaagaggaagaaacttaaaccagtgatgtggagctggagtttgtccttccaccgagactacgagggcctttgatgcttagtggaatgtgtgtctaacttgctctctgacatttagcagatgaaataaaatatatatctgtttagtctttccctca

SEQ ID NO: 2125 - DNA, 1274 bp, Homo Sapiens
  NM_003754
atttccgcttccgcctccttctttctcgacaagatggccacaccggcggtaccagtaagtgctcctccggccacgccaaccccagtcccggcggcggccccagcctcagttccagcgccaacgccagcaccggctgcggctccggttcccgctgcggctccagcctcatcctcagaccctgcggcagcagcggctgcaactgcggctcctggccagaccccggcctcagcgcaagctccagcgcagaccccagcgcccgctctgcctggtcctgctcttccagggcccttccccggcggccgcgtggtcaggctgcacccagtcattttggcctccattgtggacagctacgagagacgcaacgagggtgctgcccgagttatcgggaccctgttgggaactgtcgacaaacactcagtggaggtcaccaattgcttttcagtgccgcacaatgagtcagaagatgaagtggctgttgacatggaatttgctaagaatatgtatgaactgcataaaaaagtttctccaaatgagctcatcctgggctggtacgctacgggccatgacatcacagagcactctgtgctgatccacgagtactacagccgagaggcccccaaccccatccacctcactgtggacacaagtctccagaacggccgcatgagcatcaaagcctacgtcagcactttaatgggagtccctgggaggaccatgggagtgatgttcacgcctctgacagtgaaatacgcgtactacgacactgaacgcatcggagttgacctgatcatgaagacctgctttagccccaacagagtgattggactctcaagtgacttgcagcaagtaggaggggcatcagctcgcatccaggatgccctgagtacagtgttgcaatatgcagaggatgtactgtctggaaaggtgtcagctgacaatactgtgggccgcttcctgatgagcctggttaaccaagtaccgaaaatagttcccgatgactttgagaccatgctcaacagcaacatcaatgaccttttgatggtgacctacctggccaacctcacacagtcacagattgcactcaatgaaaaacttgtaaacctgtgaatggaccccaagcagtacacttgctggtctaggtattaaccccaggactcagaagtgaaggagaaatgggttttttgtggtcttgagtcacactgagatagtcagttgtgtgtgactctaataaacggagcctaccttttgtaaattaaaaaaaaaaaaaaaaaaaa

SEQ ID NO: 2126 - DNA, 1127 bp, Homo Sapiens
  NM_003755
gtctcgttttcgcccgcttccgctctctggccgggcttgggctgcgtggagaatactttttgcgatgcctactggagactttgattcgaagcccagttgggccgaccaggtggaggaggagggggaggacgacaaatgtgtcaccagcgagctcctcaaggggatccctctggccacaggtgacaccagcccagagccagagctactgccgggagctccactgccgcctcccaaggaggtcatcaacggaaacataaagacagtgacagagtacaagatagatgaggatggcaagaagttcaagattgtccgcaccttcaggattgagacccggaaggcttcaaaggctgtcgcaaggaggaagaactggaagaagttcgggaactcagagtttgacccccccggacccaatgtggccaccaccactgtcagtgacgatgtctctatgacgttcatcaccagcaaagaggacctgaactgccaggaggaggaggaccctatgaacaaactcaagggccagaagatcgtgtcctgccgcatctgcaagggcgaccactggaccacccgctgcccctacaaggatacgctggggcccatgcagaaggagctggccgagcagctgggcctgtctactggcgagaaggagaagctgccgggagagctagagccggtgcaggccacgcagaacaagacagggaagtatgtgccgccgagcctgcgcgacggggccagccgccgcggggagtccatgcagcccaaccgcagagccgacgacaacgccaccatccgtgtcaccaacttgtcagaggacacgcgtgagaccgacctgcaggagctcttccggcctttcggctccatctcccgcatctacctggctaaggacaagaccactggccaatccaagggctttgccttcatcagcttccaccgccgcgaggatgctgcgcgtgccattgccggggtgtccggctttggctacgaccacctcatcctcaacgtcgagtgggccaagccgtccaccaactaagccagctgccactgtgtactcggtccgggacccttggcgacagaagacagcctccgagagcgcgggctccaagggcaataaagcagctccactctctcta

SEQ ID NO: 2127 - DNA, 1286 bp, Homo Sapiens
  NM_003756
ctctttcttcctgtctgcttggaaagatggcgtcccgcaaggaaggtaccggctctactgccacctcttccagctccaccgccggcgcagcagggaaaggcaaaggcaaaggcggctcgggagattcagccgtgaagcaagtgcagatagatggccttgtggtattaaagataatcaaacattatcaagaagaaggacaaggaactgaagttgttcaaggagtgcttttgggtctggttgtagaagatcggcttgaaattaccaactgctttcctttccctcagcacacagaggatgatgctgactttgatgaagtccaatatcagatggaaatgatgcggagccttcgccatgtaaacattgatcatcttcacgtgggctggtatcagtccacatactatggctcattcgttacccgggcactcctggactctcagtttagttaccagcatgccattgaagaatctgtcgttctcatttatgatcccataaaaactgcccaaggatctctctcactaaaggcatacagactgactcctaaactgatggaagtttgtaaagaaaaggatttttcccctgaagcattgaaaaaagcaaatatcacctttgagtacatgtttgaagaagtgccgattgtaattaaaaattcacatctgatcaatgtcctaatgtgggaacttgaaaagaagtcagctgttgcagataaacatgaattgctcagccttgccagcagcaatcatttggggaagaatctacagttgctgatggacagagtggatgaaatgagccaagatatagttaaatacaacacatacatgaggaatactagtaaacaacagcagcagaaacatcagtatcagcagcgtcgccagcaggagaatatgcagcgccagagccgaggagaacccccgctccctgaggaggacctgtccaaactcttcaaaccaccacagccgcctgccaggatggactcgctgctcattgcaggccagataaacacttactgccagaacatcaaggagttcactgcccaaaacttaggcaagctcttcatggcccaggctcttcaagaatacaacaactaagaaaaggaagtttccagaaaagaagttaacatgaactcttgaagtcacaccagggcaactcttggaagaaatatatttgcatattgaaaagcacagaggatttctttagtgtcattgccgattttggctataacagtgtctttctagccataataaaataaaacaaaatcttgactgcttgctcatttgaaaaaaaaaaaa

SEQ ID NO: 2128 - DNA, 6041 bp, Homo Sapiens
  NM_003760
caatcccacagagtattgatgaggaaactgaagtttggagcgatcacatcattttcccaaggtaacacaagtggcaagacagccgggaacccctaccccatccccttattcagcacatgaaataaacaaggggcatccaaatcttgcggcaacgcccccgggacatgcatcgtcccctggactctctcaaaccccttatccctctggacagaatgcaggtccaaccacgctggtataccctcaaacccctcagacaatgaattcacaacctcaaacccgttctccgtttttccagaggcctcaaatacagcctcctagagctaccatcccgaacagcagtccttccattcgtcctggtgcacagacacccactgcagtgtaccaggctaatcagcacatcatgatggttaaccatctgcccatgccgtacccagtgccccaggggcctcagtactgtataccacagtaccgtcatagtggccctccttatgttgggcccccccaacaatatccagttcaaccaccggggccaggtcctttttatcctggaccaggacctggggacttccccaatgcttatggaacgcctttttacccaagtcagccggtgtatcagtcagcacctatcatagtgcctacgcagcaacagccgcctccagccaagagagagaaaaaaactataagaattcgggatccaaaccagggaggtaaagacataacagaggagattatgtctggaggtggcagcagaaatcctactccacccataggaagacccacgtccacacctactcctcctcagcagctgcccagccaggtccccgagcacagccctgtggtttatgggactgtggagagcgctcatcttgctgccagcacccctgtcactgcagctagcgaccagaagcaagaggagaagccaaaaccagatccagtgttaaagtctccttccccagtccttaggctagtcctcagtggagagaagaaagaacaagaaggccagacatctgaaactactgcaatagtatccatagcagagcttcctctgcctccatcacctaccactgtttcttctgttgctcgaagtacaattgcagcccccacctcttctgctcttagtagccaaccaatattcaccactgctatagatgacagatgtgaactctcatccccaagagaagacacaattcctatacccagcctcacatcttgcacagaaacatcagaccctttaccaacaaatgaaaatgatgatgatatatgcaagaaaccctgtagtgtagcacctaatgatattccactggtttctagtactaacctaattaatgaaataaatggagttagcgaaaaattatcagccacggagagcattgtggaaatagtaaaacaggaagtattgccattgactcttgaattggagattctcgaaaatcccccagaagaaatgaaactggagtgtatcccagctcccatcaccccttccacagttccttcctttcctccaactcctccaactcctccagcttctcctcctcacactccagtcattgttcctgctgctgccactactgttagttctccgagtgctgccatcacagtccagagagtcctagaggaggacgagagcataagaacttgccttagtgaagatgcaaaagagattcagaacaaaatagaggtagaagcagatgggcaaacagaagagattttggattctcaaaacttaaattcaagaaggagccctgtcccagctcaaatagctataactgtaccaaagacatggaagaaaccaaaagatcggacccgaaccactgaagagatgttagaggcagaattggagcttaaagctgaagaggagctttccattgacaaagtacttgaatctgaacaagataaaatgagccaggggtttcatcctgaaagagacccctctgacctaaaaaaagtgaaagctgtggaagaaaatggagaagaagctgagccagtacgtaatggtgctgagagtgtttctgagggtgaaggaatagatgctaattcaggctccacagatagttctggtgatggggttacatttccatttaaaccagaatcctggaagcctactgatactgaaggtaagaagcagtatgacagggagtttctgctggacttccagttcatgcctgcctgtatacaaaaaccagagggcctgcctcctatcagtgatgtggttcttgacaagatcaaccaacccaaattgccaatgcgaactctggatcctcgaattttgcctcgaggaccagactttacaccagcctttgctgattttggaaggcagacacctggtggaagaggcgtacctttgttgaatgttgggtcacgaagatctcaacctggccaaagaagagaacccagaaagatcatcacagtttctgtaaaagaagatgtacacctgaaaaaggcagaaaatgcctggaagccaagccaaaaacgagacagccaagccgatgatcccgaaaacattaaaacccaggagctttttagaaaagttcgaagtatcttaaataaattgacaccacagatgttcaatcaactgatgaagcaagtgtcaggacttactgttgacacagaggagcggctgaaaggagttattgacctggtctttgagaaggctattgatgaacccagtttctctgtggcttacgcaaacatgtgtcgatgtctagtaacgctgaaagtacccatggcagacaagcctggtaacacagtgaatttccggaagctgctactgaaccgttgccagaaggagtttgaaaaagataaagcagatgatgatgtctttgagaagaagcagaaagaacttgaggctgccagtgctccagaggagaggacaaggcttcatgatgaactggaagaagccaaggacaaagcccggcggagatccattggcaacatcaagtttattggagaactctttaaactcaaaatgctgactgaagccatcatgcatgactgtgtggtgaagctgctaaagaaccatgatgaagaatccctggagtgcctgtgtcgcctgctcaccaccattggcaaagacttggactttgaaaaagcaaagccacgtatggaccagtactttaatcagatggagaaaattgtgaaagaaagaaaaacctcatctaggattcggttcatgcttcaagatgttatagacctaaggctgtgcaattgggtatctcgaagagcagatcaagggcctaaaactatcgaacagattcacaaagaggctaaaatagaagaacaagaagagcaaaggaaggtccagcaactcatgaccaaagagaagagaagaccaggtgtccagagagtggacgaaggtgggtggaacactgtacaaggggccaagaacagtcgggtactggacccctcaaaattcctaaaaatcactaagcctacaattgatgaaaaaattcagctggtacctaaagcacagctaggcagctggggaaaaggcagcagtggtggagcaaaggcaagtgagactgatgccttacggtcaagtgcttccagtttaaacagattctctgccctgcaacctccagcaccctcagggtccacgccatccacgcctgtagagtttgattcccgaaggaccttaactagtcgtggaagtatgggcagggagaagaatgacaagccccttccatctgcaacagctcggccaaatactttcatgaggggtggcagcagtaaagacctgctagacaatcagtctcaagaagagcagcggagagagatgctggagaccgtgaagcagctcacaggaggtgtggatgtggagaggaacagcactgaggctgagcgaaataaaacaagggagtcagcaaaaccagaaatttcagcaatgtcagctcatgacaaggctgcattatcagaagaggaactggagaggaagtcgaaatctatcattgatgaatttctacacattaatgattttaaggaagccatgcagtgtgtggaagagctgaatgcccagggcctactacatgtttttgtgagagtgggagtggagtccaccctggaaaggagccagatcaccagggatcacatgggccaattactctatcagctggtacagtcagaaaaactcagcaaacaggactttttcaaaggtttttcagaaactttggaattggcagatgacatggccattgatattccccatatttggttgtaccttgctgaactggtgacccccatgttaaaagaaggtggaatctccatgagagaacttaccatagaatttagcaaacctttacttcctgttggaagagctggggtcttgctatctgaaatattgcacctactatgcaaacaaatgagccataagaaagtgggagccttatggagggaggctgacctcagctggaaggactttttaccagaaggagaagatgtacataattttcttttggagcagaagttggacttcatagagtctgacagtccctgttcctctgaagcactttcaaagaaagaactgtctgccgaagagctgtataagcgactcgagaaactcattattgaggacaaagcgaatgatgaacagatctttgactgggtagaggctaatctagacgaaatccagatgagttcacctacattccttagagctttaatgactgctgtttgtaaagcagctattatagccgactcttctaccttcagagtggacactgctgttatcaagcagagagtgccgatcttactcaagtacctagactcagatacagagaaggaactgcaagcactttatgcactacaagcatcgatagtaaaacttgatcaacctgccaatttgctgcggatgttttttgattgtctatatgacgaggaggtgatctccgaggatgccttctacaaatgggagagcagcaaggaccctgcagagcagaatgggaagggcgtggctctgaaatctgtcacggcattcttcacgtggctgcgggaagcagaagaggagtctgaggataactaaaacttcaaatacacaaaatgaaacaaaagaaacaatttaagtatttttttaaaaagtttcacgtcttcgccaatcacagtgcagcaaggccaattctcgcagaaacccccacgtgtgcacgagtgggagaggggaaagagaaaaaaaggtgatcatggaggaaaaaggtactggataaaagtaaacttcaaaccttagggcgggagcactaaaaccaaaatacatgtattatttatagaaaatattttctgttttaatcttttctttttaaacaaggactcatacttaaaaaaatgtttagcaaaaaaaaaaaaagttgagaacttttaatttattttaaggactgcaaatgccagtgtaattttttaatttgcagtttctgtaaacaacttgtataatagaaaagcagagaaataaatttccctccccttcaagatgcacctcatgtttgttttaaggtatagcatttagtccagatttgagaaagtttggggtgaacaaggtaagaaagatttttttttttttggcatcaaatctttctgcctgcctctcagcttgcttcagaaaatttaaaaaatcacaatagtaatcaaaacatacataacattgaaacagaaggaaatgctgtggaccacagaactccaagaattgtttaaaaaaaaaaaagtgctaccctgagaaaagtactcttaatactcttgaaatctttagagcaactttaaggcttgtaaatacatagaacaaatatttaaaaaaacaaaaagaaattgactcagtactatttcttttcactttgaaaatataaagaacaaaataaagacaaacattgcaagtttaaaagaaagtaaagtgacttctcctttggacagctgctgcatgtgtgcccattcctgggggtgctgtctggctatttattgtctaattcaaatcactcctgaggggagagagataaaacgagagagagtgagagagtgtgtgtatgtgcgtgtatgcgcacgtatgtgcatgcacatgtatgtatgtatat

SEQ ID NO: 2129 - DNA, 5155 bp, Homo Sapiens
  NM_003762
gtggttgttcctcccctaaagcacagcataaatttggagagatgcatctaaactgcgtgtgggttcgggctcttttaggtgaatagggctcggcggatcgacttcctcgattatctccgtgccctggacccgccccctccgcctggcgccaggccgccgagcgccgatcggctcgatgagcggaggcgctgctgcggcgctgcggccgacgccgggtccgcaccaactgtctccccctcccagcttcttacctcggcttcctactccttcccccgcccgcccagcaccgccagcccgggagagctgccgggagttccccgggagcctcaggtggtgactatcctgttgagaagcaaaagatactttgcaagtaaaaaatatgcctcccaagtttaagcgccacctcaatgatgatgatgtcacaggttctgtgaaaagtgaaaggagaaatcttttggaagatgattcagatgaagaagaggacttttttctaaggggaccatctggaccaagatttggacctagaaatgataaaattaagcatgttcagaatcaagtggatgaagttattgatgtcatgcaagaaaatattacaaaggtaattgagagaggggagagactagatgaactacaggacaaatcagaaagcttatcggataatgcaacagcttttagcaacagatccaaacaacttcgaaggcaaatgtggtggcgtggatgcaaaataaaagccatcatggctttggttgctgctatccttttgctagtgattatcattcttatagtcatgaaataccgtacttgatttgatgacagagatcttcattaaacaagatctgggacagtaataaaagattgctgcataatttaaatgaaacctatgtgtatataactttcaaaacttctttttcaagaaactaagaggcaagtatcacttcaaattggaacgttgagaatgtccaattatcttctccctttctaacaaaatgttcttttaataattatgtttaaggcaaagagaactagcctctatttttccatatttcaaggatctaatttgaaactagatacttgccagttcattatttgtgtatataaacactgattataatatttcatattaatattttaatggcataaggacttgcattattgcattagggagcgggtcatgctgggggtcaggaagcctgtgtagagtaccaaattatatgctgaaagagatgcataaccattctgtcaatatttgcagaaatatagttcctttcatattacagttgttttgcaagcaatttccacatttataggtgtaacaaaagctaaatgttgtaaatgttgttgccctcaggtataactaaaaacattccagtaaatatatttttgactgtgtaagagaatgtgtagtaatttttttggcattggattatggaaatggaaatttttaaacagtgtgaaaaaacatggtatggcatcataaaactggagataataaagttattgaagagtgtcattggagtatttgaaaatgaccaatatatagctgccagtcatggtccagtctgttttctgttaaactccaataaagagagaccagtcagtcctaatgtgagtaaatgaaatttacaggtaacttacttactccttaattttattttagttaatagcctctaacttccaactatctcatttaccaaaagtacaaaaagtagcaaaaccatctattaatactttgaattttatatctttgcatttcctgttcatccttgaggagatgtatgttgcacaatcaaattttgcatcagccaacagtaatgagtagtagaaagtcaggaacctatgtgtatatatatatatatatatatatatatatatatatatatatatacacacaaacacacacacacacacacacacacacgcacacatatgataatcagtcagtcggtaaccaaatgctagagagtgaccattaacctaagcctgtttttataatgaaaaaatgtgttaactttaaaatatgccaacctccttgtgtcttttaaacaagtcagagtgaaaatacattgtcccctaaggtgtggggagaggaagctttataataaaattagtgattctgcagaaacttgtgcactggatatcttgacaatatgaatataaaactccctaaattaaaaatagggttaatagaaattatcagtatttaaatagggaaaaatgattttatgtttattttatttaggttttatttctttggtcatcttaatgcaaaatgaataaagcatagaatctgggtttggtgtttttttgtctgtttttaaaattctacaggattattactaggaggcaaaaaatgctgtttagaatggaaaaaatttgaagagagaaagcagactgagacactcaagacacctgcaagttatctaagaagatctaaatagaattactaaattttatagtttgcttagagcatttagaaggagataaaggtcttacatactatagtgtatattgtctttggtctctatgctctttgtaaatgtcaattaatataaacagcatctgaacagctaataaatcttttaagttaagatacccagaaaaatgagcatttttagaatttcagtagctaataattcaggaatggaaatattttaactgaatggacagaatcagtcctaacatttgtatgtatgtcctttatttgaattggaactaggctcataagtggttaattttccattagttgatgtagaaatctggtttctccataatatctacaagtgaagatgaagattacttctcaaaaagtatccatatttccagtgttccttttaataaaatatgccacttttaaataaataattacaaaatgtaaaattataaaatttttaaatttaaataataagtaacagtaaaattttttgacaatatatatgtcactgtctttgtaatttaaacatattgctgcctgggatatgggtaacagaattatcactcatggaactttgtagtagtgatggcttggtttgtaattcatcatttcatctttcttggtcttgattaatcctgaaatccttaaaatggctggcatggttatgactttattgtggtaaccttggagatataagccctcttacgatcaaaaacagaagaaaaaaatatattgttcaaactgatgccaggcctacctttattccctcccttaattactttttttctcattcagctcagatcatcctgcacttgaaaaatgaagttttaccaccatcaaaactatcattatttaacaacaagtgaagatcaacagaaaaattcaagtagctttgcaaatactagttgatactcagtgaaatcacgtcactattttgatgcctgaatccatacctttgtgatttatgtttaattacagaagcctattgccttgcagcaattttgttgttataatactgattaattggttactccttcttattataactcagtaatacctgtggtcatttggttcctctatcctgacaaagttcactggaaattgccctcagattttataaactgggggatttcttaattagataaaagttcattactgaagatggaatattatataagatggaggaagggtaattaatagacatgagatatagaaatactttgttagccctgctatagattgcctattgtagtctttctgtgcatttcaatagtctgtattaggaaattataacttcagcacttttgatagcaaaaattggcatctttcaattctgtatagtatgtgactatcctgtaaatgataatatgtgtacagactgagaaggcaggaatataaagtaattgaaatctctcattgccggtatactctaaaacatgcttgatgccttgtcagcatcattgcacacattgactctgtatttacatctgtatatacactatgattagaaaatatgcaagaaattgtttttccatgttaagaacaaatgccattagaagatgtccccttaattgtattgtcagagtattactatgtcaaggatgactgttctgttaacctaattttgtgttttcacatggaaatgtgattggactccatttttctgtgagttgagagtaagagcataagtcagtttgaaagcatttacaagtttgttttagaatgtagtaagggctgaaaggtgctctacttcttaacttgttttttccatgttgtagacaaatgaaatttgtctaaatgcttttgtctaaaaatgcatttgtctaaatgctttagattgatgtagggtttagatcctctttaatactttgagatagtcttattctgattttttttttcttctggaaaccaagtagaattagggatgggaatacaaatgcatttattctggcttctgttttattccaagaagcttcttggaacaaatcagtaggaattgaaaagaaagcatgaccaacccaattacaggggataaatgtaagcttgttaaagtaagcaccacaccatgtttctgtctccccagcacccagcacagtgctgtgaaccttggcagatgctagataaatgtgtgttgaatgaatgtgcctatgaagccacaaagatgccacatgttagtatatcagtgagaggtgactccacagtgctctctggagaagcaatatgagtgactgaagagtggggccttttgcttttgcctggatataggggtgctcttctactgtaattgggtgtggaaaaactctggctttatggtattccattaggttcttttcatttaaagtagtcttaaaatcaaagtatccaatattttaaagccacaaagtagattacataattagcagagattttagtcagtaaaatgttagaaatcaaactataagaaaattcaagtcctttattttgtgtcttgggtatatgtcattattttaaattccacactcccttatttaatcactttggtaagtgcctttgatgttttgaaatgtatagtgggagatgagcaaatgtaaatgtcatgtgccctgttccctagcttctcaattcctcataaccatttttaccagtgttgcaaagtttagacctttgtgttaatatcagaagtgtatttgtagcccctccatagtgaacaatgaaataaactatttcatagaaaacaaaaattaa

SEQ ID NO: 2130 - DNA, 5509 bp, Homo Sapiens
  NM_003764
agatgcggccgcggcggcgcggagctcgggcggccgtggaggaactcagcctcggccgcaggaggcgccgggagcggagccgccgggagtcgcgcaacaggtttccttctccatcgctgcgcccacaggggacgcgcgccctgccgggagaggggcttctcggttcgcactctcgctcccagtccaggcaaaatgaaagaccggctagcagaacttctggacttgtccaagcaatatgaccagcagttcccagacggggacgatgagtttgactcgccccacgaggacatcgtgttcgagacggaccacatcctggagtccctgtaccgagacatccgggacattcaggatgaaaaccagctgctggtggccgacgtgaagcggctgggaaagcagaacgcccgcttcctcacgtccatgcggcgcctcagcagcatcaagcgcgacaccaactccatcgccaaggccatcaaggcccggggcgaggtcatccactgcaagctgcgcgccatgaaggagctgagcgaggcggctgaggcccagcacggcccgcactcggcagtggcgcgcatttcgcgggcgcagtacaacgcgctcaccctcaccttccagcgcgccatgcacgactacaaccaggccgagatgaagcagcgcgacaactgcaagatccgcatccagcgccagctggagatcatgggcaaggaagtctcgggcgaccagatcgaggacatgttcgagcagggtaagtgggacgtgttttccgagaacttgctggccgacgtgaagggcgcgcgggccgccctcaacgagatcgagagccgccaccgcgaactgctgcgcctggagagccgcatccgcgacgtacacgagctcttcttgcagatggcggtgctggtggagaagcaggccgacaccctgaacgtcatcgagctcaacgtacaaaagacggtcgactacaccggccaggccaaggcgcaggtgcggaaggccgtgcagtacgaggagaagaacccctgccggaccctctgctgcttctgctgtccctgcctcaagtagcaggccggcccgggccgccaccgcccatcccagaccatggagcgcgctgggaaggacgcaccaaagccgggagctctgccctgcagggagttgccccaaccctttccggaactcagtctttagaaaagaaacgccaggttcaagaattgcaaaccagcctgtgcttggaaagatggttagttgataccgtccgatgattcttcagtaaagatagattcccacaaagttgtgcaatgtcattatatgacaccttgcactcttaccgtcttgacagaagccaagtaaggaactgaagttgtatctgactgtagggtgaatgtctgaggcctgcctcctaataaagactcaaggaggaagtcaattgggcatctgctaatagaatgaactcatgatggaaacttcagttcatttactttgtcctgaaaattccctggttctgttccattttgagcgaaattggccttgggaaaaaccacgttcttcctttccgattcttcatccggtctacgctatgcaattcctccccaaatatagatcttatttctgctcatttcccctacttattaaaatcacaccaaacacttactattttcttatctctttcactttttaaatatctttcaccaggttatattttggtattatttttccaaacatttttaagcactgaatatcgaacaagcactcaaattgaagtatcagtcatgttttgtgtatttttcgctgataaaaattatttaacatttatatttttacttgattacatatgcacatgtatgtaaatgtaaaatactaatattcactaatatatgtacataatgatcaattggtttaacttcttttatgtaagtatggtatataaatttcaagacgaacacttttctggctcttggtattggtttgcttgttttgagtttgtttcactccagtttgccccttcctagtccagtttgggtcaaacttcatgttaaacaactctgcattggttatggcggtagacatatggcggtagaaaatgtatacggagctagagacaactaacattcttggaaatactgcttttgttttactgtggaccattccttccatgcattgaaatggagaaattcaaagtaaaagaattctgtttttcaagcaagcttaataaacattacattatacacatatttttatacatttctggcttgaccatttagtttactttctcaattattgttaaaatttttctttttcctttttttttttttttttttgagatggagtctcactgtgttgcccaggctggagtgcagtggcaggatcttggctcattgcaacctctgtctcccaggttcgagcgattctcctgactcagcctcctgagaagttgggactctgggcgcgtgccacaatgtctggctaattttttatgtttttagtaaagacggtgtttcaccgtgttagccaggatggtcttgatctcctgacctcgtgatccgcccgcctcagcctcccatagtgctgggattacaggtgtgagccaccatgcctggccttttttccccccttttgagacagggtctccctttgtcacccaggctgaagtgcagtggcataatcatggcttactgcagccttaaactcccaggctcaagtgatcctcccacctcagcctacaaatagctgagactacagatatgtgccaccatgcccggctaatttttgtattttctgtagagacagggtttgccatgtggcccaggctggtctcaaacttgtgagcttgagcaatccgcccaccttggcctcccaaagtgctgagattacaggcctgagccactgaccctggccaaattttttttctactagctactgaggctgccacatctggatggaactgagtggagggggaaaagaatgaaaaactcaaaagaattcccatgagggtgtcttgctttctctcctgagttacaatactttagcaaaatcatgaggctttagagatatggtgtagtctgcaaacttcttaatgcccttacccacatttaccatgtttcctggccttcctctgtgtcaactcttagctcttcctaatcattatttaatacatgagtgagtttagtagtgatcatatttctcaggtcctttagaagctggaattttaaaagaattagaaggaggagtatgtgaattctttggagctcactgcctgacttgcttatgaccaggaaaatctatcccctgtatctaattttaatttcatggttaaatttgagaattgtggaaaccaagttccacaaggctattctcatatttctcccaatttctttttcagccaactccaaggatatgtatcacctttgacttaatttgctttctctaagggaaaggggaaaaaatgttcacatagctccactgcaatgttttttataatagaggagagatattgtaaatagagactgccagccagtttccacaaaaaaacgaagagttcataaatttgacatgtttgaacccataaagcattttctttgcttggaaccattataaaagtaagtgagttttcaggctctatatacattttaattcctcacgttttatattggagagttcggtacagactgtccattactgcaccaaaagaatgagtgaactgttacctatagggaaagaacacttcttcttcctgctgtttgggaaccatctcagtgtggcgtaatggttaggagtacagattccagatcctgtttcttagatttaaatcttgactctgccacatactagctgtctgactgaaccttggtttttctgtgcttcagtttcctcatctgtaaaacggagataacagtacttacctcatagagctgttgtgaaaagtgatgactgaatatgtaaaagcacctagaacagtgcctggcacatgctaagtgctttgttcattattgttgttattatgtaattttctctcagactgagagcactgttagtgacccaagtaaatttatagtttttaagtacagaggaaaaataaagcctattttttgttaacagtcttaataaataataaaatggaataaagaaaccaagaccccatcttctgtgaatattagggcttttttttttttgacagtcataaagatgttttcactatggcatttctatccctgtgtatatccaaacatgtcctgaagaagaaatgagatgttccaccaaaaacacgtaagcaggaagcagctgttctgctcagcttggcaggtgttctttcctaattcttcccaagctgtgagtcagaaagtcctggaaggagttgtaggaagttgtagaggctgggtcactgacctaagagaaggcatcatttggcccactgcacgtcctggcctattcaccaaagcccttcctggctctgactgccacaccaggcagtgggtgaaatgctggctttttccttaagaaattgtgttctagtgccaccaagagatgctgtagagctggctttaccaatctcatgatgcttgcttggcaactctgaaaggtgactttggccaagaagaccttgtggcaattctgcaaattttatacactcatatcttttagggtacaaaatgaaagaacaaatcacaaagaacaatagatccttcaggagctgaaggtaagaatcttttatagctattttaacatatacagtgactactttctactagccaaatatcaaattttacaactaccaccaagccacagattataggtggtaacaactccagaaatgtcctaactaggaaaggtgctcatctagtatgcatcggtatccaggataatatgagttagaattttaaaaatgtcagtcattcaaaaatatttgaactgtgacatcacagaagtaattttatggccttttaaggtaacaacttaaaaagagaacagtactctttttatatcaatgcctttacatttatttaaaaacagtcctaatgctttatagttaaatgtcatatgcagatatgttcaggctctaacatataaagttcctaacttgacaggaaactactgaagattgtgtacagcttaaaaaaaaaaatagggtaactatagtcttgatttttatgtataaattctatcattctatattttaccatcagacatatttctactcctttctttgaagtatgcgaagtatctccaactgcagcatgcaactcattcatttgtaatcaagacgatagtttgaaacacccaattgtaatcagagcaacagttgacttccttttgatagcggagttgaaaatcattgcaattaataaaatggggctattagaaatggaaaacgaataggatctagaatgtaacttcatcatataaatgatgagtgtctttgttatcaacacgttattaagaatgggcaagatgtccttatatactagaagcttttgtaaagtcatgtgtctattgataataaagattttcggaactgaaaaaa

SEQ ID NO: 2131 - DNA, 2474 bp, Homo Sapiens
  NM_003768
gacatcaccggccagccgggtggagtgagcggcgctgggctcgggctccggctccgcgggcggaagaggcggcggcggcggcagaagcggcggcggcggcggcgggagccgaggaggaggttccggacgctgcttaggaaccggggactcaggagtgcccgcgccctgagcgctcagctccagaggcgtcatggctgagtacgggaccctcctgcaagacctgaccaacaacatcacccttgaagatctagaacagctcaagtcggcctgcaaggaagacatccccagcgaaaagagtgaggagatcactactggcagtgcctggtttagcttcctggagagccacaacaagctggacaaagacaacctctcctacattgagcacatctttgagatctcccgccgtcctgacctactcactatggtggttgactacagaacccgtgtgctgaagatctctgaggaggatgagctggacaccaagctaacccgtatccccagtgccaagaagtacaaagacattatccggcagccctctgaggaagagatcatcaaattggctcccccaccgaagaaggcctgagcaagggggaggaagaggaggaaggttggaccttcatcagaccactcccttcccccatcctccaggagagggggcaagggcaacccaccatctacccacttactaacctggtcctaacccccttactgtgcgcgtgtgtgtgcgtgtgcgcacgctctggctgtttgtctatatgtctagctcatctagttcctcttcttaaggggatgggggtcaggggctaggggagggggctgagtttccccactttaggaggaggtgggggctatttctatgcaaatagaaatcagcacattcctcctacttccctttcctccactccccccatatctttaaagtgtggaagcagaaaggacctgcattttcctacattgaggagctgacataggggtaaggtatgggagaggtaggtggatccagggaaaagcagtggggacggaaggcaaagagaccactcaacccccacctggaaggggcaaagaaaagccagagttccatgtttgtactcctgtgctggactgtttcctgagtaccagcaggtccctttttgtctctcatgggcctagcataggtatgagccagggatcctttcctggtccctaagatcaaaccccatggagcagccagcgttagatgcccccacccacctgtactctggagagactgtgctgggaacatgtaccactgagcctgagatggggatgagggcagagagaggggagccccctcttccactcagttgttcctactcagactgttgcactctaaacctagggaggttgaagaatgagacccttaggttttaacacgaatcctgacaccaccatctatagggtcccaacttggttattgtaggcaaccttccctctctccttggtgaagaacatcccaagccagaaagaagttaactacagtgttttcctttgcaccgatccccaccccaattcaatcccggaagggacttacttaggaaacccttctttactagatatcctggccccctgggcttgtgaacacctcctagccacatcactacagtacagtgagtgaccccagcctcctgcctaccccaagatgcccctccccaccctgaccgtgctaactgtgtgtacatatatattctacatatatgtatattaaaactgcactgccatgtctgcccttttttgtggtgtctagcattaacttattgtctaggccagagcgggggtgggaggggaatgccacagtgaagggagtggcagaatcaaattgctacatagtccaaacaaaaaagaaggctttttcaaaaaacattaaattcacatgcagtctcagagactatttagacaaagttcaagttaggagcttttaggatgtgggagtaaaactttaatgggaggggagggctggctgctggaagaaggaagaagccagactggttagacagtactcttaactcctagcccagcctagcgtgccctgcccctctggccactgctgcagacacctgccttaacacacacacctctaggactccacagttttgccttaaaggaccttcccaagtctccctttccctgtctggcttctcccttaagaagagagagatacttgtagaattgggtggggggaatgagcatgaactgtccttccatttgggatatgttacattagagtgagagagagaataaggagcctttcttatggaagaaatgggagaagagagacagggttcttttcagcagagtctagtagtttctctgtaaggcaaaataatctaaaaagactaacctgcccacccactccttatattgctgtgagattgcccctatcttgtgctcttctgtctgcagtgtgcacggccttgttctaacccggaataaaggtgattgattgtattgcaaaaaaa

SEQ ID NO: 2132 - DNA, 2005 bp, Homo Sapiens
  NM_003773
tttcctctcagggggcagcaggaagtgaggagaaagggctgggatgggaggcgggagcggatgggagggaatggggtttatcaagtcctcggcgagctgcccaacgggcagcagctggcgcaagtagcctagctggagaggctcaccccaggaaggagggaggccaccgacctactgggccgacggactcccacacagttcctgagctggtgccaggcaggtgacacctcctgcagcccccagcatgcgggcaggcccaggccccaccgttacattggccctggtgctggcggtgtcatgggccatggagctcaagcccacagcaccacccatcttcactggccggccctttgtggtagcgtgggacgtgcccacacaggactgtggcccacgcctcaaggtgccactggacctgaatgcctttgatgtgcaggcctcacctaatgagggttttgtgaaccagaatattaccatcttctaccgcgaccgtctaggcctgtatccacgcttcgattctgccggaaggtctgtgcatggtggtgtgccacagaatgtcagcctttgggcacaccggaagatgctgcagaaacgtgtggagcactacattcggacacaggagtctgcggggctggcggtcatcgactgggaggactggcgacctgtgtgggtgcgcaactggcaggacaaagatgtgtatcgccggttatcacgccagctagtggccagtcgtcaccctgactggcctccagaccgcatagtcaaacaggcacaatatgagtttgagttcgcagcacagcagttcatgctggagacactgcgttatgtcaaggcagtgcggccccggcacctctggggcttctacctctttcctgactgctacaatcatgattatgtgcagaactgggagagctacacaggccgctgccctgatgttgaggtggcccgcaatgaccagctggcctggctgtgggctgagagcacggccctcttcccgtctgtctacctggacgagacacttgcttcctcccgccatggccgcaactttgtgagcttccgtgttcaggaggcccttcgtgtggctcgcacccaccatgccaaccatgcactcccagtctacgtcttcacacgacccacctacagccgcaggctcacggggcttagtgagatggacctcatctctaccattggcgagagtgcggccctgggcgcagctggtgtcatcctctggggtgacgcggggtacaccacaagcacggagacctgccagtacctcaaagattacctgacacggctgctggtcccctacgtggtcaatgtgtcctgggccacccaatattgcagccgggcccagtgccatggccatgggcgctgtgtgcgccgcaaccccagtgccagtaccttcctgcatctcagcaccaacagtttccgcctagtgcctggccatgcacctggtgaaccccagctgcgacctgtgggggagctcagttgggccgacattgaccacctgcagacacacttccgctgccagtgctacttgggctggagtggtgagcaatgccagtgggaccataggcaggcagctggaggtgccagcgaggcctgggctgggtcccacctcaccagtctgctggctctggcagccctggcctttacctggaccttgtaggggtctcctgcctagctgcctagcaagctggcctctaccacaagggctctcttaggcatgtaggaccctgcagggggtggacaaactggagtctggagtgggcagagcccccaggaagcccaggagggcatccataccagctcgcacccccctgttctaagggggaggggaagtccctgggaggccccttctctccctgccagaggggaaggagggtacagctgggctggggaggacctgaccctactcccttgccctagatagtttattattattattattttggggtctcttttgtaaattaaacataaaacaattgcttctctgcttggattttgt

SEQ ID NO: 2133 - DNA, 5408 bp, Homo Sapiens
  NM_003774
gttggctggagagtttgtgaaaagttgtgagccgagcaggaggaagtagggagagaggagttgggctgtgccggaggccgaggaccgagagggctcaggtgacccctggaaagcctgggtggctggaaaggagcctagcgcctgcatgaaaggaagaacctgctgggaagtacctgagctcgagctgtgggttccgccgcccttcccctgcgtggtggcttggtggccgcgtctgcgcctcagccctgagaatccggatggcggtgaggtggacttgggcaggcaagagctgcctgctgctggcgtttttaacagtggcctatatcttcgtggagctcttggtctctacttttcatgcctccgcaggagccggccgtgccagggagctggggtcaagaaggctctcagacctccagaaaaatacggaggatttgtctcgaccgctttataagaagccccctgcagattcccgtgcacttggggagtgggggaaagccagcaaactccagctcaacgaggatgaactgaagcagcaagaagaactcattgagagatacgccatcaatatttacctcagtgacaggatttccctgcatcgacacatagaggataaaagaatgtatgagtgtaagtcccagaagttcaactataggacacttcctaccacctctgttatcattgctttctataacgaagcctggtcgactttgctccgtaccattcacagtgttttagaaacttctcctgcagttcttttgaaagagatcatcttggtggatgacttgagtgacagagtttatttgaagacacaacttgaaacttacatcagcaatcttgatagagtacgcttgattaggaccaataagcgagaggggctggttagggcccgtctgattggggccactttcgccactggggacgtcctcactttcctggattgtcactgtgagtgtaattccggttggctggaaccgcttttggaaaggattgggagagatgaaacagcagttgtgtgtcctgttatagacacaattgattggaatacttttgaattctatatgcagataggggagcccatgattggtgggtttgactggcgtttaacatttcagtggcattctgtccccaaacaggaaagggacaggcggatatcaagaattgaccccatcagatcacctaccatggctggaggactgtttgctgtcagcaagaaatattttcagtaccttggaacgtatgacacaggaatggaagtgtggggaggtgaaaaccttgagctgtcttttagggtgtggcagtgtggtggcaaattggagatccacccgtgttcccacgtgggccatgtgttccccaagcgggcaccatatgctcgccccaatttcctacagaatactgctcgggcagcagaagtttggatggatgaatacaaagagcacttctacaatagaaaccctccagcaagaaaagaagcttatggtgatatttctgaaagaaaattactacgagagcggttgagatgcaagagctttgactggtatttgaaaaacgtttttcctaatttacatgttccagaggatagaccaggctggcatggggctattcgcagtagagggatctcgtctgaatgtttagattataattctcctgacaacaaccccacaggtgctaacctttcactgtttggatgccatggtcaaggaggcaatcaattctttgaatatacttcaaacaaagaaataaggtttaattctgtgacagagttatgtgcagaggtacctgagcaaaaaaattatgtgggaatgcaaaattgtcccaaagatgggttccctgtaccagcaaacattatttggcattttaaagaagatggaactatttttcacccacactcaggactgtgtcttagtgcttatcggacaccggagggccgacctgatgtacaaatgagaacttgtgatgctctagataaaaatcaaatttggagttttgagaaatagagcacaacagcactttcgtcatgagctgacagtagtgtcaagaaagtcaaagagccttaagagcctcagtgaagattgtattttattttatcaaaagccacctagcagtcatctgtggagcactggaaagctggggttcattttggtatatcacactgaaactgggtacccagagtgctgctgtttaatatttcacaatgccttacttattggttgttttatataagagttttgtcaatatggtctcttcttaaaagaagttgactatgaattgaaacacacaaaacatttaagtgccagacttaatattaaagaatgtaaaggtccaagtaaaatgaggtatgatttatgttgatgtgtaagttcaccgcacatcccactttttaacaaaactcatgaatgtgcagtttgagccattgctattttgattacatagaatttgtatttcttttttagccagcacattaaattttagattttattttttaatctaatttttttctaatcaaaaagaaaattgagcttaaggcaaaaggcctggttttagagatatgtgtaattggaagagggcatttgtttgagtgtgagtttggaggcctttttaacatgcagacatacccatatttaaatgaaatggggagatatttacattccgtactttgtaaacttgagctattggacttcactgatgtatatattaatacctcagattcctctgattttgtaagctgtcttctctgtgaacgtgtttgtgtgtgtagggcattttctgattgcacttccttaagttatgaatgtactagaaagggactcatccagaatactatgcctccctttgttaatgcttaatcatttaaagtaaacacaattgaagcctctctgaagttaaacccaactatgtttattaaaatgtgtgaaactgaaagtgggctaggttctaccaaggctgtggaactctcctacgagttctgctgatcaggaaatttaagaatttatcttaaaaatgcaaggaaaaaagactgccttggcaattgtgaatggtgctttcaatctcctagcaccgagcctggcacttaggcagctttcagtaagtgggtgaatgaatgactgaatgaatgaatgaatggctcagctgaggaatgtaactttggtcaagttattatgatgtgtttgggcttagttttctcattggtaaaatgtgggtgctggattggatcttaaagatcccttccagctctgaaatgctgattgtacagtatattcttcccagattgactcactgtgcaatctttacaatactttttatcttttcacttttgacataggtaatgttgttgagcagttgagcaatgttcagtccagttgtgaagctggagaagagaaatgggttttaaaaattaagtgaggggaggccgggtgcggtggctcacgcatgtaatcccagcactttgggaggccaaggcaggtggatcacgaggtcaggagatccagaccatcctggctaacatggtgaaacctcgtctctactaaaaatacaaaaaattagccagctgtggtggcgggcgcctgtagtcccagctactcaggaggctgaggcaggagaatggcgtgaacctgtgaggcagagcttacagtgagccgagatcgtgccactgcactccagcctgggcgacagagcaagactctgtctcaaaaaaaaaaaataataataaaataagtgagctgaactcacctgaagtggtttacttctgtgggttaagaagttctagtcagtgttcatagtcgtttcgttttgataattgttgaaccaattttgtttttaaaacctttagactctgaaagtaatattttgactaagaatgtaaatatttccaaactaaattactcgggaagtaaacgctttttttaaaagtatttttactggttttataccaatattatatgcagaaatcacaggatgaatttagaattaaatctcaattagttcactttggcctagatttatgaaaaatgcatgcctcgtaaagagtccactgtattcacgagtaaagttgcttttagtgttcacttgatgacttggagagtaggaattttgcaaaatctgaatttaaggaaattctttaggataaccatttcaaaaaataaaattgctatgcaatcttgaatattttctcttttgcctcgtaaaatgaaaatgcattcacagtttctgtaaattatttagcagccttaaagtttatcaaaaaattgtccagattccacgtgcagcatgcttggccctgcatttaatttaagaaggattaataataatgctctgaatttttcgaaagggattctcctaaacccacccacttctcttgcccaggctgctttttaaaaatatttttttattttttacttatttttaaattttctctttttatttatttttggttttcttgttagccacctgttatatgggagaacgaaaattgttatattttgaaagtacttattacattatttttattttagtatcttgatgctcctgtcaaaagggaaatgaggcttttaaaaataaagtaccttaattctttattgactttttgccctaaattgctaggtgtgacccagcaatcttttaggaagagattttacagtggtgctttatttatatcaataatccagtatagttaggctgttcattcctcataatagagtacataacagaaaagtgggactttcacattttcatatttaggcacgttccaatttaattccaaaaatactctgtaattctacatctaaaaaaaccgattccctaattcgaatttattggtaccaaagctctctttggctatagacaattaagagttgaccttttaagttaatgtatatgcttaaaaacagttttaggaaaatatttggtagacaaagagtttcaactttaaatgttcactatgtcatttagtgtccaactttacggataggttgactatctaaataggcatttttagtcattaaaaaaaatctagtcaccaggaggatccctataactcaaaataacttgtttgtaaaagaaaatttgtttacttacccattagtaagttcctgcatattcattataagatggcaaatcaaacttttctaggatgaagacagcttatttttaagttgtatagtcttagttggtttagggtctcaattttaattaataaaatacttggtttttatttgcttgtccttttgaattcctgttttaataattttaaaatgagcacaaagaacgttgaagttcagattaatctcttctgaatgatgtttttttcctctgtgatgagttgtttctgacttttttccttttgtatttgtaatgttgattaagatgtaaaataaaaagtgtgcctgattatttttgcaaaaaaaaaaaaaaaa

SEQ ID NO: 2134 - DNA, 1612 bp, Homo Sapiens
  NM_003775
gcaaggcgggtggctccaccctgcgtcgggcctcagtcagcccccgggggaggccatgaacgccacggggaccccggtggcccccgagtcctgccaacagctggcggccggcgggcacagccggctcattgttctgcactacaaccactcgggccggctggccgggcgcggggggccggaggatggcggcctgggggccctgcgggggctgtcggtggccgccagctgcctggtggtgctggagaacttgctggtgctggcggccatcaccagccacatgcggtcgcgacgctgggtctactattgcctggtgaacatcacgctgagtgacctgctcacgggcgcggcctacctggccaacgtgctgctgtcgggggcccgcaccttccgtctggcgcccgcccagtggttcctacgggagggcctgctcttcaccgccctggccgcctccaccttcagcctgctcttcactgcaggggagcgctttgccaccatggtgcggccggtggccgagagcggggccaccaagaccagccgcgtctacggcttcatcggcctctgctggctgctggccgcgctgctggggatgctgcctttgctgggctggaactgcctgtgcgcctttgaccgctgctccagccttctgcccctctactccaagcgctacatcctcttctgcctggtgatcttcgccggcgtcctggccaccatcatgggcctctatggggccatcttccgcctggtgcaggccagcgggcagaaggccccacgcccagcggcccgccgcaaggcccgccgcctgctgaagacggtgctgatgatcctgctggccttcctggtgtgctggggcccactcttcgggctgctgctggccgacgtctttggctccaacctctgggcccaggagtacctgcggggcatggactggatcctggccctggccgtcctcaactcggcggtcaaccccatcatctactccttccgcagcagggaggtgtgcagagccgtgctcagcttcctctgctgcgggtgtctccggctgggcatgcgagggcccggggactgcctggcccgggccgtcgaggctcactccggagcttccaccaccgacagctctctgaggccaagggacagctttcgcggctcccgctcgctcagctttcggatgcgggagcccctgtccagcatctccagcgtgcggagcatctgaagttgcagtcttgcgtgtggatggtgcagccaccgggtgcgtgccaggcaggccctcctggggtacaggaagctgtgtgcacgcagcctcgcctgtatggggagcagggaacgggacaggcccccatggtcttcccggtggcctctcggggcttctgacgccaaatgggcttcccatggtcaccctggacaaggaggcaaccaccccacctccccgtaggagcagagagcaccctggtgtgggggcgagtgggttccccacaaccccgcttctgtgtgattctggggaagtcccggcccctctctgggcctcagtagggctcccaggctgcaaggggtggactgtgggatgcatgccctggcaacattgaagttcgatcatggtaaaaaaaaaaaaaaaaaa

SEQ ID NO: 2135 - DNA, 2283 bp, Homo Sapiens
  NM_003778
tttccgcgttctcccctctccgcgggcagtgctagctcgccgcggccgcctccggggaccacctggcttcatgtgtggatttccacggctcttgcccagaggcgggtacactgtgttccaatgtgccacggaactcacgcagtggcactttgtggcttcatgaaggaagaggcaggccacgcaacacttcctccccaagccaaggagaagtatcacttttagaggcagaggagcggaaggcagtgggtgtgaccaaaagtgccatttgttaaagactgttggagcagaactactgagaaaaaccaggcattgtatcttcagttgtcatcaagttcgcaatcagattggaaaagctcaacttgaagctttcttgcctgcagtgaagcagagagatagatattattcacgtaataaaaaacatgggcttcaacctgactttccacctttcctacaaattccgattactgttgctgttgactttgtgcctgacagtggttgggtgggccaccagtaactacttcgtgggtgccattcaagagattcctaaagcaaaggagttcatggctaatttccataagaccctcattttggggaagggaaaaactctgactaatgaagcatccacgaagaaggtagaacttgacaactgcccttctgtgtctccttacctcagaggccagagcaagctcattttcaaaccagatctcactttggaagaggtacaggcagaaaatcccaaagtgtccagaggccggtatcgccctcaggaatgtaaagctttacagagggtcgccatcctcgttccccaccggaacagagagaaacacctgatgtacctgctggaacatctgcatcccttcctgcagaggcagcagctggattatggcatctacgtcatccaccaggctgaaggtaaaaagtttaatcgagccaaactcttgaatgtgggctatctagaagccctcaaggaagaaaattgggactgctttatattccacgatgtggacctggtacccgagaatgactttaacctttacaagtgtgaggagcatcccaagcatctggtggttggcaggaacagcactgggtacaggttacgttacagtggatattttgggggtgttactgccctaagcagagagcagtttttcaaggtgaatggattctctaacaactactggggatggggaggcgaagacgatgacctcagactcagggttgagctccaaagaatgaaaatttcccggcccctgcctgaagtgggtaaatatacaatggtcttccacactagagacaaaggcaatgaggtgaacgcagaacggatgaagctcttacaccaagtgtcacgagtctggagaacagatgggttgagtagttgttcttataaattagtatctgtggaacacaatcctttatatatcaacatcacagtggatttctggtttggtgcatgaccctgggtcttttggtgatgtttggaagaactgattctttgtttgcaataattttggcctagagacttcaaatagtagcacacattaagaacctgttacagctcattgttgagctgaatttttcctttttgtattttcttagcagagctcctggtgatgtagagtataaaacagttgtaacaagacagctttcttagtcattttgatcatgagggttaaatattgtaatatggatacttgaaggactttatataaaaggatgactcaaaggataaaatgaacgctatttgaggactctggttgaaggagatttatttaaatttgaagtaatatattatgggataaaaggccacaggaaataagactgctgaatgtctgagagaaccagagttgttctcgtccaaggtagaaaggtacgaagatacaatactgttattcatttatcctgtacaatcatctgtgaagtggtggtgtcaggtgagaaggcgtccacaaaagaggggagaaaaggcgacgaatcaggacacagtgaacttgggaatgaagaggtagcaggagggtggagtgtcggctgcaaaggcagcagtagctgagctggttgcagctgctgatagccttcaggggaggacctgcccaggtatgccttccagtgatgcccaccagagaatacattctctattagtttttaaagagtttttgtaaaatgattttgtacaagtaggatatgaattagcagtttacaagtttacatattaactaataataaatatgtctatcaaatacctctgtagtaaaatgtgaaaaagcaaaaaaaaaaaaaaaaaaaaaa

SEQ ID NO: 2136 - DNA, 1704 bp, Homo Sapiens
  NM_003782
gaggcgggggaggggccgtgagtgccgcagtcggccagccatggagcggagcttgctggcggcgaggccgcggcgacaaggtagccacccccgcagcatgcctcgaccgcggtccgcagctgcaccgcctctccccgccccccagggtgcgctggtcccggtcgcgcgctcagacctccgcatcccgggcgtggtcggttaagtccccggccgtgacccaggcccggggagctagtctccgcccttcgctcttacggatcccctcggagtacgccgcaccatgcagctcaggctcttccggcgcctccttctcgccgctttgctgctggtgatcgtctggaccctcttcgggccttcggggttgggggaggagctgctgagcctctcactagcctccctgctcccagcccccgcctcaccggggccgcccctggccctgccccgcctcttgatccccaaccaggaagcttgcagtggtcccggggcccctcccttcctgctcatcctggtgtgcacggctccggagaacctgaaccagagaaacgccattcgggcttcgtggggcgggctgcgcgaggcccgggggctcagggtacagacgctattcttgctgggagagccgaacgcacagcaccccgtgtggggttcccaggggagtgacctggcctcggagtcagcagcccagggggatatcttgcaggccgccttccaggactcctaccgcaacctcaccctaaagaccctcagcgggctgaactgggctgagaaacactgccccatggcccgatacgtcctcaagacggacgatgatgtgtatgtcaacgtccctgaactggtatcagagctggtcttgcgagggggccgttgggggcaatgggagagaagcacggaaccccagagagaggctgagcaggaaggaggccaggttttgcacagcgaggaagtgcctcttctgtacttgggccgggtgcactggcgcgtgaacccctctcggacaccggggggcaggcaccgcgtatcagaggagcagtggcctcacacctggggcccctttccaccctatgcctcaggcacggggtatgtgctgtcagcgtctgctgtgcagctcattctcaaggtggccagccgggcaccccttctcccattagaggatgtctttgtgggggtaagtgcccgacgaggaggcctcgccccaacacagtgtgtcaagctggctggtgccacccactacccgctagaccggtgctgctatgggaaattcctgctgacgtcccacaggctggacccctggaagatgcaggaagcctggaagctggtgggtggctctgacggggaaaggactgcgcccttttgctcctggttccagggagtcctgggcatcctgcggtgtcgagcaatagcctggcttcagagctgagagtgcctggggccacaggaaaggcaggaacaggaccttctctctcccaggcccaacgcaggggccctcactggctgcagctgatctgtttccttataccagatcctcagtctcactaaagacagcgatatgggagacacccaggggcctggcccgccagcccaaaagatggtcatcgggaagagaaaaagaaaaaaatgctgcagttgttctctcaagctagggcagaagaggggtgtcaagctcctcaataaacttgtctccacttcaaaaaaaaaaaaaaaaaa

SEQ ID NO: 2137 - DNA, 1496 bp, Homo Sapiens
  NM_003789
gcacacccggaagcggcggagtagagcggagcctggcgggcgtgggaacccaggccccgccgaggcggccaggaggtgagatggcagctgggcaaaatgggcacgaagagtgggtgggcagcgcatacctgtttgtggagtcctcgctggacaaggtggtcctgtcggatgcctacgcgcacccccagcagaaggtggcagtgtacagggctctgcaggctgccttggcagagagcggcgggagcccggacgtgctgcagatgctgaagatccaccgcagcgacccgcagctgatcgtgcagctgcgattctgcgggcggcagccctgtggccgcttcctccgcgcctaccgcgagggggcgctgcgcgccgcgctgcagaggagcctggcggccgcgctcgcccagcactcggtgccgctgcaactggagctgcgcgccggcgccgagcggctggacgctttgctggcggacgaggagcgctgtttgagttgcatcctagcccagcagcccgaccggctccgggatgaagaactggctgagctggaggatgcgctgcgaaatctgaagtgcggctcgggggcccggggtggcgacggggaggtcgcttcggcccccttgcagcccccggtgccctctctgtcggaggtgaagccgccgccgccgccgccacctgcccagacttttctgttccagggtcagcctgtagtgaatcggccgctgagcctgaaggaccaacagacgttcgcgcgctctgtgggtctcaaatggcgcaaggtggggcgctcactgcagcgaggctgccgggcgctgcgggacccggcgctggactcgctggcctacgagtacgagcgcgagggactgtacgagcaggccttccagctgctgcggcgcttcgtgcaggccgagggccgccgcgccacgctgcagcgcctggtggaggcactcgaggagaacgagctcaccagcctggcagaggacttgctgggcctgaccgatcccaatggcggcctggcctagaccaggggtgcagccagcttttggagaacctggatggccttagggttccttctgcggctattgctgaacccctgtccatccacgggaccctgaaactccacttggcctatctgctggacctgctggggcagagttgattgccttccccaggagccagaccactgggggtgcatcattggggattctgcctcaggtactttgatagagtgtggggtgggggggacctgctttggagatcagcctcaccttctcccatcccagaagcggggcttacagccagcccttacagtttcactcatgaagcaccttgatctttggtgtcctggacttcatcctgggtgctgcagatactgcagtgaagtaaaacaggaatcaatcttgcctgcccccagctcacactcagcgtgggaccccgaatgttaagcaatgataataaagtataacacggattttgatgtgagaaaaaaaaaaaaaaaa

SEQ ID NO: 2138 - DNA, 4354 bp, Homo Sapiens
  NM_003791
gacagacagggcacgctgggtcggcggagctgaggctcccagctgtgggcctcgctggcccggtcgcccagtctcgcgagagttgggagtaaacagccccgaatggagtgcccaggcgtgttcgccgcggaggcgccgttatcccgggcccgccggccctgagctcccggcggcgcagattggctcacagtggttgattgatcaaccccattggacgttggttctgtggtacaaatggagtacaggactcagtcgtcacggcctgagtgagagaagccttatttccaagatggagaagaagcggagaaagaaatgaaagcctctcttcaggctgaaccacaaaaggccatgggatttaacttttatttatgttgggcaagactgtaagatggctgattagtaatgttgcagcttttagctgaaacaaaaattcacttttaatcaagaagaaaaaagtgtgatttgaatatatgcaattttatgatcatattcgcttgtgaccatgaagcttgtcaacatctggctgcttctgctcgtggttttgctctgtgggaagaaacatctgggcgacagactggaaaagaaatcttttgaaaaggccccatgccctggctgttcccacctgactttgaaggtggaattctcatcaacagttgtggaatatgaatatattgtggctttcaatggatactttacagccaaagctagaaattcatttatttcaagtgccctgaagagcagtgaagtagacaattggagaattatacctcgaaacaatccatccagtgactaccctagtgattttgaggtgattcagataaaagaaaaacagaaagcggggctgctaacacttgaagatcatccaaacatcaaacgggtcacgccccaacgaaaagtctttcgttccctcaagtatgctgaatctgaccccacagtaccctgcaatgaaacccggtggagccagaagtggcaatcatcacgtcccctgcgaagagccagcctctccctgggctctggcttctggcatgctacgggaaggcattcgagcagacggctgctgagagccatcccgcgccaggttgcccagacactgcaggcagatgtgctctggcagatgggatatacaggtgctaatgtaagagttgctgtttttgacactgggctgagcgagaagcatccccacttcaaaaatgtgaaggagagaaccaactggaccaacgagcgaacgctggacgatgggttgggccatggcacattcgtggcaggtgtgatagccagcatgagggagtgccaaggatttgctccagatgcagaacttcacattttcagggtctttaccaataatcaggtatcttacacatcttggtttttggacgccttcaactatgccattttaaagaagatcgacgtgttaaacctcagcatcggcggcccggacttcatggatcatccgtttgttgacaaggtgtgggaattaacagctaacaatgtaatcatggtttctgctattggcaatgacggacctctttatggcactctgaataaccctgctgatcaaatggatgtgattggagtaggcggcattgactttgaagataacatcgcccgcttttcttcaaggggaatgactacctgggagctaccaggaggctacggtcgcatgaaacctgacattgtcacctatggtgctggcgtgcggggttctggcgtgaaaggggggtgccgggccctctcagggaccagtgttgcttctccagtggttgcaggtgctgtcaccttgttagtgagcacagtccagaagcgtgagctggtgaatcccgccagtatgaagcaggccctgatcgcgtcagcccggaggctccccggggtcaacatgtttgagcaaggccacggcaagctcgatctgctcagagcctatcagatcctcaacagctacaagccacaggcaagtttgagccccagctacatagatctgactgagtgtccctacatgtggccctactgctcccagcccatctactatggaggaatgccgacagttgttaatgtcaccatcctcaacggcatgggagtcacaggaagaattgtagataagcctgactggcagccctatttgccacagaacggagacaacattgaagttgccttctcctactcctcggtcttatggccttggtcgggctacctggccatctccatttctgtgaccaagaaagcggcttcctgggaaggcattgctcagggccatgtcatgatcactgtggcttccccagcagagacagagtcaaaaaatggtgcagaacagacttcaacagtaaagctccccattaaggtgaagataattcctactcccccgcgaagcaagagagttctctgggatcagtaccacaacctccgctatccacctggctatttccccagggataatttaaggatgaagaatgaccctttagactggaatggtgatcacatccacaccaatttcagggatatgtaccagcatctgagaagcatgggctactttgtagaggtcctcggggcccccttcacgtgttttgatgccagtcagtatggcactttgctgatggtggacagtgaggaggagtacttccctgaagagatcgccaagctccggagggacgtggacaacggcctctcgctcgtcatcttcagtgactggtacaacacttctgttatgagaaaagtgaagttttatgatgaaaacacaaggcagtggtggatgccggataccggaggagctaacatcccagctctgaatgagctgctgtctgtgtggaacatggggttcagcgatggcctgtatgaaggggagttcaccctggccaaccatgacatgtattatgcgtcagggtgcagcatcgcgaagtttccagaagatggcgtcgtgataacacagactttcaaggaccaaggattggaggttttaaagcaggaaacagcagttgttgaaaacgtccccattttgggactttatcagattccagctgagggtggaggccggattgtactgtatggggactccaattgcttggatgacagtcaccgacagaaggactgcttttggcttctggatgccctcctccagtacacatcgtatggggtgacaccgcctagcctcagtcactctgggaaccgccagcgccctcccagtggagcaggctcagtcactccagagaggatggaaggaaaccatcttcatcggtactccaaggttctggaggcccatttgggagacccaaaacctcggcctctaccagcctgtccacgcttgtcttgggccaagccacagcctttaaacgagacggcgcccagtaacctttggaaacatcagaagctactctccattgacctggacaaggtggtgttacccaactttcgatcgaatcgccctcaagtgaggcccttgtcccctggagagagcggcgcctgggacattcctggagggatcatgcctggccgctacaaccaggaggtgggccagaccattcctgtctttgccttcctgggagccatggtggtcctggccttctttgtggtacaaatcaacaaggccaagagcaggccgaagcggaggaagcccagggtgaagcgcccgcagctcatgcagcaggttcacccgccaaagaccccttcggtgtgaccggcagcctggctgaccgtgagggccagagagagccttcacggacggcgctggtgggtgagccgagctgtggtggcggctggtttaaaagggatccagtttccagctgcaggtttgttagagtctgttctacatgggcctgccctcctgtgatgggcagaggctcctggtacatcgagaagattcctgtggatcccgtcaggagggacttagtggctctgccgccagtgagacttcccgccggcagctgtgcgcaccaaagactcgggagaactggaaaggctgtctggggtcttctgactgcaggggaaggatgtactttccaaacaaatgatacaaccctgaccaagctaaaagacgcttgttaaaggctattttctatatttattgttgggaaaagtcactttaaagacttgtgctatttggaagcaaagctattttttttgtcagtggaatgcagtttttttactattccatcatgaggaacaacatagattccatgatctttttaatgacagtacagactgagatttgaaggaaacatgcacaaatctgtaaaacatagaccttcgctttatttttgtaagtatcacctgccaccatgttttgtaatttgaggtcttgatttcaccattgtcggtgaagaaaattttcaataaatatgtattacccgtctgaagcttaaaaaaaaaa

SEQ ID NO: 2139 - DNA, 658 bp, Homo Sapiens
  NM_003792
gccggacggacgctcgtcttcgcccgccatggccgagagcgactgggacacggtgacggtgctgcgcaagaagggccctacggccgcccaggccaaatccaagcaggctatcttagcggcacagagacgaggagaagatgtggagacttccaagaaatgggctgctggccagaacaaacaacattctattaccaagaacacggccaagctggaccgggagacagaggagctgcaccatgacagggtgaccctggaggtgggcaaggtgatccagcaaggtcggcagagcaaggggcttacgcagaaggacctggccacgaaaatcaatgagaagccacaggtgatcgcggactatgagagcggacgggccatacccaataaccaggtgcttggcaaaatcgagcgggccattggcctcaagctccggggaaaggacattggaaagcccatcgagaaggggcctagggcgaaatgaacacaaagcctcgaaatcagtgcgctccagctgatctcgttccgccggttccccttggccgccagttccgttctcctcacgggccgaacggaacaaggggtccagcttgcgggggaccctccccagcccattcctgctgtcaaacaaacaaaaccttgcaaagcgaaaaaaaaaaaaaaaaaa

SEQ ID NO: 2140 - DNA, 2032 bp, Homo Sapiens
  NM_003793
ggaggactcaggccccgctggccgcgggctcggtacccggtgggtcggtggagcgtctgttgggtccgggccgccggcttcgccctcgccatggcgccctggctgcagctcctgtcgctgctggggctgctcccgggcgcagtggccgcccccgcccagccccgagccgccagctttcaggcctgggggccgccgtccccggagctgctggcgcccacccgcttcgcgctggagatgttcaaccgcggccgggctgcggggacgcgggccgtgctgggccttgtgcgcggccgcgtccgccgggcgggtcaggggtcgctgtactccctggaggccaccctggaggagccaccctgcaacgaccccatggtgtgccggctccccgtgtccaagaaaaccctgctctgcagcttccaagtcctggatgagctcggaagacacgtgctgctgcggaaggactgtggcccagtggacaccaaggttccaggtgctggggagcccaagtcagccttcactcagggctcagccatgatttcttctctgtcccaaaaccatccagacaacagaaacgagactttcagctcagtcatttccctgttgaatgaggatcccctgtcccaggacttgcctgtgaagatggcttcaatcttcaagaactttgtcattacctataaccggacatatgagtcaaaggaagaagcccggtggcgcctgtccgtctttgtcaataacatggtgcgagcacagaagatccaggccctggaccgtggcacagctcagtatggagtcaccaagttcagtgatctcacagaggaggagttccgcactatctacctgaatactctcctgaggaaagagcctggcaacaagatgaagcaagccaagtctgtgggtgacctcgccccacctgaatgggactggaggagtaagggggctgtcacaaaagtcaaagaccagggcatgtgtggctcctgctgggccttctcagtcacaggcaatgtggagggccagtggtttctcaaccaggggaccctgctctccctctctgaacaggagctcttggactgtgacaagatggacaaggcctgcatgggcggcttgccctccaatgcctactcggccataaagaatttgggagggctggagacagaggatgactacagctaccagggtcacatgcagtcctgcaacttctcagcagagaaggccaaggtctacatcaatgactccgtggagctgagccagaacgagcagaagctggcagcctggctggccaagagaggcccaatctccgtggccatcaatgcctttggcatgcagttttaccgccacgggatctcccgccctctccggcccctctgcagcccttggctcattgaccatgcggtgttgcttgtgggctacggcaaccgctctgacgttcccttttgggccatcaagaacagctggggcactgactggggtgagaagggttactactacttgcatcgtgggtccggggcctgtggcgtgaacaccatggccagctcggcggtggtggactgaagaggggcccccagctcgggacctggtgctgatcagagtggctgctgccccagcctgacatgtgtccaggcccctccccgggaggtacagctggcagagggaaaggcactgggtacctcagggtgagcagagggcactgggctggggcacagcccctgcttccctgcaccccattcccaccctgaagttctgcacctgcacctttgttgaattgtggtagcttaggaggatgtcggggtgaagggtggtatcttggcagttgaagctggggcaagaactctgggcttgggtaatgagcaggaagaaaattttctgatcttaagcccagctctgttctgcccccgctttcctctgtttgatactataaattttctggttcccttggatttagggatagtgtccctctccatgtccaggaaacttgtaaccacccttttctaacagcaataaagaggtgtccttgtcccgaaaaaaaaaaaaaaaaaaa

SEQ ID NO: 2141 - DNA, 1497 bp, Homo Sapiens
  NM_003795
agtccggccggaacctgtttgcgaccccgagtcccatgacaccgcttctcctcacaccccagtccgcagtgcccctccccagcctcggccgggcctcccgggagccgggcgtggcgttccagctagtgagccgtttctcccctgggctcggaggcggaagcttgaggggcgcggggaggagcttcgcgtgcggggtgaacgcccgctctacgtgctcgttctcttcgcgaccgctgcgcgcgagccccgtgtccccacggcgggcagcagcggcggcggcggcggctgaacgcggagggggcggagggagcccgcggcggcggcagcagctacagcgaaatggcggagaccgtggctgacacccggcggctgatcaccaagccgcagaacctgaatgacgcctacggaccccccagcaacttcctcgagatcgatgtgagcaacccgcaaacggtgggggtcggccggggccgcttcaccacttacgaaatcagggtcaagacaaatcttcctattttcaagctgaaagaatctactgttagaagaagatacagtgactttgaatggctgcgaagtgaattagaaagagagagcaaggtcgtagttcccccgctccctgggaaagcgtttttgcgtcagcttccttttagaggagatgatggaatatttgatgacaattttattgaggaaagaaaacaagggctggagcagtttataaacaaggtcgctggtcatcctctggcacagaacgaacgttgtcttcacatgtttttacaagatgaaataatagataaaagctatactccatctaaaataagacatgcctgaaatttggcaagaaggggcaaaaacgtgactattaatgattgataagcaccagtgaagaagttctaacttttagcatgctgcacagaaactggtataacatgccttcagtatactaacactcatatgctcagttttgttttgttttggcagttgacaagaagttaatttgctttagtaaaaatccctcattccagcctttctatataaatagctctttcttgctgttttaatgtggtgcacactatagcctcacaaacctgttattccagtgtaatctgcagtgtcgtaactaaagttactggcttggtcttatttgcacagtttttgcgtcttgtttgcttcttgcatctgattaactagaatatttctctttcccccttttaatttgtgatgtcacttgaccccatttatgtgtaggagcactacaccattggtttccaatactgcacacataagatacatacttgtgtgcagaaagtatcttcctccaggcttgtaatacccttcacatggaagattaatgagggaaatctttatattctgtataaaaacaaaagcaaatttatatactaaaatcatttgtctaaaaatttaagttgttttcaaataaaaattaaaatgcatttctgatatgcaaaaaaaaaaaaaaaaaaaaaaaaaaaaaaaaaa

SEQ ID NO: 2142 - DNA, 2445 bp, Homo Sapiens
  NM_003798
cgccgcggcgcggagtcccggctgcgggatagaccgagggccatggccgcctctcccggacccgccggcgttggcggcgccggagcagtctacggctccggctcttcgggcttcgccctcgactcgggactggagatcaaaactcgctcggtggagcagacgctactcccgctggtttctcagatcaccacgcttattaatcataaagataataccaaaaagtctgataaaactctgcaagcaattcagcgtgtaggacaagctgtcaacttggcagttggaagatttgttaaagtaggagaagctatagccaatgaaaactgggatttgaaagaagaaataaatattgcttgtattgaagctaaacaagcaggagaaacaattgcagcacttacagacataaccaacttgaaccatctggaatctgatgggcagatcacaatttttacagacaaaacaggagtgataaaggctgcaagattacttctttcttcagtgacaaaagtgttgttgctggcagaccgagtagtcattaaacagataataacatcaagaaataaggttctcgcaactatggaaagactagagaaagtgaatagctttcaagagtttgtccaaatattcagtcaatttggaaatgaaatggtggagtttgcacatctgagtggagatagacaaaatgatttgaaagatgaaaagaaaaaggcaaaaatggcagcagctagggcagttcttgaaaagtgtacaatgatgcttctcacagcttcaaagacatgtctgaggcatcctaactgcgaatcagcccataaaaacaaagaaggagtatttgaccgtatgaaagtggcattggataaggtcattgaaattgtgactgactgtaaaccgaatggagagactgacatttcatctatcagtatttttactggaattaaggaattcaagatgaatattgaagctcttcgggagaatctttattttcagtccaaagagaacctttctgtgacattggaagtcatcttggagcgtatggaggactttactgattctgcctacaccagccatgagcacagagaacgcatcttggaactgtcaactcaggcgagaatggaactgcagcagttaatttctgtgtggattcaagctcaaagcaagaaaacaaaaagcatcgctgaagaactggaactcagtattttgaaaatcagtcacagtcttaatgaacttaagaaagaacttcatagtacagcgacacagctggcagcagatctattaaaataccatgctgatcatgtggttctaaaagcattaaaacttactggagtagaaggaaatttagaagctttggctgaatatgcctgtaaactctctgaacagaaagagcagcttgttgagacctgtcgattgttacgacacatatctgggacagaacctctggaaataacctgtatacatgcagaggagacatttcaggtgactggccaacagataatttctgctgctgaaacattgacattgcatccatctagtaaaattgctaaagaaaacctagatgtattttgtgaagcttgggaatcccaaattagtgacatgtcaacactgctgagagaaatcaatgacgtgtttgaaggaagacgaggagagaagtatggctacctttcacttccaaagccaatgaagaataatgcaaacctgaaatcattaaagccagacaagcctgactctgaggagcaagccaagatagcaaagcttggacttaagctgggtttgctcacctctgacgctgactgcgaaattgagaagtgggaagatcaggagaatgagattgttcaatatggacggaacatgtccagtatggcctattctctgtatttatttactagaggagaggggccactgaaaacttcccaggatttaattcatcaactagaggtttttgctgcagagggtttaaagcttacttccagtgttcaagctttttcaaaacagctgaaagacgatgacaagcttatgcttctcctggaaataaacaagctaattcctctatgccaccagctccagacagtaactaagacttctttgcagaataaagtatttctaaaggttgacaagtgtattacgaagacaagatccatgatggctctcttagtccaacttctttcactttgttataaactgctgaagaagcttcagatggaaaataacggatgggtctcagttacaaataaggacactatggatagtaaaacttgagaagcttttggggtcagatctctggaacatcatgtgatgaagctgacatttttaaaaatcaaatgatcctttatcttttcagaaattcatcaattttataaagaaaacaatattgaaattttgctctattttctgatcatgaaactgattgtaaagctttttgacaactaataaatgtcttggtaattgctagattct

SEQ ID NO: 2143 - DNA, 6203 bp, Homo Sapiens
  NM_003799
aacagaatcgcgtttggctgtgctggatgtgtgaacctattgggtactgtacaacttcaagcctcgaaatcagataggcaccaccaacctcatttcctgtttcaccttgattttctgtgataccaaaatctcagcttcacaaagtcattgaaagtgttggttcatgaagttttaccatcaattcaagtaatcataaatggcaaattctgcaaaagcagaagaatatgaaaagatgtctcttgaacaggcaaaagcgtcagtgaattctgaaacagagtcttcattcaatattaatgaaaacacaacagcttctgggactgggctttctgaaaagacttctgtctgtaggcaagtagacatagcaagaaagagaaaagagtttgaagatgatcttgtaaaggaaagttctagttgtgggaaagacactccatccaagaagagaaaacttgatcctgaaattgtcccagaggaaaaagattgtggtgatgctgaaggcaattcaaagaaaagaaaaagagaaactgaggatgttccaaaagataaatcttctactggagatggcactcaaaataagagaaaaatagcacttgaggatgttcctgaaaagcagaaaaatctggaagaaggacacagctcaacagtggctgcccattacaatgaacttcaggaagttggtttggagaagcgtagtcaaagtcgtattttttacctaagaaactttaataattggatgaaaagtgttctcattggagaatttttggaaaaggtacgacagaagaaaaaacgtgatatcactgttttggacctgggatgtggtaaaggtggagatttgctgaaatggaaaaaaggaagaattaacaagctagtttgtactgatattgccgatgtttctgtcaaacagtgtcagcagcggtatgaggacatgaaaaatcgtcgtgatagtgaatatattttcagtgcagaatttataactgctgacagctcaaaggaacttctgattgacaaatttcgtgacccacaaatgtgttttgacatctgcagttgtcagtttgtctgtcattactcatttgagtcttatgagcaggctgacatgatgctgagaaatgcgtgtgagagacttagccctgggggctattttattggtactactcccaatagctttgaattgataagacgccttgaagcttcagaaacagaatcatttggaaatgaaatatatactgtgaaatttcagaagaaaggagattatcctttatttggctgcaaatatgacttcaacttggaaggtgttgtggatgttcctgaattcttggtctattttccattgctaaatgaaatggcaaagaagtacaatatgaaactagtctacaaaaaaacatttctggaattctacgaagaaaagattaagaacaatgaaaataaaatgctcttaaaacgaatgcaggccttggagccatatcctgcaaatgagagttctaaacttgtctctgagaaggtggatgactatgaacatgcagcaaagtacatgaagaacagtcaagtaaggttacctttgggaaccttaagtaaatcagaatgggaagctacaagtatttacttggtgtttgcctttgagaaacagcagtgagcacataggcagtagtcccagaggggccgtgttctgtcctgcacaaatttgaacaactcatctcgatatatttgatatttctctgtctgttgattttaattctaaatgtgcaggatgctgccagaaactccaatgtagaaattcaacatttgctgtctgtgacagatgaacttttgcatgtgtatataagaatgagttgggacctctgtctttaaaaatctatttttaggtaatgttctaagaattccatttgcctctatgatcttagctcataaaaatataatatgacttgataaagcaactaaactcttcccacagtgttcagatttgtcctgtgtgtgtttacagtattcaatttattgcagttatagaattggtcagagagcattttcatagtgtgctcatttctatggttttgttatatagcatttttcaacatttaatggtctgtacagttgaatgtaagtgttcaatatgtattgctgaagttataagtttaaaactcaatttcagatgctcataaaagttacttagctaaaattttagcaatttattgcattttgaaataatcattaacatgctgcaattcaggagctggttagaacattttaagtggcagcatagaattttggaattttggggctttcttttcagaaattgctaccatagtaattaatgtttccagttatcaagattgtgattagacacatttacctttcttcattgaacaaatggtgccatagttatttttctcaaaatttagtgaaaatccctcccatgtagacatgttgcacattttttccaaatttatacatggaactgcagtaggaatattctcaccatctgatgccatgtacccacttcagaaataagcaatacttgttcctctgttacaacctcagcactttgcaccgtaggagccattgttaaagttgtcacttgtgtaactgactgcttttccaaaactggtacttacgtgaactgttgtccttgctttacaccaccatttggaaaacttaccagtttttagatgtagatgtagtgaaaaacttcaagaatgaagcagagcaattgagtattcttttttaaattattaagccatgatttacaaaaacattactttctgtaattcacaatacttgttttaaaaacatagtgtcttcattagtgtgcatctattaactgttcatggtgttagagttgcaaactttttagcaagaaaatatggatttcctcatttcagttccttctgcagcctgtgaatctccacaaagtgttaccagtttacaaaaataagtctttttgccttaagtcattttggaaataagtaatactgcatctgactctggtggctgtattagctaggaaaggtttgtaaatggtgtcagtgaggtggggaaaggaagtcttcctgtcacatatgcaggttcgttttcattctagggcagtgccaggaagtatattgatagctttgtaggtacaggaaaaacatcatcattatttcctctgttcacatttactggtcttaattaacaggtaataataatacatgtacttttagcctgaaacctcttccacgccatgggtaacttgggggagagaagaatcctccaaacgatggagtagccagtggtaatacaaagcagggagaacagaaaggtagagttactaaggccttcagtgaacagaaaggagcagagagcaagattagatctgagaagatgctctggggactgagcccactgttgttggtgtcagggaggcttactggagccacacctgcaggcgctgtgttcaggcaccaccttcctccttgagctttgcctgtctcttgccttatcagttcttcctccaccaccctacacccccctccccccggccccaagcccctgtgtctccttgttacaattaagtttctggatattgacttaagaactgttaggaagaggactagaaaaggcttcccctgcctatcctctccgatcaccaaggtggaagggagctagtaggactcttccttgacacaccttgtagtctaaatgttcggtattctattcaggacttacggtaactattatgagggaggcatggctttccaccgtcgggccaggaagagcacctgttgctgcaagctcagtgaagtggggcactcccagacctgccatgcagtttatcctctgagaatggaattggaaatgaagacctaaccagctattggtgggaatgacggaactggggattgcgatgattgatctgggaacatggctggattgtgatttaaccaagaatgctgatgttgaattctttgggcctagaatatacttgagaaagcactagtggcttgtgttcagggagaggagctggcagtttttaaccacttctgtgggagccgtgttctaacctgtggaaagtattgcaattctgtgagagtgactctgcagagtcactgcaccatcaggcttggccctgctgtgccttcagtacccagccaggttctctgggtccagggtgactctccaaagaaattggccttcagctggagaaaacattgggtggagactctcacttatgttaatgcaatcttgaaatgactgaaaggtagattgccagcacagtgagtttcccagcctgctcccccatccacacttggaaattgagggagcatgaccgctctctgacttcacatgttaatagaggatcagagcagagttgggagtatattggtcaggatcatagaaaagaagacaaagcttgctcagccatgagatggccaggtatccagttttgttaactctctttgggaatttctttttcagcctgttttttagcttagtgccattatgtcattttgatttgtattcaagtactcttcaagtatctttgtaatgaaggtttggctacttgtataggtctgcctgcagggtgaaaatgccagtgtgaatattctagctaccaaacattgttttttgttgaaaaactgactttctgttgtctacctcaggccttgtgcatttgggttatctcaagccagtcaccacagagggtctctagggtctgcaaaatagaggccaaatccagggaccaggccctaataatagaagttgtaccaaaatgcctgtggtacttgatggcctgttggtcaaataggaagtacaagtgtgtgatgttagaacctccctagttgctgctatatcaaacactgcacacttgacaagtgttttcattccccgccctctgacagaacaacattcctaattctttgaaggcaaccagtgcaaaggctactacacttgtgtaatgatatttagcagatgcatacaggactggatcccagggcactgtcagttcttccctccctctcgtgctgctcagtttgtcctctgctcccatgtaggcctaaagtcaccccactccttagtgcctgcacctcaccacgatattgaggaagcacaggacatccaagggtactctccagtttggctgtggagacttgagcaagccctaaagtcccctgctccctggacttctcctgggttgtgcttttttgggggcaacataccttggacaaagctgagctgacagctaatgtttattagcctcctacctaagtcagtcactttgctaaattcttcacctgtggtaactcattttgattgttataacatctcagcaccattattcccattttaatgatgaggaaactgagtcatagaggatacagacttgcccaaaggagagccaggattttcacaccccctcctcaagctgggcctgccctccaagtgcttgttatatacctccacgggtgtcagcccagatgactcctcacccatccaccacctgcagcttgagatgttaactattagagctccattcttttggttcaaaacgttgatacttacttagatgttccctgagaggagtgtttatttctgagtaaggggctttgttgaaagagggggttagagagagcaagacagcacttgagtgcactggcaggaagcagagataagacttgaatttcagtttggtagaccaccttctttagcagcccaacctgtagcaaatctagtttagcctgcatggcagggagagggattctcttcccaccctcaccatttgcaagtggcaggagctgagaatgccagtacgagagtgtagccaaagtgagaggctgagagcaaaggagacatttttttcagttttgagtcgagtatccagacagaggcaaatcattttgtttaactttttattaaagtgtaactatagaaacacatcaatgatttttcacaagtggagcacgtgcatacaatcggcaccccagaagccccccgtcagattcccttccagttaactacctctccaagggaaaccactatcctgagttctaagcgcatagattagttctgtctggtttggggagatatataaatggaattatgcattcttcgtatctggtttcttttcaccaatattatgtttgtgagatttttgttgcatgtatttgtacatggattttcattctcatggttgtataatatttcattgtgtgaataaaccacatactgtttatctg

SEQ ID NO: 2144 - DNA, 4463 bp, Homo Sapiens
  NM_003800
gaagttgcggtgcattgtgggttctcctggagctgtggagttgatcctgaatgaaagtggcgcgccgcccctgacgttacccggatcggagaggttggaattcagattacggctgcgattcgggtgtctcggaccccggtgtgcaccggaccacggggaggcggctccaaaggcgcggtgaacgttggtgagggagggcagctctgcgcagccccaagacatggctcacaacaagatcccgccgcggtggctgaactgtccccggcgcggccagccggtggcaggaagattcttacctctgaagacaatgttaggaccaagatatgatagtcaagttgctgaagaaaatcggttccatcccagcatgctctcaaattacctaaagagcctaaaggttaaaatgggcttgttggtggacctgacaaatacttcaaggttctatgaccgaaatgacatagaaaaagaaggaatcaaatatataaaacttcagtgtaaaggacatggtgagtgccctaccactgagaatactgagacctttattcgtctgtgtgagcggtttaatgaaagaaatccacctgaacttataggtgttcattgtactcatggcttcaatcgcactggtttcctcatatgtgcctttttggtggagaaaatggattggagtatcgaagcagcagttgctacttttgcccaagccagaccaccaggaatctacaagggtgattatttgaaggaactttttcgtcggtatggtgacatagaggaagcaccacccccacctctattgccagattggtgttttgaggatgatgaagacgaagatgaggatgaggatggaaagaaggaatcagaacccgggtcaagtgcttcttttggcaaaaggagaaaagaacggttaaaactgggcgctattttcttggaaggtgttactgttaaaggtgtaactcaagtaacaacacaaccaaagttaggagaggtacagcagaagtgtcatcaattctgtggctgggaagggtctggattccctggagcacagcctgtttccatggacaagcaaaatattaaacttttagacctgaagccatacaaagtaagctggaaagcagatggtactcggtacatgatgttgattgatggcacaaatgaagtttttatgattgatagagacaattcagtatttcatgtttcaaatctggaatttccatttcgtaaagatcttcgtatgcatttatcaaatactctcttggatggcgagatgattattgacagagtaaatggacaggctgttcctagatatttgatatatgacataattaaattcaattcacagcccgttggagattgtgattttaatgttcgtctgcagtgtatagaacgagaaattataagtcctcgacacgaaaaaatgaagactgggctcattgacaaaacacaggaaccatttagcgtcagaaataagccgttttttgacatctgtacttcaagaaagctacttgaaggaaattttgccaaagaagtgagccatgaaatggatggacttatttttcagcctactggaaaatacaaacctggtcgatgtgatgatattttgaaatggaagcctcccagtctgaattctgtggattttcgtctaaaaataacaagaatgggaggagaagggttacttcctcagaatgttggcctcctgtatgttggaggttatgaaagaccctttgcacaaatcaaggtgacaaaagagctgaaacagtatgacaacaaaattatagaatgcaaatttgagaacaacagctgggtcttcatgagacagagaacagacaaaagttttcctaatgcctacaacactgccatggctgtgtgtaacagcatctcaaaccctgtcaccaaggagatgctgtttgagttcatcgacagatgtactgcagcttctcaaggacagaagcgaaaacatcatctggaccctgacacggagctcatgccaccaccacctcccaaaagaccacgccctttaacctaagacctgcctgtgacttgagggttaagaagaaagaggaatgaggaaaaaacgctgttgcccatttttgtagccagagaaattgaaaaacgactgtggcttgatgttgatacacatttgaattttttttaaaaaaagaaagttatcgtagccagcctgtaaatacttgatgcattcgtttcctcagtgctgcaatacatcgtggacttaaacatcttatttatctgataaactcagccttaccttgtggaatctgaagattgaaatatccaaaggtttaaacaagatggaaatcaatgaaaaagaggccttgtttatatatgggtagcttcacatttaatttataaagttaacaatctggaaactgtgagcccataaaacagtattttttagaagttgtgttacaactgtagcaaattttccttttaaaaaatccaggcaatggcattaaacattcttgctatcatttaccatggatttcctacatttctgagatccctgtattcaaaaacaaatgacagggttgttaagttgtactatattaaacaacttggtctggtttatatcattttaacaagttttttggaaatgtaaaagaaaaaagtaaagctccatttttgtgaattgcattgtttctaaaggaagtattttgagtattttcatctgtttgtattgtttcgactatgatatcagatatccagtgtgtccattctggcagtggttttgagttacttcatggaacttggacatacaccaccaggtcctttatgtgttgttctcctgggagacttctttttttaaatgccagggctacttctgctttacctcagtggtatcagcacattgtaaattacgttaaaacacacaactcactgtgatctatgggagtgatatcaaatacaaacgatgttgtgttccttctctcgaacaaaacagcaaagggaatgccagctaacttctttgattagaaggtaatgtcatggaatagaatgctgtcaccagaaaatgctctcccactgctagataaatgcagaggcaaagtgtagacatctgtaggaactaaatatcaaggaaatcaagacatttattttcaaagcgagaattctatctacattctattctgcggatgttatttctgttatacatctgaattttaaaatgtttactgatagataatggatttaaagggcggctaattgattgtctgccattgttgataaactgttctaattggtttgtgaaagaactctgagaattagctaaatggaggctagtgtatttatttttagaggtacatgttttaagtaaatgtatttaaaacaaattttcatggtctgaattgtatatgtaaatgcatatctgtgtaagtatatgcaagtgtatattcttctactgattcagtcagacacgaaatccaactgaattacccggtagactgaatatctgacgggatttctatatggacatagcacagatgaaccaaaaatgtatttatattcacctgagttttaatgtttttaaacaaagttttctcctgcagtgcttttctatatgaaatagttgagtcaagcttgggcttttttcttcgttgttcccaagtcatgtaatgtatagtgaatttatccaaaacgccattgtaacgttttttactagagtgtttttgcacatttgggcgctaaagggattaaaacaactgatgccacaatgactattgaaggagggaaaattctcaaggttccatagtatcttttacaaaatggattaaaaaaaaaatgcctatgcaacttcaaatagtctgatgcctgcttccccaggacgagtgactcttccacggtgtgctgctttccctccgagcctgtggaaaggcagagcccttttgcagatacgaaagcaagcttttgccaatgatctttaatggagttaaaatgtttatggtaattgtaacctttcaaatgagttacgtgaaaagagcatctcacttttaatacacccagatattttcttcaagtctttgtgcattttagcaggacttaattttcttaatttattctttcctttcaattatagtgacatagagtagttggccttataagtagatcccatttagcccctgaacataataccatctgcagtattataaaagtcatttagaaggtcagggggataatctagaggcaggattttggacattgtgaaggaaatgtgctccttctcagctcacttcaataactattttctgagactgaagttttttagacaagaataagaaaactttgctttcttcagttatcacatgtgaaagcttttgctttttgttaggaaaaggtgtggatgactctactgcgtggatggttacatttgctttccgtgaaatgctcagaaaatgtcaggacattccttttccaattgtgtgtcagtgcgtattgtaataaaactactgatttaaattagc

SEQ ID NO: 2145 - DNA, 1201 bp, Homo Sapiens
  NM_003805
gccattaacaaagatggtgcttatggggcaggttccctaacagtcaggattccggttgcagtttttctcccccgccccaaagatacgtggttgcagacggagaaatggaggccagagacaaacaagtactccgctcacttcgcctggagctgggtgcagaggtattggtggagggactggttcttcagtacctctaccaggaaggaatcttgacggaaaaccatattcaagaaatcaatgctcaaaccacaggcctccggaaaacaatgctcctgctggatatcctaccttccaggggccctaaagcatttgatacattcctagattccctacaggagtttccctgggtcagggagaagctgaagaaggcaagggaagaggccatgaccgacctgcctgcaggtgacagattgactgggatcccctcgcacatcctcaacagctccccatcagaccggcagattaaccagctggcccagaggctgggccctgagtgggagcccatggtgctgtctctgggactgtcccagacggatatctaccgctgtaaggccaaccacccccacaacgtgcagtcgcaggtggtggaggccttcatccgttggcggcagcgcttcgggaagcaggccaccttccagagcctgcacaacgggctgcgggctgtggaggtggacccctcgctgctcctgcacatgttggagtgatggtgcctccagcaaccgctggggagtgtgtccctgagtcatgtgggctgaatcctgactttcactcagagcaggtggttttttgtgtaggtttgttttttatttttgatgatcttcagatggaaggagaaaacagggtttccactagacattacttgaaaggccagattactcagcagatctcccatgttggctcaacaattctttgtttttaattgcttgaagattgcattgttgtaattgttcagtttttaaatgtgtaatggcattttaatagactagtaaatcacagtggttcaaaatatatatccatatatatatatatccatatatatatctcatgtcatcacattacaggcaggtgtctcatatgtaaaacatttacctgaatgttgtctgaggactgaactgtggactttactattcataatgataaaataataaaatgcgaattactatatataatgtgcctcactcatgagaaaaaaaaaaaaaaa

SEQ ID NO: 2146 - DNA, 1407 bp, Homo Sapiens
  NM_003809
ctctccccggcccgatccgcccgccggctccccctcccccgatccctcgggtcccgggatgggggggcggtgaggcaggcacagccccccgcccccatggccgcccgtcggagccagaggcggagggggcgccggggggagccgggcaccgccctgctggtcccgctcgcgctgggcctgggcctggcgctggcctgcctcggcctcctgctggccgtggtcagtttggggagccgggcatcgctgtccgcccaggagcctgcccaggaggagctggtggcagaggaggaccaggacccgtcggaactgaatccccagacagaagaaagccaggatcctgcgcctttcctgaaccgactagttcggcctcgcagaagtgcacctaaaggccggaaaacacgggctcgaagagcgatcgcagcccattatgaagttcatccacgacctggacaggacggagcgcaggcaggtgtggacgggacagtgagtggctgggaggaagccagaatcaacagctccagccctctgcgctacaaccgccagatcggggagtttatagtcacccgggctgggctctactacctgtactgtcaggtgcactttgatgaggggaaggctgtctacctgaagctggacttgctggtggatggtgtgctggccctgcgctgcctggaggaattctcagccactgcggcgagttccctcgggccccagctccgcctctgccaggtgtctgggctgttggccctgcggccagggtcctccctgcggatccgcaccctcccctgggcccatctcaaggctgcccccttcctcacctacttcggactcttccaggttcactgaggggccctggtctccccgcagtcgtcccaggctgccggctcccctcgacagctctctgggcacccggtcccctctgccccaccctcagccgctctttgctccagacctgcccctccctctagaggctgcctgggcctgttcacgtgttttccatcccacataaatacagtattcccactcttatcttacaactcccccaccgcccactctccacctcactagctccccaatccctgaccctttgaggcccccagtgatctcgactcccccctggccacagacccccagggcattgtgttcactgtactctgtgggcaaggatgggtccagaagaccccacttcaggcactaagaggggctggacctggcggcaggaagccaaagagactgggcctaggccaggagttcccaaatgtgaggggcgagaaacaagacaagctcctcccttgagaattccctgtggatttttaaaacagatattatttttattattattgtgacaaaatgttgataaatggatattaaatagaataagtcataaaaaaaaaaaaaaaaaaaaaa

SEQ ID NO: 2147 - DNA, 1953 bp, Homo Sapiens
  NM_003810
acagaacccagaaaaacaactcattcgctttcatttcctcactgactataaaagaatagagaaggaagggcttcagtgaccggctgcctggctgacttacagcagtcagactctgacaggatcatggctatgatggaggtccaggggggacccagcctgggacagacctgcgtgctgatcgtgatcttcacagtgctcctgcagtctctctgtgtggctgtaacttacgtgtactttaccaacgagctgaagcagatgcaggacaagtactccaaaagtggcattgcttgtttcttaaaagaagatgacagttattgggaccccaatgacgaagagagtatgaacagcccctgctggcaagtcaagtggcaactccgtcagctcgttagaaagatgattttgagaacctctgaggaaaccatttctacagttcaagaaaagcaacaaaatatttctcccctagtgagagaaagaggtcctcagagagtagcagctcacataactgggaccagaggaagaagcaacacattgtcttctccaaactccaagaatgaaaaggctctgggccgcaaaataaactcctgggaatcatcaaggagtgggcattcattcctgagcaacttgcacttgaggaatggtgaactggtcatccatgaaaaagggttttactacatctattcccaaacatactttcgatttcaggaggaaataaaagaaaacacaaagaacgacaaacaaatggtccaatatatttacaaatacacaagttatcctgaccctatattgttgatgaaaagtgctagaaatagttgttggtctaaagatgcagaatatggactctattccatctatcaagggggaatatttgagcttaaggaaaatgacagaatttttgtttctgtaacaaatgagcacttgatagacatggaccatgaagccagtttttttggggcctttttagttggctaactgacctggaaagaaaaagcaataacctcaaagtgactattcagttttcaggatgatacactatgaagatgtttcaaaaaatctgaccaaaacaaacaaacagaaaacagaaaacaaaaaaacctctatgcaatctgagtagagcagccacaaccaaaaaattctacaacacacactgttctgaaagtgactcacttatcccaagagaatgaaattgctgaaagatctttcaggactctacctcatatcagtttgctagcagaaatctagaagactgtcagcttccaaacattaatgcaatggttaacatcttctgtctttataatctactccttgtaaagactgtagaagaaagagcaacaatccatctctcaagtagtgtatcacagtagtagcctccaggtttccttaagggacaacatccttaagtcaaaagagagaagaggcaccactaaaagatcgcagtttgcctggtgcagtggctcacacctgtaatcccaacattttgggaacccaaggtgggtagatcacgagatcaagagatcaagaccatagtgaccaacatagtgaaaccccatctctactgaaagtacaaaaattagctgggtgtgttggcacatgcctgtagtcccagctacttgagaggctgaggcaagagaattgtttgaacccgggaggcagaggttgcagtgtggtgagatcatgccactacactccagcctggcgacagagcgagacttggtttcaaaaaaaaaaaaaaaaaaaacttcagtaagtacgtgttatttttttcaataaaattctattacagtatgtcatgtttgctgtagtgctcatatttattgttgtttttgttttagtactcacttgtttcataatatcaagattactaaaaatgggggaaaagacttctaatctttttttcataatatctttgacacatattacagaagaaataaatttcttacttttaatttaatatga

SEQ ID NO: 2148 - DNA, 4111 bp, Homo Sapiens
  NM_003816
cggcagggttggaaaatgatggaagaggcggaggtggaggcgaccgagtgctgagaggaacctgcggaatcggccgagatggggtctggcgcgcgctttccctcggggacccttcgtgtccggtggttgctgttgcttggcctggtgggcccagtcctcggtgcggcgcggccaggctttcaacagacctcacatctttcttcttatgaaattataactccttggagattaactagagaaagaagagaagcccctaggccctattcaaaacaagtatcttatgttattcaggctgaaggaaaagagcatattattcacttggaaaggaacaaagaccttttgcctgaagattttgtggtttatacttacaacaaggaagggactttaatcactgaccatcccaatatacagaatcattgtcattatcggggctatgtggagggagttcataattcatccattgctcttagcgactgttttggactcagaggattgctgcatttagagaatgcgagttatgggattgaacccctgcagaacagctctcattttgagcacatcatttatcgaatggatgatgtctacaaagagcctctgaaatgtggagtttccaacaaggatatagagaaagaaactgcaaaggatgaagaggaagagcctcccagcatgactcagctacttcgaagaagaagagctgtcttgccacagacccggtatgtggagctgttcattgtcgtagacaaggaaaggtatgacatgatgggaagaaatcagactgctgtgagagaagagatgattctcctggcaaactacttggatagtatgtatattatgttaaatattcgaattgtgctagttggactggagatttggaccaatggaaacctgatcaacatagttgggggtgctggtgatgtgctggggaacttcgtgcagtggcgggaaaagtttcttatcacacgtcggagacatgacagtgcacagctagttctaaagaaaggttttggtggaactgcaggaatggcatttgtgggaacagtgtgttcaaggagccacgcaggcgggattaatgtgtttggacaaatcactgtggagacatttgcttccattgttgctcatgaattgggtcataatcttggaatgaatcacgatgatgggagagattgttcctgtggagcaaagagctgcatcatgaattcaggagcatcgggttccagaaactttagcagttgcagtgcagaggactttgagaagttaactttaaataaaggaggaaactgccttcttaatattccaaagcctgatgaagcctatagtgctccctcctgtggtaataagttggtggacgctggggaagagtgtgactgtggtactccaaaggaatgtgaattggacccttgctgcgaaggaagtacctgtaagcttaaatcatttgctgagtgtgcatatggtgactgttgtaaagactgtcggttccttccaggaggtactttatgccgaggaaaaaccagtgagtgtgatgttccagagtactgcaatggttcttctcagttctgtcagccagatgtttttattcagaatggatatccttgccagaataacaaagcctattgctacaacggcatgtgccagtattatgatgctcaatgtcaagtcatctttggctcaaaagccaaggctgcccccaaagattgtttcattgaagtgaattctaaaggtgacagatttggcaattgtggtttctctggcaatgaatacaagaagtgtgccactgggaatgctttgtgtggaaagcttcagtgtgagaatgtacaagagatacctgtatttggaattgtgcctgctattattcaaacgcctagtcgaggcaccaaatgttggggtgtggatttccagctaggatcagatgttccagatcctgggatggttaacgaaggcacaaaatgtggtgctggaaagatctgtagaaacttccagtgtgtagatgcttctgttctgaattatgactgtgatgttcagaaaaagtgtcatggacatggggtatgtaatagcaataagaattgtcactgtgaaaatggctgggctcccccaaattgtgagactaaaggatacggaggaagtgtggacagtggacctacatacaatgaaatgaatactgcattgagggacggacttctggtcttcttcttcctaattgttccccttattgtctgtgctatttttatcttcatcaagagggatcaactgtggagaagctacttcagaaagaagagatcacaaacatatgagtcagatggcaaaaatcaagcaaacccttctagacagccggggagtgttcctcgacatgtttctccagtgacacctcccagagaagttcctatatatgcaaacagatttgcagtaccaacctatgcagccaagcaacctcagcagttcccatcaaggccacctccaccacaaccgaaagtatcatctcagggaaacttaattcctgcccgtcctgctcctgcacctcctttatatagttccctcacttgatttttttaaccttctttttgcaaatgtcttcagggaactgagctaatactttttttttttcttgatgttttcttgaaaagcctttctgttgcaactatgaatgaaaacaaaacaccacaaaacagacttcactaacacagaaaaacagaaactgagtgtgagagttgtgaaatacaaggaaatgcagtaaagccagggaatttacaataacatttccgtttccatcattgaataagtcttattcagtcatcggtgaggttaatgcactaatcatggattttttgaacatgttattgcagtgattctcaaattaactgtattggtgtaagatttttgtcattaagtgtttaagtgttattctgaattttctaccttagttatcattaatgtagttcctcattgaacatgtgataatctaatacctgtgaaaactgactaatcagctgccaataatatctaatatttttcatcatgcacgaattaataatcatcatactctagaatcttgtctgtcactcactacatgaataagcaaatattgtcttcaaaagaatgcacaagaaccacaattaagatgtcatattattttgaaagtacaaaatatactaaaagagtgtgtgtgtattcacgcagttactcgcttccatttttatgacctttcaactataggtaataactcttagagaaattaatttaatattagaatttctattatgaatcatgtgaaagcatgacattcgttcacaatagcactattttaaataaattataagctttaaggtacgaagtatttaatagatctaatcaaatatgttgattcatggctataataaagcaggagcaattataaaatcttcaatcaattgaacttttacaaaaccacttgagaatttcatgagcactttaaaatctgaactttcaaagcttgctattaaatcatttagaatgtttacatttactaaggtgtgctgggtcatgtaaaatattagacactaatattttcatagaaattaggctggagaaagaaggaagaaatggttttcttaaatacctacaaaaaagttactgtggtatctatgagttatcatcttagctgtgttaaaaatgaatttttactatggcagatatggtatggatcgtaaaattttaagcactaaaaattttttcataacctttcataataaagtttaataataggtttattaactgaatttcattagttttttaaaagtgtttttggtttgtgtatatatacatatacaaatacaacatttacaataaataaaatacttgaaattctcttttgtgtctcctagtagcttcctactcaactatttataatctcattaattaaaaagttataattttagataaaaattctagtcaaatttttacagatattatctcactaattttcagacttttgccaaagtgtgcacaatggctttttgttaataaagaacagattagttttgaagaaggcaaaaatttcagttttctgaagacagcatgttattttaacaatcaagtatacatattaaaaattgtgagcaatctcaaaaaaaaaaaaaaa

SEQ ID NO: 2149 - DNA, 2612 bp, Homo Sapiens
  NM_003817
aaaactgcccacctatctgtgaggtgcttcatccctgcagtggaagtgaggaggaagaaaggtgaactccttttctcaagcacttctgctctcctctaccagaatcactcagaatgcttcccgggtgtatattcttgatgattttactcattcctcaggttaaagaaaagttcatccttggagtagagggtcaacaactggttcgtcctaaaaagcttcctctgatacagaagcgagatactggacacacccatgatgatgacatactgaaaacgtatgaagaagaattgttgtatgaaataaaactaaatagaaaaaccttagtccttcatcttctaagatccagggagttcctaggctcaaattacagtgaaacattctactccatgaaaggagaagcgttcaccaggcatcctcagatcatggatcattgtttttaccaaggatccatagtacacgaatatgattcagctgccagtatcagtacgtgtaatggtctaaggggattcttcagaataaacgaccaaagatacctcattgaaccagtgaaatactcagatgagggagaacatttggtgttcaaatataacctgagggtgccgtatggtgccaattattcctgtacagagcttaattttaccagaaaaactgttccaggggataatgaatctgaagaagactccaaaataaaaggcatccatgatgaaaagtatgttgaattgttcattgttgctgatgatactgtgtatcgcagaaatggtcatcctcacaataaactaaggaaccgaatttggggaatggtcaattttgtcaacatgatttataaaaccttaaacatccatgtgacgttggttggcattgaaatatggacacatgaagataaaatagaactatattcaaatatagaaactaccttattgcgtttttcattttggcaagaaaagatccttaaaacacggaaggattttgatcatgttgtattactcagtgggaagtggctctactcacatgtgcaaggaatttcttatccagggggtatgtgcctgccctattattccaccagtatcattaaggatcttttacctgacacaaacataattgcaaacagaatggcacatcaactggggcataaccttgggatgcagcatgacgagttcccatgcacctgtccttcaggaaaatgcgtgatggacagtgatggaagcattcctgcactgaaattcagtaaatgcagccaaaaccaataccaccagtacttgaaggattataagccaacatgcatgctcaacattccatttccttacaattttcatgatttccaattttgtggaaacaagaagttggatgagggtgaagagtgtgactgtggccctgctcaggagtgtactaatccttgctgtgatgcacacacatgtgtactgaagccaggatttacttgtgcagaaggagaatgctgtgaatcttgtcagataaaaaaagcagggtccatatgcagaccggcgaaagatgaatgtgattttcctgagatgtgcactggccactcgcctgcctgtcctaaggaccagttcagggtcaatggatttccttgcaagaactcagaaggctactgtttcatggggaaatgtccaactcgtgaggatcagtgctctgaactatttgatgatgaggcaatagagagtcatgatatctgctacaagatgaatacaaaaggaaataaatttggatactgcaaaaacaaggaaaacagatttcttccctgtgaggagaaagatgtcagatgtggaaagatctactgcactggaggggagctttcctctctccttggagaagacaagacttatcaccttaaggatccccagaagaatgctactgtcaaatgcaaaactatttttttataccatgattctacagacattggcctggtggcgtcaggaacaaaatgtggagagggaatggtgtgcaacaatggtgaatgtctaaacatggaaaaggtctatatctcaaccaattgcccctctcagtgcaatgaaaatcctgtggatggccacggactccagtgccactgtgaggaaggacaggcacctgtagcctgtgaagaaaccttacatgttaccaatatcaccatcttggttgttgtgcttgtcctggttattgtcggtatcggagttcttatactattagttcgttaccgaaaatgtatcaagttgaagcaagttcagagcccacctacagaaaccctgggagtggagaacaaaggatactttggtgatgagcagcagataaggactgagccaatcctgccagaaattcatttcctaaataaacctgcaagtaaagattcaagaggaatcgcagatcccaatcaaagtgccaagtgagcttgaagttggatatccaaaatggccgtgcaagcttaggctggggattctggatgcaacgtctttacaaccttacctagatatctgctactcacatttttggtagtgtttcaaacgttctttatccagacagacaatgtttaagagaaacaacttatttctgttaatatttaccggtagaattcacaccctctatcataaacatatgctgcagaaaaaaaaaaaaaaaaaaaa

SEQ ID NO: 2150 - DNA, 2711 bp, Homo Sapiens
  NM_003818
gggagagggagctctcgggtcggggctagggaaggctgaccccgctcggcccgggtgaaagggcggtgacggcactgggtggggccgagctccagggctggctgctgggctgctaagggaactgtgagccgctcagagccgcgcgcctcccgggcggggcggggccggccgtgggagtccgcgcgtgcccgcgccgagctgcctgctccggcggcttcgctgctagctcgcggcgacgtcgggccgattttcccaggatgacagagctgaggcagagggtggcccatgagccggttgcgccacccgaggacaaggagtcagagtcagaagcaaaggtagatggagagactgcatcggacagtgagagccgggcagaatccgcacccctgccagtctctgcagatgataccccggaggtcctcaatagggccctttccaacttgtcttcaagatggaagaactggtgggtgagaggcatcctgactttggccatgattgcatttttcttcatcatcatttacctgggaccaatggttttgatgataatcgtgatgtgcgttcagattaagtgtttccatgagataatcactattggctacaacgtctaccactcatatgatctgccctggttcaggacgctcagctggtactttctcctgtgtgtaaactatttcttctatggtgagacagtgacggattacttcttcaccctggtccagagagaagagcctttgcggattctcagtaaataccaccggttcatttcctttactctctatctaataggattctgcatgtttgtactgagtctggtcaagaagcattatcgactgcagttctacatgtttggctggacccatgtgacattgctgattgttgtaacacagtcacatcttgttatccacaacctatttgaaggaatgatctggttcattgtccccatatcttgtgtgatctgtaatgacatcatggcctatatgtttggctttttctttggtcggaccccactcatcaagctgtccccgaagaagacctgggaaggcttcattgggggcttctttgctactgtggtgtttggccttctgctgtcctatgtgatgtccgggtacagatgctttgtctgccctgtggagtacaacaatgacaccaacagcttcactgtggactgtgagccctcggacctgtttcgcctgcaggagtacaacattcctggggtgatccagtcagtcattggctggaaaacggtccggatgtaccccttccagattcacagcatcgctctctccacctttgcctcgctcattggcccctttggaggattcttcgcaagtggattcaaacgagcctttaaaatcaaagactttgccaataccattcctggccatggaggcatcatggatcgctttgactgccagtatctgatggccacctttgtcaatgtatacatcgccagttttatcagaggccctaacccaagcaaactgattcagcagttcctgactttacggccagatcagcagctccacatcttcaacacgctgcggtctcatctgatcgacaaagggatgctgacatccaccacagaggacgagtaggggccacccagggccaggagaacaggaacagaactgagcaggggcaggtctccaaggcaagcccagctggtgtgacttagacaatgacgaggcttcaactcactgtcttttttttttttttttggagggtattttttatttgtgggttcaaaaaatctgtatatacagtctatgtgtttagaatttgtgttgtaagtaaactacagctttgagttggaaagaagtcacgggttgtaaaaccatttggatttttttaaaacaaaagtattaataatctggaagacagtgttgcccaggtcaggagtgttttcttggtggttccagcccccatcaattgaactgtttctgggctcagtcagacacagacattcatctgtgtctgaccaaatcaggggacttccccacctgtggtgggaggcacagcttagatgttttgtacacctggtcttttctagaaatccctgcttggagctgcagaagggttgccttctgtaggtcggaggaatggaggcttactaaccaggtaagccttctatgcatccacaccaaaatcctgcagaatgtaagtaagctctgctttataagatgggttcaccttcatcgcagactgaaagtttcagtttttatttttttcagaaagcacgaaaaattatttataatagtctggagaaaaaacacactgtaatatttcaagtgtatgcagtagaatgtactgtaactgagccctttcccacatgtctaggctccaatgtctcctgtaggtccacctaactgtgtgttttcagggacaatgccatccatgtttgtgctgtagacttgctgctgctgaatcctttctggggactttctcatcgggcagggagcagagggcttctcgttcatgcaccctttgcctgaacacccatgtagctgctgtgttgtgtatatattactcttaagaggagtgtgtgtgtctgtgtttgttttaaaagtcacttatttcttacagtgatttcaattgcaccatgacttcttcactaaaaccacaaagtcctgcttaaaactatggaaaacctaacctgattagagccttgactattttgaagattaaatgcacactttttatataaaaaaaaa

SEQ ID NO: 2151 - DNA, 3182 bp, Homo Sapiens
  NM_003819
ttcgaccagcagcgcccggggcgggcgggtataaatggagcggtggctccctcggccgcctctctccgccccgggtcgctgccgcctccgccgctttcgggcttcgcagcctgaggaaaaaaagagaaaaagataaaaaaaatctgaaaacgcttcaaaatcctgaaaaaaaaaaaggaaaagaaaaaacgaatcctcggagaacccgcggggaagtcactttcgtacgcttccggcctgccccgcgcccgccgccgcagcgcttggcgtccgtcggtctccgtccgtcggtccgggggtgagccgcccgcccggcccgccgtgccctccccccgctcgggccccgagccccgcgccccgcgcctgccccggcgcaccacgtgtccgtgctgcccttcgccgcccgcccggggctcgccgagtcggcgcccacaaagatttggtttccctctgccccggcggttgtaatcttaaaccgccggagcccgaggcctatatttatagagaaacgcgtgtccccgaggccgccgtgggcagcgtccggtcgcctcttaaaggatttttacccttcggaaggggattccccgtttaatttttttcctactttgattttttgaaatttggagcttcgcaccaggaccgcggagaagtgcaaagtcgcggggagggccgtattgtgcggagagccttttgtctgcggtgctgcggccgtgggagccggcccccgcctcccgtttccgtcccgtctccaagcccgccgactccagctcgtcctcgccgcgccggtgccacctgtgagccgcggcgcgggcccgggctccgaaggcgcccctttgtcctgcggcgggcccgataagaagtcctcctggcggggctcggggtggtggggggcggggagatgaacgctgcggccagcagctaccccatggcctccctgtacgtgggcgacctgcattcggacgtcaccgaggccatgctgtacgaaaagttcagccccgcggggcctgtgctgtccatccgggtctgccgcgatatgatcacccgccgctccctgggctatgcctacgtcaacttccagcagccggccgacgctgagcgggctttggacaccatgaactttgatgtgattaagggaaagccaatccgcatcatgtggtctcagagggatccctctttgagaaaatctggtgtgggaaacgtcttcatcaagaacctggacaaatctatagataacaaggcactttatgatactttttctgcttttggaaacatactgtcctgcaaggtggtgtgtgatgagaacggctctaagggttatgcctttgtccacttcgagacccaagaggctgccgacaaggccatcgagaagatgaatggcatgctcctcaatgaccgcaaagtatttgtgggcagattcaagtctcgcaaagagcgggaagctgagcttggagccaaagccaaggaattcaccaatgtttatatcaaaaactttggggaagaggtggatgatgagagtctgaaagagctattcagtcagtttggtaagaccctaagtgtcaaggtgatgagagatcccaatgggaaatccaaaggctttggctttgtgagttacgaaaaacacgaggatgccaataaggctgtggaagagatgaatggaaaagaaataagtggtaaaatcatatttgtaggccgtgcacaaaagaaagtagaacggcaggcagagttaaaacggaaatttgaacagttgaaacaggagagaattagtcgatatcagggggtgaatctctacattaagaacttggatgacactattgatgatgagaaattaaggaaagaattttctccttttggatcaattaccagtgctaaggtaatgctggaggatggaagaagcaaagggtttggcttcgtctgcttctcatctcctgaagaagcaaccaaagcagtcactgagatgaatggacgcattgtgggctccaagccactatatgttgccctggcccagaggaaggaagagagaaaggctcacctgaccaaccagtatatgcaacgagtggctggaatgagagcacttcctgccaatgccatcttaaatcagttccagcctgcagcgggtggctactttgtgccagcagtcccacaggctcagggaaggcctccatattatacacctaaccagttagcacagatgaggcctaatccacgctggcagcaaggtgggagacctcaaggcttccaaggaatgccaagtgctatacgccagtctgggcctcgtccaactcttcgccatctggctccaactgggtctgagtgcccggaccgcttggctatggactttggtggggctggtgccgcccagcaagggctgactgacagctgccagtctggaggcgttcccacagctgtgcagaacttagcgccacgcgctgctgttgctgctgctgctccccgggctgttgccccctacaaatacgcctccagtgtccgcagccctcatcctgccatacagcctctgcaggcaccccagcctgcggtccatgtgcaggggcaggagccactgactgcctccatgctggctgcagcacccccccaggaacagaagcagatgctgggagaacgcttgttcccactcatccaaacaatgcattcaaatctggctgggaagatcacgggaatgctgctggagatagacaactctgagctgctgcacatgttagagtcccccgagtctctccgctccaaggtggatgaagctgtagcagttctacaggctcatcatgccaagaaagaagctgcccagaaggtgggcgctgttgctgctgctacctcttagacaaggaaaaaccgattcaaaagccaaataaccccttatggaattcaactcaaggtttgaagacttcctagcttgtcctatggacctcaacaccaaggattacaaattgcaaatttaataggtcattttgtatcaaaaggtcaattatgaagcacctagaatttttcaattatacgaatatgttctttgggttctgctgtggcccagacagtgttaactttttttttattgtgggttttgattttttcccccagaaattggttttatttgatgtacccaagtcttacgtttcccaataaagaaaaaaaatctccataaaactgaaaaaaaaaaaaaaaaaaaaaaaaaa

SEQ ID NO: 2152 - DNA, 1730 bp, Homo Sapiens
  NM_003820
ccttcataccggcccttcccctcggctttgcctggacagctcctgcctcccgcagggcccacctgtgtcccccagcgccgctccacccagcaggcctgagcccctctctgctgccagacaccccctgctgcccactctcctgctgctcgggttctgaggcacagcttgtcacaccgaggcggattctctttctctttctctttctcttctggcccacagccgcagcaatggcgctgagttcctctgctggagttcatcctgctagctgggttcccgagctgccggtctgagcctgaggcatggagcctcctggagactgggggcctcctccctggagatccacccccaaaaccgacgtcttgaggctggtgctgtatctcaccttcctgggagccccctgctacgccccagctctgccgtcctgcaaggaggacgagtacccagtgggctccgagtgctgccccaagtgcagtccaggttatcgtgtgaaggaggcctgcggggagctgacgggcacagtgtgtgaaccctgccctccaggcacctacattgcccacctcaatggcctaagcaagtgtctgcagtgccaaatgtgtgacccagccatgggcctgcgcgcgagccggaactgctccaggacagagaacgccgtgtgtggctgcagcccaggccacttctgcatcgtccaggacggggaccactgcgccgcgtgccgcgcttacgccacctccagcccgggccagagggtgcagaagggaggcaccgagagtcaggacaccctgtgtcagaactgccccccggggaccttctctcccaatgggaccctggaggaatgtcagcaccagaccaagtgcagctggctggtgacgaaggccggagctgggaccagcagctcccactgggtatggtggtttctctcagggagcctcgtcatcgtcattgtttgctccacagttggcctaatcatatgtgtgaaaagaagaaagccaaggggtgatgtagtcaaggtgatcgtctccgtccagcggaaaagacaggaggcagaaggtgaggccacagtcattgaggccctgcaggcccctccggacgtcaccacggtggccgtggaggagacaataccctcattcacggggaggagcccaaaccactgacccacagactctgcaccccgacgccagagatacctggagcgacggctgctgaaagaggctgtccacctggcggaaccaccggagcccggaggcttgggggctccgccctgggctggcttccgtctcctccagtggagggagaggtggggcccctgctggggtagagctggggacgccacgtgccattcccatgggccagtgagggcctggggcctctgttctgctgtggcctgagctccccagagtcctgaggaggagcgccagttgcccctcgctcacagaccacacacccagccctcctgggccagcccagagggcccttcagaccccagctgtctgcgcgtctgactcttgtggcctcagcaggacaggccccgggcactgcctcacagccaaggctggactgggttggctgcagtgtggtgtttagtggataccacatcggaagtgattttctaaattggatttgaattcggctcctgttttctatttgtcatgaaacagtgtatttggggagatgctgtgggaggatgtaaatatcttgtttctcctcaaaaaaaaaaaaaaaaaaaaaaaaaa

SEQ ID NO: 2153 - DNA, 2588 bp, Homo Sapiens
  NM_003821
gagctcgggcggccggagctggtcgctgcgcgcgccggggggagggccggggctgcgagagaggaagctctttcgcggcgctacggcgttggcaccagtctctagaaaagaagtcagctctggttcggagaagcagcggctggcgtgggccatccggggaatgggcgccctcgtgacctagtgttgcggggcaaaaagggtcttgccggcctcgctcgtgcaggggcgtatctgggcgcctgagcgcggcgtgggagccttgggagccgccgcagcagggggcacacccggaaccggcctgagcgcccgggaccatgaacggggaggccatctgcagcgccctgcccaccattccctaccacaaactcgccgacctgcgctacctgagccgcggcgcctctggcactgtgtcgtccgcccgccacgcagactggcgcgtccaggtggccgtgaagcacctgcacatccacactccgctgctcgacagtgaaagaaaggatgtcttaagagaagctgaaattttacacaaagctagatttagttacattcttccaattttgggaatttgcaatgagcctgaatttttgggaatagttactgaatacatgccaaatggatcattaaatgaactcctacataggaaaactgaatatcctgatgttgcttggccattgagatttcgcatcctgcatgaaattgcccttggtgtaaattacctgcacaatatgactcctcctttacttcatcatgacttgaagactcagaatatcttattggacaatgaatttcatgttaagattgcagattttggtttatcaaagtggcgcatgatgtccctctcacagtcacgaagtagcaaatctgcaccagaaggagggacaattatctatatgccacctgaaaactatgaacctggacaaaaatcaagggccagtatcaagcacgatatatatagctatgcagttatcacatgggaagtgttatccagaaaacagccttttgaagatgtcaccaatcctttgcagataatgtatagtgtgtcacaaggacatcgacctgttattaatgaagaaagtttgccatatgatatacctcaccgagcacgtatgatctctctaatagaaagtggatgggcacaaaatccagatgaaagaccatctttcttaaaatgtttaatagaacttgaaccagttttgagaacatttgaagagataacttttcttgaagctgttattcagctaaagaaaacaaagttacagagtgtttcaagtgccattcacctatgtgacaagaagaaaatggaattatctctgaacatacctgtaaatcatggtccacaagaggaatcatgtggatcctctcagctccatgaaaatagtggttctcctgaaacttcaaggtccctgccagctcctcaagacaatgattttttatctagaaaagctcaagactgttattttatgaagctgcatcactgtcctggaaatcacagttgggatagcaccatttctggatctcaaagggctgcattctgtgatcacaagaccactccatgctcttcagcaataataaatccactctcaactgcaggaaactcagaacgtctgcagcctggtatagcccagcagtggatccagagcaaaagggaagacattgtgaaccaaatgacagaagcctgccttaaccagtcgctagatgcccttctgtccagggacttgatcatgaaagaggactatgaacttgttagtaccaagcctacaaggacctcaaaagtcagacaattactagacactactgacatccaaggagaagaatttgccaaagttatagtacaaaaattgaaagataacaaacaaatgggtcttcagccttacccggaaatacttgtggtttctagatcaccatctttaaatttacttcaaaataaaagcatgtaagtgactgtttttcaagaagaaatgtgtttcataaaaggatatttatatctctgttgctttgactttttttatataaaatccgtgagtattaaagctttattgaaggttctttgggtaaatattagtctccctccatgacactgcagtattttttttaattaatacaagtaaaaagtttgaattttgctacatagttcaatttttatgtctcttttgttaacagaaaccacttttaaaggatagtaattattcttgtttataacagtgccttaaggtatgatgtatttctgatggaagccattttcacattcatgttcttcatggattatttgttacttgtctaagatgcaatttgattttatgaagtatataccctttacccaccagagacagtacagaatccctgccctaaaatcccaggcttaattgccctacaaagggttattaatttaaaactccattattaggattacattttaaagttttatttatgaattccctttaaaaatgatatttcaaaggtaaaacaatacaatataaagaaaaaaataaatatattaataccggcttcctgtccccatttttaacctcagccttccctactgtcaccaacaaccaagctaaataaagtcaacagcctgatgtgtaaaa

SEQ ID NO: 2154 - DNA, 1855 bp, Homo Sapiens
  NM_003824
gacgatacgccgggcgcaggcgcagaagccgcgcccgtccgcggcgccgccagccagggcggaaacggctgcggcttcgctagggacgcatgcgcgggtcccttagttttcgcgagataacggtcgaaaacgcgctcttgtcgatttcctgtagtgaatcaggcaccggagtgcaggttcgggggtggaatccttgggccgctgggcaagcggcgagacctggccagggccagcgagccgaggacagagggcgcacggagggccgggccgcagccccggccgcttgcagaccccgccatggacccgttcctggtgctgctgcactcggtgtcgtccagcctgtcgagcagcgagctgaccgagctcaagttcctatgcctcgggcgcgtgggcaagcgcaagctggagcgcgtgcagagcggcctagacctcttctccatgctgctggagcagaacgacctggagcccgggcacaccgagctcctgcgcgagctgctcgcctccctgcggcgccacgacctgctgcggcgcgtcgacgacttcgaggcgggggcggcggccggggccgcgcctggggaagaagacctgtgtgcagcatttaacgtcatatgtgataatgtggggaaagattggagaaggctggctcgtcagctcaaagtctcagacaccaagatcgacagcatcgaggacagatacccccgcaacctgacagagcgtgtgcgggagtcactgagaatctggaagaacacagagaaggagaacgcaacagtggcccacctggtgggggctctcaggtcctgccagatgaacctggtggctgacctggtacaagaggttcagcaggcccgtgacctccagaacaggagtggggccatgtccccgatgtcatggaactcagacgcatctacctccgaagcgtcctgatgggccgctgctttgcgctggtggaccacaggcatctacacagcctggactttggttctctccaggaaggtagcccagcactgtgaagacccagcaggaagccaggctgagtgagccacagaccacctgcttctgaactcaagctgcgtttattaatgcctctcccgcaccaggccgggcttgggccctgcacagatatttccatttcttcctcactatgacactgagcaagatcttgtctccactaaatgagctcctgcgggagtagttggaaagttggaaccgtgtccagcacagaaggaatctgtgcagatgagcagtcacactgttactccacagcggaggagaccagctcagaggcccaggaatcggagcgaagcagagaggtggagaactgggatttgaacccccgccatccttcaccagagcccatgctcaaccactgtggcgttctgctgcccctgcagttggcagaaaggatgttttgtcccatttccttggaggccaccgggacagacctggacactagggtcaggcggggtgctgtggtggggagaggcatggctggggtgggggtggggagacctggttggccgtggtccagctcttggcccctgtgtgagttgagtctcctctctgagactgctaagtaggggcagtgatggttgccaggacgaattgagataatatctgtgaggtgctgatgagtgattgacacacagcactctctaaatcttccttgtgaggattatgggtcctgcaattctacagtttcttactgttttgtatcaaaatcactatctttctgataacagaattgccaaggcagcgggatctcgtatctttaaaaagcagtcctcttattcctaaggtaatcctattaaaacacagctttacaacttccatactacaaaaaattttctattcctaa

SEQ ID NO: 2155 - DNA, 3729 bp, Homo Sapiens
  NM_003826
agccttgacgcgctgcgcctgcgcaatgtctctttgcggggcgcaccggcaggctcccagccccgcttcgtcgcagcggcttgggccctccggccctccgtagccgctcgactgtcgcgctgcaccagcttcctcctcggcgttcccacgcctatttgggcggattcttggcgccggaggaagaggcagggtcaccctctctccacgtcagagacctgactgtggagatggcggctcagaagataaacgaggggctggaacacctcgccaaagcagagaaatacctgaaaactggttttttaaaatggaagccagattatgacagtgccgcttctgaatatggaaaagcagctgttgcttttaaaaatgccaaacagtttgagcaagcaaaagatgcctgcctgagggaagctgttgcccatgaaaataatagggctctttttcatgctgccaaagcttatgagcaagctggaatgatgttgaaggagatgcagaaactaccagaggccgttcagctaattgagaaggccagcatgatgtatctagaaaacggcaccccagacacagcagccatggctttggagcgagctggaaagcttatagaaaatgttgatccagagaaggctgtacagttatatcaacagacagctaatgtgtttgaaaatgaagaacgcttacgacaggcagttgaattactaggaaaagcctccagactactagtacgaggacgtaggtttgatgaggcggcactctctattcagaaagaaaaaaatatttataaggaaattgagaattatccaacttgttataagaaaacaattgctcaagtcttagttcatctacacagaaatgactatgtagctgcagaaagatgtgtccgggagagctatagcatccctgggttcaatggcagtgaagactgtgctgccctggaacagcttcttgaaggttatgaccagcaagaccaagatcaggtgtcagatgtctgcaactcaccgcttttcaagtacatggacaatgattatgctaagctgggcctgagtttggtggttccaggagggggaatcaagaagaaatcacctgcaacaccacaggccaagcctgatggtgtcactgccacggctgctgatgaagaggaagatgaatactcaggaggactatgctagtattttgcttgctgaaaagaaaagggaaacaaaggtaaaatcctgacatgccatttcaaggacttgggaatagattagggatatccgtacttcattacagtcatgattttggatcctaataaagactagtttttagttaccatcttcccaaatcactcattgtatccattacctgtgaagcatatctttttctttccataagagcttttctaagacaccagcaggaattaacagaaaatgtactgtcatgttttaatacattgattaaaaaatttgcaagccaaattatacataaattatgttctaaacaaaaggggtaataagcataggtattctctcttggacacttgtaagttactgttagtgaattgttttttacgtttcatttaataattgctgctaaaggtgatgtttactgataaatcattttaaaatttttttgttttgaaaagtaaatttatcccccatgatgttagatacatttaaattattaagtcttttcagagatgagatggggacaggaagttattttgagccttacaatattatttagcccaataaaagatgcattgaagctcttatatattatgagtttgaaaaattttgaaggtagcatattgaagtgatctataaatatcttcagtcctctctgaagtgtgggtatttcttctatctaaaaaatacatacagtgactgtcttcaaatctacttggttcttgaccaaataggagctaatgggtaatgaatacctttttgtttgtttgtttgtttgttttgttttttgtttttttttttaagggtctcactcttttgcccaggctggagtgcagtggcacaatcacggctcccaggctaatgtttttatttttaatttgtaattttttttttattttttttgttgagatggagttgctccatgttgcacaggctgttctcaaactcctaagctcaagccatctgcctgccttggcctcccaaagtgctgggattgtagacataagccacctcacccagcctatgaatatctttctaacattgtaagaatgaggtaatgtttccatcagtctaatacagatatatttcttccctccaaaacagtttattttgattgtttattttattttgattgtaactccgtcataacttgacatggaaaatgctatatactatgaaaacttagctgaaagggaagaattgttttagaaagacaatatttaaaacaccgcactgccaatatattgatcctttatagttatttcctaaaatgctgttttcgaaacattcctttttcaccctgttgtgtggcttagacccatctcgtaatctgttaattggaaagaggctacagacaccagcagtgtgcgttctgcaggtacacgctgccaaagtaattcctgctcatccatgccctgtctctgtctcttttagagtcataccttatttgagtataggttgcttaattttgctagacttcctgaaaacactaaggtggagtatcagaagtgattttagtcacagttctgcgggagagcttagaataacatcctcctttgggaggtggtctcgggtgcgtggatgttggtatacagtctttattgtaagtctgatacaaaatgctaataaatttaatgtttttcttccttaatttattggcatagttcttcaggtagcacctcatttttattaatgatattgggattaactatgaacaagctatatgtagacatttgcatttaaggacattgcagtgtttcaaagatcccatcattgcagcttgtatcctttagatccaatcggaaacttctggagtcttacattaatgctcatttgagctaattagtaatctgtttaaacagatttggcaatactttaaagatactgtagactatttatgtatagatagatcatattacccattaaagtctgggggaaaaaattttttaattttactcttcttatgtactgaaaactttttttaaaaaaggtgatgatgaagtgcattctgtagcagcagcgcagctatgctttaaaccacacaaaaggctgtgtccaggtgcagcctccttcacccttcctgcccacggtgaggattgaataaccaggacttggggatattgtttgttgtcagggttattctgtgtggtaaggaatatttgtttcacatttatacattttctttttccactcacgtaagtttctatcttgagagcatagtccaaagtgcaaaacttggtgtttacaaggaaaattgtcttccagaactccactgtcatcactttcaccaaagtggaagtttgcatgaatatgctcagaatctaatattcaatgttctgttacattgtaagtgaagtccagctacaaaatagatttaatatattgaatttatttgtacatatgcagagtacggtatttctgtatggaatctgctttattcctatttttcccaactctgatgagtagaatattaaatgtgttgttatggaaatacagattattgcttctataggaagataattatgaaaataaaacctgaaactatataaatataaaaaaaaaaaaaaaa

SEQ ID NO: 2156 - DNA, 2498 bp, Homo Sapiens
  NM_003830
gtgcgcgtccacagctctcactcaccctccggcttcctgtcggggctttctcagccccaccccacgtttggacatttggagcatttccttccctgacagccggacctgggactgggctggggccctggcggatggagacatgctgcccctgctgctgctgcccctgctgtggggggggtccctgcaggagaagccagtgtacgagctgcaagtgcagaagtcggtgacggtgcaggagggcctgtgcgtccttgtgccctgctccttctcttacccctggagatcctggtattcctctcccccactctacgtctactggttccgggacggggagatcccatactacgctgaggttgtggccacaaacaacccagacagaagagtgaagccagagacccagggccgattccgcctccttggggatgtccagaagaagaactgctccctgagcatcggagatgccagaatggaggacacgggaagctatttcttccgcgtggagagaggaagggatgtaaaatatagctaccaacagaataagctgaacttggaggtgacagccctgatagagaaacccgacatccactttctggagcctctggagtccggccgccccacaaggctgagctgcagccttccaggatcctgtgaagcgggaccacctctcacattctcctggacggggaatgccctcagccccctggaccccgagaccacccgctcctcggagctcaccctcacccccaggcccgaggaccatggcaccaacctcacctgtcagatgaaacgccaaggagctcaggtgaccacggagagaactgtccagctcaatgtctcctatgctccacagaccatcaccatcttcaggaacggcatagccctagagatcctgcaaaacacctcataccttccggtcctggagggccaggctctgcggctgctctgtgatgctcccagcaacccccctgcacacctgagctggttccagggctcccctgccctgaacgccacccccatctccaataccgggatcttggagcttcgtcgagtaaggtctgcagaagaaggaggcttcacctgccgcgctcagcacccgctgggcttcctgcaaatttttctgaatctctcagtttactccctcccacagttgctgggcccctcctgctcctgggaggctgagggtctgcactgcagatgctcctttcgagcccggccggccccctccctgtgctggcggcttgaggagaagccgctggaggggaacagcagccagggctcattcaaggtcaactccagctcagctgggccctgggccaacagctccctgatcctccacggggggctcagctccgacctcaaagtcagctgcaaggcctggaacatctatgggtcccagagcggctctgtcctgctgctgcaagggagatcgaacctcgggacaggagtggttcctgcagcccttggtggtgctggtgtcatggccctgctctgtatctgtctgtgcctcatcttctttttaatagtgaaagcccgcaggaagcaagcagctgggagaccagagaaaatggatgatgaagaccccattatgggtaccatcacctcgggttccaggaagaagccctggccagacagccccggagatcaagcatctcctcctggggatgcccctcccttggaagaacaaaaggagctccattatgcctcccttagtttttctgagatgaagtcgagggagcctaaggaccaggaggccccaagcaccacggagtactcggagatcaagacaagcaagtgaggatttgcccagagttcagtcctggctggaggagccacagcctgtctgggggaaaggacaagtcagggaccacttgctgaagcacgaagagcccttgtggcaatgttaacattaactgatgtttaagtgctccaagcagatggaattagagaggtgggctcaaatctaggccctggcactgtcatcaagcaattcactgcatccctctgtgcctcagtttcccattctgtaaatcagagatcatgcatgctacctcaaaggttgttgtgaacattaaagaaatcaacacatggaaatcaaccaacatgggtcctggaacagggcgttgtgctcagtgctttctggtctctcttccttgaatagaaaggtcctgctggcaagttctctcaaggctggggatgaccaggcacaaaaaacagggcagcaatatgttggtgtcactccccttcccaaaactcttcgaagactccctaggaaagaccagcccctcagcctggcacttggttcatgatgtgggatcttatatccttgccagagtcatatctttgcccacttttacctgcaatccttgcatcatattcctttggctccagtccttcatttatgagacccataggaatccttccaacagccaaagagttgagtctaactctttcctgcccaaacccattcacggccccctggccttagacaatatatcaca

SEQ ID NO: 2157 - DNA, 4035 bp, Homo Sapiens
  NM_003831
aacaacaaccaccacaaactccgaccgtcctttccaggccctttccctctataaacctgccgttttctgtctcccaagtcatcccagtttagaactgctccaggaaataatgaatgaacagagagagcctagtttgtttatttatttacaatccactagtctaatctagtttagatccagcggcaatttttggggtgccaaggaggaaagaaggagatggcagtgcggggacagggcagagcctgggccaaaggaagccacacccagttcttgccctgccctgcccgacacaggcaacgtgaccccaagcgacagccagctgatgcttgcttctccgagcccggcggtcagcagccggaagtagcccgcccgggggcggggaaaggtgccttaaggaggagctaggggcgtgcggccaattgcaagcgactgtcctagcgaagagggcggaagaggagagatccagttccggacgcggccgccgccgtcgccgccatctgtcacctccactccggcatcagcagccagtcgcccgtgtcccgcctgtctcctcggcggagcctgctgcccgtcctgccacctctctgctctgttcttgtctctgccttcattcccgaatggatctggtaggagtggcatcgcctgagcccgggacggcagcggcctggggacccagcaagtgtccatgggctattcctcaaaatacaatatcttgttctttggctgatgtaatgagtgaacagctggccaaagaattgcagttagaagaagaagctgccgtttttcctgaagttgctgttgctgaaggaccatttattactggagaaaacattgatacttccagtgaccttatgctggctcagatgctacagatggaatatgacagagaatatgatgcacagcttaggcgtgaagaaaaaaaattcaatggagatagcaaagtttccatttcctttgaaaattatcgaaaagtgcatccttatgaagacagcgatagctctgaagatgaggttgactggcaggatactcgtgatgatccctacagaccagcaaaaccggttcccactcctaaaaagggctttattggaaaaggaaaagatatcaccaccaaacatgatgaagtagtatgtgggagaaagaacacagcaagaatggaaaattttgcacctgagtttcaggtaggagatggaattggaatggatttaaaactatcaaaccatgttttcaatgctttaaaacaacatgcctactcagaagaacgtcgaagtgcccgcctacatgagaaaaaggagcattctacagcagaaaaagcagttgatcctaagacacgtttacttatgtataaaatggtcaactctggaatgttggagacaatcactggctgtattagtacaggaaaggagtctgttgtctttcatgcatatggagggagcatggaggatgaaaaggaagatagtaaagttatacctacagaatgtgccatcaaggtatttaaaacaacccttaatgaatttaagaatcgtgacaaatatattaaagatgatttcaggtttaaagatcgcttcagtaaactaaatccacgtaagatcatccgcatgtgggcagaaaaagaaatgcacaatctcgcaagaatgcagagagctggaattccttgtccaacagttgtactactgaagaaacacattttagttatgtcttttattggccatgatcaagttccagcccctaaattaaaagaagtaaagctcaatagtgaagaaatgaaagaagcctactatcaaactcttcatttgatgcggcagttatatcatgaatgtacgcttgtccatgctgacctcagtgagtataacatgctgtggcatgctggaaaggtctggttgatcgatgtcagtcagtcagtagaacctacccaccctcacggcctggagttcttgttccgggactgcaggaatgtctcgcagtttttccagaaaggaggagtcaaggaagcccttagtgaacgagaactcttcaatgctgtttcaggcttaaacatcacagcagataatgaagctgattttttagctgagatagaagctttggagaaaatgaatgaagatcacgttcagaagaatggaaggaaagctgcttcatttttgaaagatgatggagacccaccactactatatgatgaatagcactaatacccactgcttcagtgttaacacagcagtgattgtcagctgccaatagcaaatgaagttatgggtgacttgaaataccaaaacctgaggagtgggcaatggtgcttctgtgcttttcccccttgtaacccatgtgccagatgtgtggaatttttagctcagcattgagagaataaaatgtcactacctctcatcttatgaacaggataatataattctttaacagctataggttatctggctgaagtagacctaattttatgtgacttgtggtgtaaaatgtcttgatgataatttttaaaacttgggtaacacttccaaatatgggaggaaaggacagatgtgtttacaagggaggattttacaacatacttgctttattcacctccctgttttgtgttgcgtctttccttgaatattttattggcccagagttagcctttctcaattatgtttccagactgtggccgtgattctaaaggaaaatgtgtgctctttagtgggtagaacaaatggaaatttggtttcagaatggctgacagaaatcgacataagtcatgtaatttttgttgatatatcatgaaaatgaacagaattctttttccatacttatatctaagaaaaggcatcataggtttctgaaagagataactatataacagctttttaactatccagtcaactttcagcttttctacatttaggtaaaatggttaggatataactcatggtgtggctaatctacatttatcaataaaatgtaaattatctgaaaggacagaatataagatttaaccatgtttgacgtattttaatttagttaatgaagcaaaattcagtttatatttcactagaactgtgtacttgattgattttcagagaaatatcacaaattagaaatattaaatctaaggatgaaaggtatatataaaacaatttgggggccaggcacgatggctcaaacctgtaatcccagcactttgggagaccaaggcgggtggatcacttgaggtcaggagttcaagaccagcctgggcaacatggcgaaaccctgtctctactaaaaatacaaaaattagccgggtgtggtggcacttctctgtaatctcagcttctcaggaggctgagacaggagaatcgcttgaacccgggaggcagaggttgcagtgagctgagatcatgccactgcactccggcctaggtgacagagggaaactccatctccaggaaaaaaaaaaaaaaacccaatttggataccaaattaatcaactaatttgagctatctggccttactcttagtagtttttagtacgtgctggacaccacttttaaaaagcaatcactgtgctagaaaagtatattggctttgttaggattaaagttcattaacttcaatgtaatcatgcctcctattactgaagtcagattggaaccactaaagatccaaactttctgtctggtaatagaaagtaaaaatctagacatcatttacatttgagaaagctgtttttaacattattttaaaatgccaaatatgttctttctagaaaaatatttatttttgtttttgttggatagcttttaattacatttcagagaggtgtaattttgggtagatgctcattacatttttgaaaggtttatgattccaaaataaagatttatatgactggtgatactggctttacagaaatttcagagaactaatttttaaaatctttagcatttaaaactttttttgttttgttttctgacatattctgacaaagagcagcaaaccactgctgtgtggcattcttggagtgtgctgtgaatgtgctttttaagaaattaaaaagagatcattttaaaa

SEQ ID NO: 2158 - DNA, 1512 bp, Homo Sapiens
  NM_003841
gaggccatgccccttttctgagtgcttggaagtgactgctgcaagtgacaagtgaccacgccttttcccccgcgggtataaattcagaggcgctgcgctccgattctggcagtgcagctgtgggaacctctccacgcgcacgaactcagccaacgatttctgatagatttttgggagtttgaccagagatgcaaggggtgaaggagcgcttcctaccgttagggaactctggggacagagcgccccggccgcctgatggccgaggcagggtgcgacccaggacccaggacggcgtcgggaaccataccatggcccggatccccaagaccctaaagttcgtcgtcgtcatcgtcgcggtcctgctgccagtcctagcttactctgccaccactgcccggcaggaggaagttccccagcagacagtggccccacagcaacagaggcacagcttcaagggggaggagtgtccagcaggatctcatagatcagaacatactggagcctgtaacccgtgcacagagggtgtggattacaccaacgcttccaacaatgaaccttcttgcttcccatgtacagtttgtaaatcagatcaaaaacataaaagttcctgcaccatgaccagagacacagtgtgtcagtgtaaagaaggcaccttccggaatgaaaactccccagagatgtgccggaagtgtagcaggtgccctagtggggaagtccaagtcagtaattgtacgtcctgggatgatatccagtgtgttgaagaatttggtgccaatgccactgtggaaaccccagctgctgaagagacaatgaacaccagcccggggactcctgccccagctgctgaagagacaatgaacaccagcccagggactcctgccccagctgctgaagagacaatgaccaccagcccggggactcctgccccagctgctgaagagacaatgaccaccagcccggggactcctgccccagctgctgaagagacaatgaccaccagcccggggactcctgcctcttctcattacctctcatgcaccatcgtagggatcatagttctaattgtgcttctgattgtgtttgtttgaaagacttcactgtggaagaaattccttccttacctgaaaggttcaggtaggcgctggctgagggcggggggcgctggacactctctgccctgcctccctctgctgtgttcccacagacagaaacgcctgcccctgccccaagtcctggtgtctccagcctggctctatcttcctccttgtgatcgtcccatccccacatcccgtgcaccccccaggaccctggtctcatcagtccctctcctggagctgggggtccacacatctcccagccaagtccaagagggcagggccagttcctcccatcttcaggcccagccaggcagggggcagtcggctcctcaactgggtgacaagggtgaggatgagaagtggtcacgggatttattcagccttggtcagagcagaaaaaaaaaaaaaaaaaaaa

SEQ ID NO: 2159 - DNA, 4154 bp, Homo Sapiens
  NM_003842
acttggacgcgcttgcggaggattgcgttgacgagactcttatttattgtcaccaacctgtggtggaatttgcagttgcacattggatctgattcgccccgccccgaatgacgcctgcccggaggcagtgaaagtacagccgcgccgccccaagtcagcctggacacataaatcagcacgcggccggagaaccccgcaatctctgcgcccacaaaatacaccgacgatgcccgatctactttaagggctgaaacccacgggcctgagagactataagagcgttccctaccgccatggaacaacggggacagaacgccccggccgcttcgggggcccggaaaaggcacggcccaggacccagggaggcgcggggagccaggcctgggccccgggtccccaagacccttgtgctcgttgtcgccgcggtcctgctgttggtctcagctgagtctgctctgatcacccaacaagacctagctccccagcagagagcggccccacaacaaaagaggtccagcccctcagagggattgtgtccacctggacaccatatctcagaagacggtagagattgcatctcctgcaaatatggacaggactatagcactcactggaatgacctccttttctgcttgcgctgcaccaggtgtgattcaggtgaagtggagctaagtccctgcaccacgaccagaaacacagtgtgtcagtgcgaagaaggcaccttccgggaagaagattctcctgagatgtgccggaagtgccgcacagggtgtcccagagggatggtcaaggtcggtgattgtacaccctggagtgacatcgaatgtgtccacaaagaatcaggtacaaagcacagtggggaagtcccagctgtggaggagacggtgacctccagcccagggactcctgcctctccctgttctctctcaggcatcatcataggagtcacagttgcagccgtagtcttgattgtggctgtgtttgtttgcaagtctttactgtggaagaaagtccttccttacctgaaaggcatctgctcaggtggtggtggggaccctgagcgtgtggacagaagctcacaacgacctggggctgaggacaatgtcctcaatgagatcgtgagtatcttgcagcccacccaggtccctgagcaggaaatggaagtccaggagccagcagagccaacaggtgtcaacatgttgtcccccggggagtcagagcatctgctggaaccggcagaagctgaaaggtctcagaggaggaggctgctggttccagcaaatgaaggtgatcccactgagactctgagacagtgcttcgatgactttgcagacttggtgccctttgactcctgggagccgctcatgaggaagttgggcctcatggacaatgagataaaggtggctaaagctgaggcagcgggccacagggacaccttgtacacgatgctgataaagtgggtcaacaaaaccgggcgagatgcctctgtccacaccctgctggatgccttggagacgctgggagagagacttgccaagcagaagattgaggaccacttgttgagctctggaaagttcatgtatctagaaggtaatgcagactctgccatgtcctaagtgtgattctcttcaggaagtcagaccttccctggtttaccttttttctggaaaaagcccaactggactccagtcagtaggaaagtgccacaattgtcacatgaccggtactggaagaaactctcccatccaacatcacccagtggatggaacatcctgtaacttttcactgcacttggcattatttttataagctgaatgtgataataaggacactatggaaatgtctggatcattccgtttgtgcgtactttgagatttggtttgggatgtcattgttttcacagcacttttttatcctaatgtaaatgctttatttatttatttgggctacattgtaagatccatctacacagtcgttgtccgacttcacttgatactatatgatatgaaccttttttgggtggggggtgcggggcagttcactctgtctcccaggctggagtgcaatggtgcaatcttggctcactatagccttgacctctcaggctcaagcgattctcccacctcagccatccaaatagctgggaccacaggtgtgcaccaccacgcccggctaattttttgtattttgtctagatataggggctctctatgttgctcagggtggtctcgaattcctggactcaagcagtctgcccacctcagactcccaaagcggtggaattagaggcgtgagcccccatgcttggccttacctttctacttttataattctgtatgttattattttatgaacatgaagaaactttagtaaatgtacttgtttacatagttatgtgaatagattagataaacataaaaggaggagacatacaatgggggaagaagaagaagtcccctgtaagatgtcactgtctgggttccagccctccctcagatgtactttggcttcaatgattggcaacttctacaggggccagtcttttgaactggacaaccttacaagtatatgagtattatttataggtagttgtttacatatgagtcgggaccaaagagaactggatccacgtgaagtcctgtgtgtggctggtccctacctgggcagtctcatttgcacccatagcccccatctatggacaggctgggacagaggcagatgggttagatcacacataacaatagggtctatgtcatatcccaagtgaacttgagccctgtttgggctcaggagatagaagacaaaatctgtctcccacgtctgccatggcatcaagggggaagagtagatggtgcttgagaatggtgtgaaatggttgccatctcaggagtagatggcccggctcacttctggttatctgtcaccctgagcccatgagctgccttttagggtacagattgcctacttgaggaccttggccgctctgtaagcatctgactcatctcagaaatgtcaattcttaaacactgtggcaacaggacctagaatggctgacgcattaaggttttcttcttgtgtcctgttctattattgttttaagacctcagtaaccatttcagcctctttccagcaaacccttctccatagtatttcagtcatggaaggatcatttatgcaggtagtcattccaggagtttttggtcttttctgtctcaaggcattgtgtgttttgttccgggactggtttgggtgggacaaagttagaattgcctgaagatcacacattcagactgttgtgtctgtggagttttaggagtggggggtgacctttctggtctttgcacttccatcctctcccacttccatctggcatcccacgcgttgtcccctgcacttctggaaggcacagggtgctgctgcctcctggtctttgcctttgctgggccttctgtgcaggacgctcagcctcagggctcagaaggtgccagtccggtcccaggtcccttgtcccttccacagaggccttcctagaagatgcatctagagtgtcagccttatcagtgtttaagatttttcttttatttttaatttttttgagacagaatctcactctctcgcccaggctggagtgcaacggtacgatcttggctcagtgcaacctccgcctcctgggttcaagcgattctcgtgcctcagcctccggagtagctgggattgcaggcacccgccaccacgcctggctaatttttgtatttttagtagagacggggtttcaccatgttggtcaggctggtctcgaactcctgacctcaggtgatccaccttggcctccgaaagtgctgggattacaggcgtgagccaccagccaggccaagctattcttttaaagtaagcttcctgacgacatgaaataattgggggttttgttgtttagttacattaggctttgctatatccccaggccaaatagcatgtgacacaggacagccatagtatagtgtgtcactcgtggttggtgtcctttcatgcttctgccctgtcaaaggtccctatttgaaatgtgttataatacaaacaaggaagcacattgtgtacaaaatacttatgtatttatgaatccatgaccaaattaaatatgaaaccttatataaaaa

SEQ ID NO: 2160 - DNA, 1764 bp, Homo Sapiens
  NM_003844
gcaggtgccccgaaaagggggcggggtcaggggtgccctgaactccgaatgcgaagttctgtcttgtcatagccaagcacgctgcttcttggattgacctggcaggatggcgccaccaccagctagagtacatctaggtgcgttcctggcagtgactccgaatcccgggagcgcagcgagtgggacagaggcagccgcggccacacccagcaaagtgtggggctcttccgcggggaggattgaaccacgaggcgggggccgaggagcgctccctacctccatgggacagcacggacccagtgcccgggcccgggcagggcgcgccccaggacccaggccggcgcgggaagccagccctcggctccgggtccacaagaccttcaagtttgtcgtcgtcggggtcctgctgcaggtcgtacctagctcagctgcaaccatcaaacttcatgatcaatcaattggcacacagcaatgggaacatagccctttgggagagttgtgtccaccaggatctcatagatcagaacatcctggagcctgtaaccggtgcacagagggtgtgggttacaccaatgcttccaacaatttgtttgcttgcctcccatgtacagcttgtaaatcagatgaagaagagagaagtccctgcaccacgaccaggaacacagcatgtcagtgcaaaccaggaactttccggaatgacaattctgctgagatgtgccggaagtgcagcagagggtgccccagagggatggtcaaggtcaaggattgtacgccctggagtgacatcgagtgtgtccacaaagaatcaggcaatggacataatatatgggtgattttggttgtgactttggttgttccgttgctgttggtggctgtgctgattgtctgttgttgcatcggctcaggttgtggaggggaccccaagtgcatggacagggtgtgtttctggcgcttgggtctcctacgagggcctggggctgaggacaatgctcacaacgagattctgagcaacgcagactcgctgtccactttcgtctctgagcagcaaatggaaagccaggagccggcagatttgacaggtgtcactgtacagtccccaggggaggcacagtgtctgctgggaccggcagaagctgaagggtctcagaggaggaggctgctggttccagcaaatggtgctgaccccactgagactctgatgctgttctttgacaagtttgcaaacatcgtgccctttgactcctgggaccagctcatgaggcagctggacctcacgaaaaatgagatcgatgtggtcagagctggtacagcaggcccaggggatgccttgtatgcaatgctgatgaaatgggtcaacaaaactggacggaacgcctcgatccacaccctgctggatgccttggagaggatggaagagagacatgcaagagagaagattcaggacctcttggtggactctggaaagttcatctacttagaagatggcacaggctctgccgtgtccttggagtgaaagactctttttaccagaggtttcctcttaggtgttaggagttaatacatattaggttttttttttttttaacatgtatacaaagtaaattcttagccaggtgtagtggctcatgcctgtaatcccagcactttgggaggctgaggcgggtggatcacttgaggtcagaagttcaagaccagcctgaccaacatcgtgaaatgccgtctttacaaaaaaatacaaaaattaactggaaaaaaaaaaaaaaa

SEQ ID NO: 2161 - DNA, 1836 bp, Homo Sapiens
  NM_003846
gctagggagtaggggtcgtctgataaggggaagctgtgacgcagacacgcacagtaatacacagatggaggctcaaaagacacgagtttcgcgtcctgaaattccgcttccagggccaagctttcttttctgatactgtttgtccctcgcgaggcaccgttgggtcgcgcagtaggcgtgactaggggcgggaagtggggcgggagcagggccgcggagcctgggctgcggctgtcatggacgcctgggtccgcttcagtgctcagagccaagcccgggagcggctgtgtagggccgcccagtatgcttgctctcttcttggccatgcgctgcagaggcatggagccagtcctgagttacagaaacagattcgacaactggagagccacctgagccttggaagaaagcttctacgcctgggtaactcagcagatgcccttgagtcagccaaaagagctgttcacctatcagatgttgtcctgagattctgcatcactgttagtcacctcaatcgagccttgtacttcgcctgtgacaatgtcctgtgggctggaaagtctggactggctccccgtgtggatcaggagaagtgggcccagcgttcattcaggtactatttgttttccctcatcatgaatttgagccgtgatgcttatgagattcgcctactgatggagcaagagtcttctgcttgtagccggcgactgaaaggttctggaggaggagtcccaggaggaagtgaaactgggggacttgggggaccagggactccaggaggaggtctgccccaactggctctgaaacttcggctgcaagtcctgctcctggctcgagtccttagaggtcatcccccacttctgctagacgtggtcagaaatgcctgtgatctcttcattcctctggacaaactaggcctctggcgctgtggccctgggattgtggggctttgtggcctcgtgtcctccatcctgtctattctcaccctaatctatccctggctacgactcaagccctgaccttccggtacaggataaggaggggacctgaattggtgagatggaatcttagatcgtcccccatgtgccagcctcattcgaattctactctttggttaaagttagaaattcagagatttaggggtggaggaagagctttggggaagatgaggtaaggaaagatgactcgtgaagttaataggatgtctctaatttctagatgtgcctgagcttctgttcttttcctctttctttgtgtctctcttgaatatatttactttgtgtctcttaactctgtttaaggttctgtgtctatgcatctctctctttcttttttcaaccttctcattctcctatccagggatttaatcagcagaattactttttgataggggaggtataaggtttggcctgtaaggttctaactgccttcttttttctcacagaggtggcttatggcagatttttcctccttcaaactccaaacataatttttaagactatgtgccagtggactcttcccttatatctctgcaccacaagttgttggatgtttcctcttcctcccttatgtctacctcaccaacctcgctcatcatttggcccttatccttccttgtacacctaccttcagatttctgcttacactttgatttcagagctttattccccagtctgttcttactcctttgtcgcttatccagaatgatgctatgtgtagcatcttgctgtaaatcctgtacaatgattctgtgtaaatagctgtggcctatgccaataatgaagagcaagcctttcaggtaagcaaattaaagttcagtttgctcatcgacaaaaaaaa

SEQ ID NO: 2162 - DNA, 2363 bp, Homo Sapiens
  NM_003848
ctgccccgtgccgagtttcctgtttaagatggcgtcccccgtagcagcgcaggccgggaagcttctgcgagccctagcgctgcggccccgcttcctggcggccgggtcccaggcagttcaattaacctccagaagatggctgaacctgcaggaataccagagcaagaaactgatgtctgacaacggagtgagagttcaaagattctttgtagcagacactgcaaatgaagctctcgaggctgctaagagactaaatgcaaaagaaattgttttaaaagcccagatcttagctggaggaagaggaaaaggtgtcttcaatagtggtttgaaaggaggtgttcatttaacaaaagaccctaatgttgtgggacagctggctaaacagatgattgggtacaatctagcgacaaaacaaactccaaaagaaggtgtgaaagttaacaaggtgatggttgctgaagccttggatatttccagagaaacctacctggcaattctgatggaccggtcctgcaatggccccgtgctggtgggcagcccccaggggggcgtcgacattgaagaggtggctgcttcaaacccggagctcatttttaaggagcaaattgacatttttgaaggaataaaggacagccaagctcagcggatggccgaaaatctaggcttcgttgggcctttgaaaagccaggctgcagatcaaattacgaagctgtataatctcttcctgaaaattgatgctactcaggtggaagtgaatccctttggtgaaactccagaaggacaagttgtctgttttgatgccaagataaactttgatgacaacgcagaattccgacaaaaagacatatttgctatggacgacaaatcagagaatgagcccattgaaaatgaagctgccaaatatgatctaaaatacataggactagatgggaacattgcctgctttgtgaatggtgctgggctcgccatggctacttgtgatatcattttccttaatggtgggaagccagccaacttcttggatcttggaggtggtgtaaaggaagctcaagtatatcaagcattcaaattgctcacagctgatcctaaggttgaagccatccttgtcaatatatttggtggtatcgtcaactgtgccatcattgccaatgggatcaccaaagcctgccgggagctagaactcaaggtgcccctggtggtccggcttgaaggaaccaacgtccaagaggcccagaagatactcaacaacagcggactccccattacttcagccattgacctggaggatgcagccaagaaggctgtggccagtgtggccaagaagtgatgtctttgtcctgatccaatggagaaagaaagccatttttccgtaaaaagggatggttcatcattgtgaaagaaatggttatctcattggggaagaaaaggggagggggaaggcaagaatcactgaaaaatcttaaatctgtgttttctggaataagatatctagacagcctaaatctgattttggtctttataaaaataatatcttgtgttctcatacttttctgtcactgtaagcctgcccagtaggcagtgttttgcagactttggggagtggtctatgtggccaaatattgtgtgtatagacagaatttgaaatcaagtcctgcttcatttacaagaattttggtgggcatctaatcctacataatgaaaaagaaaaacagaccatttaaaaactcagacaagattatatttaatatattaattactaaaaaggcataagattacactgaacatattagctactaaaaaggcactgctaagacattcaagcaaatagctattacacactactgcagattttacaggtttctaattctaacatatgtttgaaaaatccgtgagtattccaaaatatatttaataatggaatatctgcattaatataccatccatgtgtttttaccatttgccttaatattgaatatactgtttacctcacactaaaaagaaaaccagaagccttatttgtgattttgggagtggaagcttccatttttgtgtcaaaaatgaatcctgattcttatggaaatctctgttattaagatatttcaagatgagacaacactgaagatcaaattgtgtttagtatcactatcttctctcctcgtttctctcttactcctcatcctcccagaatctaccagtttatggtagaaagatgggaaccttatttgaatgtgttttttttttccatgatgtccaattttgttgtgggaaaggatttggataaaatttttgtttaaattttggtagatttttatctatacaaatttaaataaaattatgttttgtaagctgtaagaaaaaaaaaa

SEQ ID NO: 2163 - DNA, 1475 bp, Homo Sapiens
  NM_003849
tttctaggaaggagccgagttattatctgcctctccgataggatgcctctttgtcttcacctgccattcccgctgtttcgtgaagaatcctctgtaaagggaaatttgttcaggcgactgctgtggccaccctctgcctcctccggcctctgcccctgggaggtccccgggggcctgggagtgtcattggcgtatgaccgcaacccttgccgctgccgctgacatcgctaccatggtctccggcagcagcggcctcgccgccgcccgtctcctgtcgcgcagcttcctcctgccgcagaatggaattcggcattgttcctacacagcttctcggcaacatctctatgttgataaaaatacaaagattatttgccagggtttcactggcaaacagggcacctttcacagccagcaggcattggaatatggcaccaaactcgttggaggaaccactccagggaaaggaggccagacacatctgggcttacctgtctttaatactgtgaaggaggccaaagaacagacaggagcaacggcttctgtcatttatgttcctccgccttttgctgctgctgccattaatgaagctattgaggcagaaattcccttggttgtgtgtatcactgaaggaattccccagcaggacatggtacgagtcaagcacaaactgctgcgccaggaaaagacaaggctaattgggcccaactgccctggagtcatcaatcctggagaatgtaaaattggcatcatgcctggccatattcacaaaaaaggaaggattggcattgtgtccagatctggcaccctgacttatgaagcagttcaccaaacaacgcaagttggattggggcagtctttgtgcgttggcattggaggtgatccttttaatggaacagattttattgactgcctcgaaatctttttgaacgattctgccacagaaggcatcatattgattggtgaaattggtggtaatgcagaagagaatgctgcagaatttttgaagcaacataattcaggtccaaattccaagcctgtagtgtccttcattgctggtttaactgctcctcctgggagaagaatgggtcatgccggggcaattattgctggaggaaaaggtggagctaaagagaagatctctgcccttcagagtgcaggagttgtggtcagtatgtctcctgcacagctgggaaccacgatctacaaggaatttgaaaagaggaagatgctatgaaagaaaaaaaaaattcctaaaactgtggaatggatcacgtagacatgtaacccagcagcagtttgcttctgttgtccactgattaatcagcctatgtgcctgacactggtcttgcagtacaactggaagccaaaacaaggtggaagatgtcctgaattaagatgttttcaccacattgtattacagagacagccaataaatctactatttgatttcaatatggaaaaaaaaaaaaaaaaaa

SEQ ID NO: 2164 - DNA, 2182 bp, Homo Sapiens
  NM_003850
ccgcctgtcgcctgtgcgcctgcgcgcggcgccgaggggacggggtccgactcagaaatggcggcctccatgttctacggcaggctagtggccgtggccacccttcggaaccaccggcctcggacggcccagcgggctgctgctcaggttctgggaagttctggattgtttaataaccatggactccaagtacagcagcaacagcaaaggaatctctcactacatgaatacatgagtatggaattattgcaagaagctggtgtctccgttcccaaaggatatgtggcaaagtcaccagatgaagcttatgcaattgccaaaaaattaggttcaaaagatgtcgtgataaaggcacaggttttagctggtggtagaggaaaaggaacatttgaaagtggcctcaaaggaggagtgaagatagttttctctccagaagaagcaaaagctgtttcttcacaaatgattgggaaaaaattgtttaccaagcaaacgggagaaaagggcagaatatgcaatcaagtattggtctgtgagcgaaaatatcccaggagagaatactactttgcaataacaatggaaaggtcatttcaaggtcctgtattaataggaagttcacatggtggtgtcaacattgaagatgttgctgctgagtctcctgaagcaataattaaagaacctattgatattgaagaaggcatcaaaaaggaacaagctctccagcttgcacagaagatgggatttccacctaatattgtggaatcagcagcagaaaacatggtcaagctttacagcctttttctgaaatacgatgcaaccatgatagaaataaatccaatggtggaagattcagatggagctgtattgtgtatggatgcaaagatcaattttgactctaattcagcctatcgccaaaagaaaatctttgatctacaggactggacccaggaagatgaaagggacaaagatgctgctaaggcaaatctcaactacattggcctcgatggaaatataggctgcctagtaaatggtgctggtttggctatggccacaatggatataataaaacttcatggagggactccagccaacttccttgatgttggtggtggtgctacagtccatcaagtaacagaagcatttaagcttatcacttcagataaaaaggtactggctattctggtcaacatttttggaggaatcatgcgctgtgatgttattgcacagggtatagtcatggcagtaaaagacttggaaattaaaatacctgttgtggtacggttacaaggtacacgagtcgatgatgctaaggcactgatagcggacagtggacttaaaatacttgcttgtgatgacttggatgaagctgctagaatggttgtaaagctctctgaaatagtgaccttagcgaagcaagcacatgtggatgtgaaatttcagttgccaatatgatctgaaaacccagtggatggctgaaggtgttaaatgtgctataatcattaagaatactgtgttctgtgttattgttctttttctttttagtgtgtggagattgtaattgccatctaggcacacaaacatttaaaaggatttggactgcatttaattgtaccattcagaatggactgtttgtacgaagcatgtataatgcagttatcttctttcttttgtcgcagccagtcttttttgcttctcctacaaaacgtaacttgcaatttgccagtttattattgttggatacaaagttcttcattgataagagtcctataaataagataaatacgaagataaagctttattctttagtgttaaaatacagtatatctaataactagcctcattagtagagcagtatattaaaacaatgttttatgtaaaaagtgtttatcttcagcaccaaatacatgataaatgtatcaatcactatttataaacagagctttcaaacactcctcagaatattcttctaagtattttgatgaagtaactttgtaattatttgaacattgttttaatcattaggaaacactgattaactgcaagtcttcatgattctgtcatattaagaaacacctgtaggtttgcttcaaataaaggcatatataccaaggacttacagacaaaattaagaatgtcaatttaagttaataaaaatctcccaatatgaaaaaaaaaaaaaaaaaaa

SEQ ID NO: 2165 - DNA, 2048 bp, Homo Sapiens
  NM_003851
ggcggggcctgggcgcgccgagctccggctgggtccctgcaggtcttggggcccgggactcttcctggagacaccgccatggccgggctatcccgcgggtccgcgcgcgcactgctcgccgccctgctggcgtcgacgctgttggcgctgctcgtgtcgcccgcgcggggtcgcggcggccgggaccacggggactgggacgaggcctcccggctgccgccgctaccaccccgcgaggacgcggcgcgcgtggcccgcttcgtgacgcacgtctccgactggggcgctctggccaccatctccacgctggaggcggtgcgcggccggcccttcgccgacgtcctctcgctcagcgacgggcccccgggcgcgggcagcggcgtgccctatttctacctgagcccgctgcagctctccgtgagcaacctgcaggagaatccatatgctacactgaccatgactttggcacagaccaacttctgcaagaaacatggatttgatccacaaagtcccctttgtgttcacataatgctgtcaggaactgtgaccaaggtgaatgaaacagaaatggatattgcaaagcattcgttattcattcgacaccctgagatgaaaacctggccttccagccataattggttctttgctaagttgaatataaccaatatctgggtcctggactactttggtggaccaaaaatcgtgacaccagaagaatattataatgtcacagttcagtgaagcagactgtggtgaatttagcaacacttatgaagtttcttaaagtggctcatacacacttaaaaggcttaatgtttctctggaaagcgtcccagaatattagccagttttctgtcacatgctggtttgtttgcttgcttgtttacttgcttgtttaccaatagagttgacctgttattggatttcctggaagatgtggtagctacttttttcctattttgaagccattttcgtagagaaatatccttcactataatcaaataagttttgtcccatcaattccaaagatgtttccagtggtgctcttgaagaggaatgagtaccagttttaaattgcccattggcatttgaaggtagttgagtatgtgttctttattcctagaagccactgtgcttggtagagtgcatcactcaccacagctgcctcctgagctgcctgagcctggtgcaaaaggattggcccccattatggtgcttctgaataaatcttgccaagatagacaaacaatgatgaaactcagatggagcttcctactcacgttgatttatgtctcacaatcctgggtattgttaattcaacatagggtgaaactatttctgataaagaacttttgaaaaactttttatactctaaagtgatactcagaacaaaagaaagtcataaaactcctgaatttaatttccccacctaagtcgaaacagtattatcaaaacacatgtgcacacagattattttttggctccaaaactggattgcaaaagaaagaggagaagaatattttgtgtgttcctggtattcttttataagtaaagtttacccaggcatggaccagcttcagccagggacaaaatcccctcccaaaccactctccacagctttttaaaaatacttctactcttaacaattacctaaggcttcctcaactgccccaaatctcttaatagcttctagtgctgctacaatctaagtcaggtcaccagagggaagagaacatggcattaaaagaatcacatcttcagaagagaagacactaatattattacccatatacatgatttcagaagatgacataagattcctcttaaagaggaaatgtcaggaatcaagccactgaatccttaaagagaaaagttgaatatgagtcattgtgtctgaaaactgcaaagtgaacttaactgagatccagcaaacaggttctgtttaagaaaaataatttatactaaatttagtaaaatggacttcttattcaaagcatcaataattaaaagaattattttaatgaaaaaaaaaaaaaaaaaaaaaaaaa

SEQ ID NO: 2166 - DNA, 3905 bp, Homo Sapiens
  NM_003852
gacagataccctccttccggccgcgccactcgggaggcggatcccgtgggcctgaggaggcttcccccgcccggtttgctttccctccctcgctggcgctgccgcgagtccaccgagcggcctctgaggagcagccgcaggaggaggaggaggtcgtcgggggcggcgggcggagaccgcgctctcgcttccccggcggcggcaagggcaggacaatggaggtggcggtggagaaggcggtggcggcggcggcagcggcctcggctgcggcctccggggggccctcggcggcgccgagcggggagaacgaggccgagagtcggcagggcccggactcggagcgcggcggcgaggcggcccggctcaacctgttggacacttgcgccgtgtgccaccagaacatccagagccgggcgcccaagctgctgccctgcctgcactctttctgccagcgctgcctgcccgcgccccagcgctacctcatgctgcccgcgcccatgctgggctcggccgagaccccgccacccgtccctgcccccggctcgccggtcagcggctcgtcgccgttcgccacccaagttggagtcattcgttgcccagtttgcagccaagaatgtgcagagagacacatcatagataacttttttgtgaaggacactactgaggttcccagcagtacagtagaaaagtcaaatcaggtatgtacaagctgtgaggacaacgcagaagccaatgggttttgtgtagagtgtgttgaatggctctgcaagacgtgtatcagagctcatcagagggtaaagttcacaaaagaccacactgtcagacagaaagaggaagtatctccagaggcagttggtgtcaccagccagcgaccagtgttttgtccttttcataaaaaggagcagctgaagctgtactgtgagacatgtgacaaactgacatgtcgagactgtcagttgttagaacataaagagcatagataccaatttatagaagaagcttttcagaatcagaaagtgatcatagatacactaatcaccaaactgatggaaaaaacaaaatacataaaattcacaggaaatcagatccaaaacagaattattgaagtaaatcaaaatcaaaagcaggtggaacaggatattaaagttgctatatttacactgatggtagaaataaataaaaaaggaaaagctctactgcatcagttagagagccttgcaaaggaccatcgcatgaaacttatgcaacaacaacaggaagtggctggactctctaaacaattggagcatgtcatgcatttttctaaatgggcagtttccagtggcagcagtacagcattactttatagcaaacgactgattacataccggttacggcacctccttcgtgcaaggtgtgatgcatccccagtgaccaacaacaccatccaatttcactgtgatcctagtttctgggctcaaaatatcatcaacttaggttctttagtaatcgaggataaagagagccagccacaaatgcctaagcagaatcctgtcgtggaacagaattcacagccaccaagtggtttatcatcaaaccagttatccaagttcccaacacagatcagcctagctcaattacggctccagcatatgcagcaacagcaaccgcctccacgtttgataaactttcagaatcacagccccaaacccaatggaccagttcttcctcctcatcctcaacaactgagatatccaccaaaccagaacataccacgacaagcaataaagccaaaccccctacagatggctttcttggctcaacaagccataaaacagtggcagatcagcagtggacagggaaccccatcaactaccaacagcacatcctctactccttccagccccacgattactagtgcagcaggatatgatggaaaggcttttggttcacctatgatcgatttgagctcaccagtgggagggtcttataatcttccctctcttccggatattgactgttcaagtactattatgctggacaatattgtgaggaaagatactaatatagatcatggccagccaagaccaccctcaaacagaacggtccagtcaccaaattcatcagtgccatctccaggccttgcaggacctgttactatgactagtgtacaccccccaatacgttcacctagtgcctccagcgttggaagccgaggaagctctggctcttccagcaaaccagcaggagctgactctacacacaaagtcccagtggtcatgctggagccaattcgaataaaacaagaaaacagtggaccaccggaaaattatgatttccctgttgttatagtgaagcaagaatcagatgaagaatctaggcctcaaaatgccaattatccaagaagcatactcacctccctgctcttaaatagcagtcagagctctacttctgaggagactgtgctaagatcagatgcccctgatagtacaggagatcaacctggacttcaccaggacaattcctcaaatggaaagtctgaatggttggatccttcccagaagtcacctcttcatgttggagagacaaggaaagaggatgaccccaatgaggactggtgtgcagtttgtcaaaacggaggggaactcctctgctgtgaaaagtgccccaaagtattccatctttcttgtcatgtgcccacattgacaaattttccaagtggagagtggatttgcactttctgccgagacttatctaaaccagaagttgaatatgattgtgatgctcccagtcacaactcagaaaaaaagaaaactgaaggccttgttaagttaacacctatagataaaaggaagtgtgagcgcctacttttatttctttactgccatgaaatgagcctggcttttcaagaccctgttcctctaactgtgcctgattattacaaaataattaaaaatccaatggatttgtcaaccatcaagaaaagactacaagaagattattccatgtactcaaaacctgaagattttgtagctgattttagattgatctttcaaaactgtgctgaattcaatgagcctgattcagaagtagccaatgctggtataaaacttgaaaattattttgaagaacttctaaagaacctctatccagaaaaaaggtttcccaaaccagaattcaggaatgaatcagaagataataaatttagtgatgattcagatgatgactttgtacagccccggaagaaacgcctcaaaagcattgaagaacgccagttgcttaaataatatgcagcaccactagcttgtgctggtttttagatttttttgttttcaaaaaaacatttgtcagtaatttaacatcactacaaaaagaagagtttgtgactattctcatctctgttttggacgtttactagactttgatttccttaatagcccatttctgttaacctcttatcactaagaaagaaaggaaagaaggagatgaatagaagaaagaaaatggaaagaaggaaaaaaggaggatagaaaaaggatggaagaaagaagcattgaaaacaaagacattcttcccacttcttggatttttaaaccacagtctggagtgatagctactgtagaaaggaaatagactttgtatgaactctttaagttgaaaagtaaaaaatatatgtggtttggatgtgtgctttaattcagctttagaaattaataccactacccgtgaattatatggcctgacaatatgaattaggtgtactgtactgaagaacagtactccacaaacatgggtggtaacaagagttccatcccaggaggccaaacggtgcaacagaagggtaggttagatgctattaagaaggcacttaatagtacatcatgtaagatggcaactgtattaaagaaaaatccggaaaacaaaaa

SEQ ID NO: 2167 - DNA, 2668 bp, Homo Sapiens
  NM_003853
ctctctggataggaagaaatatagtagaaccctttgaaaatggatattttcacatattttcgttcagatacaaaagctggcagttactgaaataaggacttgaagttccttcctcttttttttatgtcttaagagcaggaaataaagagacagctgaaggtgtagccttgaccaactgaaagggaaatcttcatcctctgaaaaaacatatgtgattctcaaaaaacgcatctggaaaattgataaagaagcgattctgtagattctcccagcgctgttgggctctcaattccttctgtgaaggacaacatatggtgatggggaaatcagaagctttgagaccctctacacctggatatgaatcccccttctaatacttaccagaaatgaaggggatactcagggcagagttctgaatctcaaaacactctactctggcaaaggaatgaagttattggagtgatgacaggaacacgggagaacaatgctctgtttgggctggatatttctttggcttgttgcaggagagcgaattaaaggatttaatatttcaggttgttccacaaaaaaactcctttggacatattctacaaggagtgaagaggaatttgtcttattttgtgatttaccagagccacagaaatcacatttctgccacagaaatcgactctcaccaaaacaagtccctgagcacctgcccttcatgggtagtaacgacctatctgatgtccaatggtaccaacaaccttcgaatggagatccattagaggacattaggaaaagctatcctcacatcattcaggacaaatgtacccttcactttttgaccccaggggtgaataattctgggtcatatatttgtagacccaagatgattaagagcccctatgatgtagcctgttgtgtcaagatgattttagaagttaagccccagacaaatgcatcctgtgagtattccgcatcacataagcaagacctacttcttgggagcactggctctatttcttgccccagtctcagctgccaaagtgatgcacaaagtccagcggtaacctggtacaagaatggaaaactcctctctgtggaaaggagcaaccgaatcgtagtggatgaagtttatgactatcaccagggcacatatgtatgtgattacactcagtcggatactgtgagttcgtggacagtcagagctgttgttcaagtgagaaccattgtgggagacactaaactcaaaccagatattctggatcctgtcgaggacacactggaagtagaacttggaaagcctttaactattagctgcaaagcacgatttggctttgaaagggtctttaaccctgtcataaaatggtacatcaaagattctgacctagagtgggaagtctcagtacctgaggcgaaaagtattaaatccactttaaaggatgaaatcattgagcgtaatatcatcttggaaaaagtcactcagcgtgatcttcgcaggaagtttgtttgctttgtccagaactccattggaaacacaacccagtccgtccaactgaaagaaaagagaggagtggtgctcctgtacatcctgcttggcaccatcgggaccctggtggccgtgctggcggcgagtgccctcctctacaggcactggattgaaatagtgctgctgtaccggacctaccagagcaaggatcagacgcttggggataaaaaggattttgatgctttcgtatcctatgcaaaatggagctcttttccaagtgaggccacttcatctctgagtgaagaacacttggccctgagcctatttcctgatgttttagaaaacaaatatggatatagcctgtgtttgcttgaaagagatgtggctccaggaggagtgtatgcagaagacattgtgagcattattaagagaagcagaagaggaatatttatcttgagccccaactatgtcaatggacccagtatctttgaactacaagcagcagtgaatcttgccttggatgatcaaacactgaaactcattttaattaagttctgttacttccaagagccagagtctctacctcatctcgtgaaaaaagctctcagggttttgcccacagttacttggagaggcttaaaatcagttcctcccaattctaggttctgggccaaaatgcgctaccacatgcctgtgaaaaactctcagggattcacgtggaaccagctcagaattacctctaggatttttcagtggaaaggactcagtagaacagaaaccactgggaggagctcccagcctaaggaatggtgaaatgagccctggagccccctccagtccagtccctgggatagagatgttgctggacagaactcacagctctgtgtgtgtgtgttcaggctgataggaaattcaaagagtctcctgccagcaccaagcaagcttgatggacaatggagtgggattgagactgtggtttagagcctttgatttcctggactggactgacggcgagtgaattctctagaccttgggtactttcagtacacaacacccctaagatttcccagtggtccgagcagaatcagaaaatacagctacttctgccttatggctagggaactgtcatgtctaccatgtattgtacatatgactttatgtatacttgcaatcaaataaatattattttattagaaa

SEQ ID NO: 2168 - DNA, 3522 bp, Homo Sapiens
  NM_003855
gccatttgaagcagaatccaaaccatgaattgtagagaattacccttgaccctttgggtgcttatatctgtaagcactgcagaatcttgtacttcacgtccccacattactgtggttgaaggggaacctttctatctgaaacattgctcgtgttcacttgcacatgagattgaaacaaccaccaaaagctggtacaaaagcagtggatcacaggaacatgtggagctgaacccaaggagttcctcgagaattgctttgcatgattgtgttttggagttttggccagttgagttgaatgacacaggatcttactttttccaaatgaaaaattatactcagaaatggaaattaaatgtcatcagaagaaataaacacagctgtttcactgaaagacaagtaactagtaaaattgtggaagttaaaaaattttttcagataacctgtgaaaacagttactatcaaacactggtcaacagcacatcattgtataagaactgtaaaaagctactactggagaacaataaaaacccaacgataaagaagaacgccgagtttgaagatcaggggtattactcctgcgtgcatttccttcatcataatggaaaactatttaatatcaccaaaaccttcaatataacaatagtggaagatcgcagtaatatagttccggttcttcttggaccaaagcttaaccatgttgcagtggaattaggaaaaaacgtaaggctcaactgctctgctttgctgaatgaagaggatgtaatttattggatgttcggggaagaaaatggatcggatcctaatatacatgaagagaaagaaatgagaattatgactccagaaggcaaatggcatgcttcaaaagtattgagaattgaaaatattggtgaaagcaatctaaatgttttatataattgcactgtggccagcacgggaggcacagacaccaaaagcttcatcttggtgagaaaagcagacatggctgatatcccaggccacgtcttcacaagaggaatgatcatagctgttttgatcttggtggcagtagtgtgcctagtgactgtgtgtgtcatttatagagttgacttggttctattttatagacatttaacgagaagagatgaaacattaacagatggaaaaacatatgatgcttttgtgtcttacctaaaagaatgccgacctgaaaatggagaggagcacacctttgctgtggagattttgcccagggtgttggagaaacattttgggtataagttatgcatatttgaaagggatgtagtgcctggaggagctgttgttgatgaaatccactcactgatagagaaaagccgaagactaatcattgtcctaagtaaaagttatatgtctaatgaggtcaggtatgaacttgaaagtggactccatgaagcattggtggaaagaaaaattaaaataatcttaattgaatttacacctgttactgacttcacattcttgccccaatcactaaagcttttgaaatctcacagagttctgaagtggaaggccgataaatctctttcttataactcaaggttctggaagaaccttctttacttaatgcctgcaaaaacagtcaagccaggtagagacgaaccggaagtcttgcctgttctttccgagtcttaatcttcagaaacagtgaacgccaaaaagaactcaagatattctggggactgagcatatgaacctgttcataacaaaggctgtgactcgaaataattaactttgtcaaaatcctgctcacaatttgaagatgaaacttgtcattaggttggcgggaatgagactaaagattgcgctgtgggctgtggtcacgtgctcccagaagacctggaattcaaaagaaatggagctattctttttctccctctttcataactggatgcagctgctcatactcaatcccatattcagcaagtgtgaagctggacgtgatgcaaaataaccgatgccctacaaaaagggcgcatctttaagagttttaatgccagtgcttaattcgaatgaggggattttaagtgtctgaagaggcattttctagggaccagtgggtgactgagtaactgaaatgctgctttcactccctaacaccatggatctggttgtgcataggatgtgggaggaggggctggcagggccgccttcagaggctgcagggcctcagcctcaggatgcatttaatgtatcctggccacagttgcagccaacggttcttgaaagctcggtaaggccctgcaacgcagagcctgcttatgtggatctatttatgggaacttcttaaaaggaccccagaatagctctttatctttcacaagagacacaaattctaattgagttaattatctgggcctttcactttggatgctctgaaacatttgttgattttgtgtgaatgtttatatcaaaatgtttgccaggttgtattagccattgaatagcaaaaaactgatagttacttgcttgttttttaaaaattacatattaaaaatgcccttggcataaggcagcatggtgtggcagttaagagatgggctgtgcagcccatcctgagctccagtcctgagtttgctacttacttctgtggcctctggaaccttatccaacctcttggtgcttcagtttcctcatctgtgaaattagaatttataataattgcacctacctcccaggggtaactaaatgaataaatataataaagtacttacagtggttcctgacacagactcagcactccgtcagtgttgccatgactatttttattatcattattaatgattacttagatcaattatttagcagtggactaatggaagctacagagcagggaagggaagcagatctagggaggaaggcagttttgatttgaggaggtttgcacatgtagagaagcatactggagaagcatatccagagggcgaaagatatctctccattgtgcatctgcctcttttgacgttggaagacacatgtcttactccccaaagggagcccagcactgggagccttcttgatgatctcaaaaataatagctattcaagaaaatcaccaagtgactgtgaaaccgtcagttcggaaggctggttagaacatgtgggagcaacatgaatgttctacaaaagtttaaagcagagattgtttcaaatgggtgtagtagatattactgaaaaccaaaaaagagtgagattgtcagtgtaagaatgtgatttaatgtttgtagtgcttacaattttgtgtaccaactggatgactaaaaagagtaaaataatttaattaatagctcatattttatgtgtgaaaacatgttagtgaacatatataatcaaaatagatttcattgctattgcatagtctctaatacatagaatgattttgcttttctcttttattatacttgctttaaaatacttgaaatatattttgcattaaatgcatttcaagttaaatgtcttaaatgtatacattagatgtgtgttttaaaatgcataaaacacgttgaaa

SEQ ID NO: 2169 - DNA, 2542 bp, Homo Sapiens
  NM_003856
gaggagggacctacaaagactggaaactattcttagctccgtcactgactccaagttcatcccctctgtctttcagtttggttgagatataggctactcttcccaactcagtcttgaagagtatcaccaactgcctcatgtgtggtgaccttcactgtcgtatgccagtgactcatctggagtaatctcaacaacgagttaccaatacttgctcttgattgataaacagaatggggttttggatcttagcaattctcacaattctcatgtattccacagcagcaaagtttagtaaacaatcatggggcctggaaaatgaggctttaattgtaagatgtcctagacaaggaaaacctagttacaccgtggattggtattactcacaaacaaacaaaagtattcccactcaggaaagaaatcgtgtgtttgcctcaggccaacttctgaagtttctaccagctgcagttgctgattctggtatttatacctgtattgtcagaagtcccacattcaataggactggatatgcgaatgtcaccatatataaaaaacaatcagattgcaatgttccagattatttgatgtattcaacagtatctggatcagaaaaaaattccaaaatttattgtcctaccattgacctctacaactggacagcacctcttgagtggtttaagaattgtcaggctcttcaaggatcaaggtacagggcgcacaagtcatttttggtcattgataatgtgatgactgaggacgcaggtgattacacctgtaaatttatacacaatgaaaatggagccaattatagtgtgacggcgaccaggtccttcacggtcaaggatgagcaaggcttttctctgtttccagtaatcggagcccctgcacaaaatgaaataaaggaagtggaaattggaaaaaacgcaaacctaacttgctctgcttgttttggaaaaggcactcagttcttggctgccgtcctgtggcagcttaatggaacaaaaattacagactttggtgaaccaagaattcaacaagaggaagggcaaaatcaaagtttcagcaatgggctggcttgtctagacatggttttaagaatagctgacgtgaaggaagaggatttattgctgcagtacgactgtctggccctgaatttgcatggcttgagaaggcacaccgtaagactaagtaggaaaaatccaagtaaggagtgtttctgagactttgatcacctgaactttctctagcaagtgtaagcagaatggagtgtggttccaagagatccatcaagacaatgggaatggcctgtgccataaaatgtgcttctcttcttcgggatgttgtttgctgtctgatctttgtagactgttcctgtttgctgggagcttctctgctgcttaaattgttcgtcctcccccactccctcctatcgttggtttgtctagaacactcagctgcttctttggtcatccttgttttctaactttatgaactccctctgtgtcactgtatgtgaaaggaaatgcaccaacaaccgtaaactgaacgtgttcttttgtgctcttttataacttgcattacatgttgtaagcatggtccgttctatacctttttctggtcataatgaacactcattttgttagcgagggtggtaaagtgaacaaaaaggggaagtatcaaactactgccatttcagtgagaaaatcctaggtgctactttataataagacatttgttaggccattcttgcattgatataaagaaatacctgagactgggtgatttatatgaaaagaggtttaattggctcacagttctgcaggctgtatgggaagcatggcggcatctgcttctggggacacctcaggagctttactcatggcagaaggcaaagcaaaggcaggcacttcacacagtaaaagcaggagcgagagagaggtgccacactgaaacagccagatctcatgagaagtcactcactattgcaaggacagcatcaaagagatggtgctaaaccattcatgatgaactcacccccatgatccaatcacctcccaccaggctccacctcgaatactggggattaccattcagcatgagatttgggcaggaacacagacccaaaccataccacacacattatcattgttaaactttgtaaagtatttaaggtacatggaacacacgggaagtctggtagctcagcccatttctttattgcatctgttattcaccatgtaattcaggtaccacgtattccagggagcctttcttggccctcagtttgcagtatacacactttccaagtactcttgtagcatcctgtttgtatcatagcactggtcacattgccttacctaaatctgtttgacagtctgctcaacacgactgcaagctccatgagggcagggacatcatctcttccatctttgggtccttagtgcaatacctggcagctagccagtgctcagctaaatatttgttgactgaataaatgaatgcacaaccaaaaaaaaaaaaaaaaaaaaaaaaaaaaaaaaaaaaa

SEQ ID NO: 2170 - DNA, 1945 bp, Homo Sapiens
  NM_003858
ggtccccgacattccatatacaagatggccgcagtcggcaaggagagacgtcgctgaggggcttgcctgaagcgaggggattctaacattttcagagaaccttttggaaagaacaagcctacttcaataaatgaaggagaataaagaaaattcaagcccttcagtaacttcagcaaacctggaccacacaaagccatgttggtactgggataagaaagacttggctcatacaccctcacaacttgaaggacttgatccagccaccgaggcccggtaccgccgagagggcgctcggttcatctttgatgtgggcacacgtttggggctacactatgataccctggcaactggaataatttattttcatcgcttctatatgtttcattccttcaagcaattcccaagatatgtgacaggagcctgttgcctctttctggctgggaaagtagaagaaacaccaaaaaaatgtaaagatatcatcaaaacagctcgtagtttattaaatgatgtacaatttggccagtttggagatgacccaaaggaggaagtaatggttctggagagaatcttactgcagaccatcaagtttgatttacaggtagaacatccataccagttcctactaaaatatgcaaagcaactcaaaggtgataaaaacaaaattcaaaagttggttcaaatggcatggacatttgtaaatgacagtctctgcaccaccttgtcactgcagtgggaaccagagatcatagcagtagcagtgatgtatctcgcaggacgtttgtgcaaatttgaaatacaagaatggacctccaaacccatgtataggagatggtgggagcagtttgttcaagatgtcccggtcgacgttttggaagacatctgccaccaaatcctggatctttactcacaaggaaaacaacagatgcctcatcacaccccccatcagctgcaacagcccccatctcttcagcctacaccacaagtgccgcaagtacagcagtcacagccgtctcaaagctccgaaccatcccagccccagcagaaggaccccctcatcctcctccagggttgggcctgccgccagccagctacccacctcctgccgtcccccctggaggacagcctcctgtgcccccgcccattcccccacccggcatgcctccagttggggggctggggcgggcagcctggatgagataacgtgagccttttttccctctttgtttttttaacaagattttctaatcgacttgcagagtagttgaagtgggtaagcagcagggtaccttgtataatgcacgacagttgcagtatgggaagaatggaccgggcccctgggataaaatcagagtggtcctcacacctagaggacggggacaaccagctttcagagtagcctcatcagtgcccttgcagtctgactgtgtacacttggttcagctaatgtctgagagtcctgcactgggttactttatactagtgaggacgttaaccagccatattggctcaataaatagcttcggtaaggagttaatttccttctagaaatcagtgcctatttttcctggaaactcaattttaaatagtccaattccatctgaagccaagctgttgtcattttcattcggtgacattctctcccatgacacccagaaggggcagaagaaccacatttttcatttatagatgtttgcatcctttgtattaaaattattttgaaggggttgcctcattggatggctttttttttttcctccagggagaaggggagaaatgtacttggaaattaatgtatgtttacatctctttgcaaattcctgtacatagagatatattttttaagtgtgaatgtaacaacatactgtgaattccatcttggttacaaatgagactccttcagtcagttatccaaataaaagcagttctgaaactaaaaaaaaaaaaa

SEQ ID NO: 2171 - DNA, 1047 bp, Homo Sapiens
  NM_003859
atggcctccttggaagtcagtcgtagtcctcgcaggtctcggcgggagctggaagtgcgcagtccacgacagaacaaatattcggtgcttttacctacctacaacgagcgcgagaacctgccgctcatcgtgtggctgctggtgaaaagcttctccgagagtggaatcaactatgaaattataatcatagatgatggaagcccagatggaacaagggatgttgctgaacagttggagaagatctatgggtcagacagaattcttctaagaccacgagagaaaaagttgggactaggaactgcatatattcatggaatgaaacatgccacaggaaactacatcattattatggatgctgatctctcacaccatccaaaatttattcctgaatttattaggaagcaaaaggagggtaattttgatattgtctctggaactcgctacaaaggaaatggaggtgtatatggctgggatttgaaaagaaaaataatcagccgtggggccaattttttaactcagatcttgctgagaccaggagcatctgatttaacaggaagtttcagattataccgaaaagaagttctagagaaattaatagaaaaatgtgtttctaaaggctacgtcttccagatggagatgattgttcgggcaagacagttgaattatactattggcgaggttccaatatcatttgtggatcgtgtttatggtgaatccaagttgggaggaaatgaaatagtatctttcttgaaaggattattgactctttttgctactacataaaagaaagatactcatttatagttacgttcatttcaggttaaacatgaaagaagcctggttactgatttgtataaaatgtactcttaaagtataaaatataaggtaaggtaaatttcatgcatctttttatgaagaccacctattttatatttcaaattaaataattttaaagttgctggcctaatgagcaatgttctcaattttcgttttcattttgctgtattgagacctataaataaatgtatatttttttttgcataaagt

SEQ ID NO: 2172 - DNA, 1179 bp, Homo Sapiens
  NM_003860
ccagtgttcccagttcccaccagtccaactgcgaggagtgcgacgtgagtctgagtctgatccctccgaaaaccgtacttccggcgctgtctcggaggcctcccgtcccctcccttgtccgtcttctaactcttccccacgccaggtccgtcaagcctaagtccttgagttccgggtccgggcagcagagaaaggaagtcctctccctggaggcctatctccctcagaactgcgcgagaagcgagaccttagaaggcagggcttcccgcgaaggaccggaaaggagcgcctactaaggacgccgtcgaggtccggggcgcctcaactctatagctctaactggctagaagtgcccaacgtggaatgtttcttttttaaaggcggctcttgaagcgacccggaagcggaagtggaagaaagttctagtggcttgaggtatccgcaggagcggccgggtggcgggaggaaccgttacgggaactgaagttgcggattaagcctgatcaagatgacaacctcccaaaagcaccgagacttcgtggcagagcccatgggggagaagccagtggggagcctggctgggattggtgaagtcctgggcaagaagctggaggaaaggggttttgacaaggcctatgttgtccttggccagtttctggtgctaaagaaagatgaagacctcttccgggaatggctgaaagacacttgtggcgccaacgccaagcagtcccgggactgcttcggatgccttcgagagtggtgcgacgccttcttgtgatgctctctgggaagctctcaatccccagccctcatccagagtttgcagccgagtagggactcctcccctgtcctctacgaaggaaaagattgctattgtcgtactcacctccgacgtactccggggtcttttgggagttttctcccctaaccatttcaacttttttttggattctcgctcttgcatgcctcccccgtcctttttcccttgccagttccctggtgacagttaccagctttcctgaatggattcccggccccatccctcacccccaccctcactttcaatccgtttgataccatttggctccttttttggcagaacagtcactgtccttgtaaagttttttagatcaataaagtcagtggctttcaaaaaaaaaaaaaaaaaaaaaaaaaaaa

SEQ ID NO: 2173 - DNA, 5999 bp, Homo Sapiens
  NM_003861
agaggcagagggaggagcctcggggggaaggagagggaggggaccgtcaggaagccgcgaacgccgccgagtgtctgcacacctcgctctgcctgccatggctggttaaagaaccatccggatcgcagcgcggggggagggccgggtggggggagcagcggccgcgcgtgaggccgagggaggggcggcggcgcgagcggcggcggcggcggttccagcatgaagaggagagctggcctggggggcagcatgaggtcagtggtgggcttcttgtcccagcggggcttgcatggggaccccctgctcactcaggactttcagaggagacgcctgcggggctgcagaaacctctacaagaaggacctcctcggccacttcggctgtgtcaatgccattgaattctccaacaatggaggccagtggctggtctcaggaggagatgaccgccgggttctgctatggcacatggaacaagccatccactccagggtcaagcccatacagctgaaaggagagcaccattccaacattttttgcctggctttcaacagtgggaacactaaagtgttctctggaggcaatgatgagcaagttatcctccatgatgttgaaagcagtgagacattggacgtgtttgctcatgaagatgcagtatatggcttgtctgtgagcccagtgaatgacaacatttttgccagttcctcagatgatggccgggttctcatttgggacattcgggaatccccccatggagagcccttctgcctggcaaactatccatcagcctttcatagtgtcatgtttaaccctgtggagcccaggttgttggccacagccaattcaaaggaaggagtgggactctgggacattcgaaaacctcagagttctctcctgcgctatggtggaaacctgtccctccaaagtgccatgagtgtacgattcaacagcaacgggacccagctcctggccctgaggcgacgcctgccccctgtgctctatgacatccattcccgcctgcctgtgtttcagtttgacaatcagggttacttcaactcatgcaccatgaaaagctgctgttttgcaggagatcgtgaccagtatatcctttcgggctctgatgacttcaacctgtacatgtggagaattcctgcagatccagaagcaggtggcattggtagggtggtcaacggagccttcatggtgctgaaagggcatcgatctattgttaaccaagtccgatttaatccccacacctacatgatctgctcttctggtgtagaaaagattatcaagatctggagcccatacaagcagccaggatgtactggagacctcgacggtcggattgaggacgattcccgctgcctctatacccatgaagagtacatcagccttgtgctgaacagtgggagtggcctgtcgcatgactacgccaaccagtcggtccaggaagacccccggatgatggccttctttgactcactggtacgccgagagatcgagggctggagctctgactcagacagtgacctcagtgagagtactatcctccaactgcacgctggggtcagcgagcgctcaggctacactgactcagagtcttcggcctcattgcctcgctccccgcctcccacagtagatgagtctgccgacaacgccttccacctggggcccctgcgggtcaccaccacaaacacagtagcctcaactccaccaacacccacgtgtgaggatgcagcctctcgccagcagcgtctgtctgctctgcggcgctaccaagacaaacgcctcctggccctttccaatgagtccgattctgaggagaatgtctgtgaggtggaactagacacagatctctttccccggccacggtcacccagccccgaagatgaatccagcagttccagcagctctagcagctctgaggatgaggaggagctgaatgaacgccgagcctctacctggcagcggaatgccatgcggcgccgacagaagacaacccgagaagacaagcccagtgccccaatcaagcccaccaacacttacattggagaagacaactatgattacccccagatcaaagtggatgacctctcctcctccccaacctcgtcccctgagcggagcacttccacgctagagattcaaccaagccgggcatcaccaacttctgacatagaatcagttgagcgaaaaatttataaagcttacaagtggctccgctactcttatatctcctactcaaataacaaagatggagagacctccttggtgaccggggaggcagatgaagggagagcaggaaccagccacaaagacaacccagccccttcttccagtaaggaagcctgtctaaacatagcaatggcccagaggaaccaggacctgccacctgaaggctgcagcaaggacacttttaaagaagagactcctagaactcccagcaatggcccaggccatgagcacagcagccatgcttgggcagaggtgccagagggtacctctcaggacactggcaatagcggctctgtagagcacccttttgaaaccaagaagctcaatggaaaggccctgagcagtcgggctgaggagccgccttctcctcctgtccccaaggcatctggctccactctcaacagcgggtctggcaactgtcccaggacccagtctgatgacagtgaggagaggagcctcgaaaccatctgtgccaaccacaacaatggacgcttacaccctcgtccccctcaccctcacaataacgggcagaacttgggggagctggaggtggtggcctactcttccccaggacactcagacactgaccgtgataactcgtccctgacagggacactcctacacaaagattgttgcgggtctgaaatggcctgtgagacccccaatgctggaacaagagaggaccccactgacaccccagccacagatagtagcagggctgttcatggccacagtggcctcaaaaggcaacgaattgaattggaagatacagattcagagaattcctcctcagagaagaaattaaaaacatgataaatacaaagggaaaacaaaaagctacaaaagtagccttacaaaaaaaaaaaaattgtttagtgaatacagaggaaaggaaaaacaagtattaaaggcacatgaaaccagggcctgaaattttgtgtctgatgctgctcccttctatccaacattcaacaacgggtctgaatgtctagctggccattggcttgtgctgtgttaagaaaggggaaaaaaaaataacccaagtgactcctttctagtgagacgtgagcgtagtgtgccgcgcaaggctctgtggaagtaaatctttgttgagacgttcgacttgttcttgtgtacgcacaatggcacgtgtgcgcttattgtctcataagaccttccttttagttctccatcagaaaggacctatgaatttgtactttttgccatctcaccctgtttacatgccataggtgttctggtctggatgatgggtgcctgttaaatcaggttgtgctgccagtgagttgtagatttatgctggaagaatggagaatggaaacaggccttcagcccattggctgcgctggagaggaaagcatggttcctttcttaaagaaatcttccatgttttctctaagtaacacttctttattgagcatttaatgtggacatactataaaaaagaatttttaatgctaatgagaggtttagcacttaagatcagattcaagagaatatagattcctgataaatttcactgtttgcaaattgagcagtgctgcaacatgtactgtatgaaggccataaaatagagctagtcatggataacagactttaaccagttaggtgctagatcctaagaggcactcacaaggccagcaggtgcttccttggctcccatgatcgatcgaggcatagtgaaagaagggcaaagacagctttccagagctttgtgctcaggctactaaagtagttgttataggtgtgttaacgaagaagcttagtgaggagcagaatgtggtactatattcatttaactcaacccagaaccattggtcagaattggtgggactggcatcttccctcagacttgcagttgatagaggctgtggtgttctcactagactttgcagagcagtaggcatctcaaggtaacagattcttattgagtaggtctattaggagtcagaaggtgttggggaggagtctctggcttatgactcctggttcccattagtcttaagtcttctggttcccataaaagactcagttttattgaggtagatacaggtttagaagagaaaagagcaacagattttcagcgttgcagtcactcggttatctatgaagggttgtgcaaaacaggaaggtctgggaatgaccagatatcttgttggcataaatgttatgaaaaggcagaatactggcaagaaatgaggaagagagagaaaaacaatataactttcttgagtgcaaaggtgctagacaactaggagcccagctgggattggtgtagggagggccgaacgctgactagtgtggcctcactgccccaggcttcctttcagaggaaggcctgtcctgctggaactggagccaaggggaggctgcctatgaaggcagaagatgtggatgaattcaggcactgggggtgggggggttatttataaacacaaggtggttggtttaagccaaaaggagataccatcctgataagctctgtgaaagagaagatgtgcctggtgtgtgtaatgcggctggggtatgaaaacactgagaaggagatgaaggagtgtgtgtagcatgggggtgtgtacaacttaacacctggacttttactgggggagtgggaaagtgattctgtaaccaacattagaattactttggatttgtaatcagattggttctatgatttgtctttgactattcacagataattgtaaatgctggttttataagcccaagtcattttacatttgcttttccaaaatgtattaaattggaattttttaatcctttatatacaaaaaaaatacgatcactcagtgtgtgtttctcttccccttcttagtcagcacacccagtcctttattttattctattctatttattttattttaataagtacttagcctcttctgacttctcaaaggacaatcggatacatatcttcctgaaaagaagtagttaaagttcccttgggaactagctacttggtagttacaattcccaaatgcagaacttggtcttttcatgttaaaagccttaatctcatttgggtactcaaaagagaaatcagagtttattctggttaacttgagaagccaagaaagatcatttttagcaagtatgccttccatccttggcagaggcttcccagcatcctaggctcagcttaccgggtgataggccccataagacacacacatgagcagggtgagaaatgcttgctttatagctgctccaccctcatctccagagattttgtgtctatggttgtgggtctggaaacctggcaggaaccacttctagagtacctttgcctaaactcttttagaattgaggccccaactttgatggcacatttaatacccaatttcttccataatagatatttttaatagcaggacagatggcactgattagatcaagaactatttggaagtgcctcttatgtttttttcctgcattctgtacataaagttttaagtggcaggtccagatatgtaaaatcatttctctctattttccagctggttttgttaatgattctctaggacagcaggtaaatgagttaagttgttggcttggggcaagtgaagtttgtgactatgcttgatttaataagctgagagtctcttgtttgtctgtcaaggtgccttcctctgctgaagccttacctccttctcacccagtaacggttaactcttctcttgtgtatatgcaaataaacctattattcacttctcaaaaaaaaaaaaaaa

SEQ ID NO: 2174 - DNA, 4140 bp, Homo Sapiens
  NM_003866
gaagccagaggctgggggagctgctggagcctcgcgaagccgcggccggcgccctgcgccgtcgccgccgcctgctagtttcctccgggttctcagccccgggtactgaggcttcggtctataaatagcaggttacagctcctcctgggcgcgcacacgctcacacgctcgcaagcgaacgcaggaaagtcaggctaaaagtgtctgctgctgctgccgccccccactccgcctccgggagagaatacaaagaaatggtgttacctggcaagaggtcttctgtcttttatgaaaaattagacaaaggctttacaggaggcatagtactggaaatctgctcctgatgaggtctcagaaagcttccactcgtggtggaaggcaaaggaggagcaggcacatcacatgagccttgaaaccagcgaaacaataatcaaagagcagttctgtcaaagaaaacaacataaatcaggtacagaatttcagagtgggatatcagatctttagtgtgaagatacatctacattaaaccaggaatcactagaactgacatttggacaagaaaatttggaaaattttaaaactgtgaaggttgatcatggaaattaaagaggaaggggcatcagaagaagggcagcactttcttcctacagcccaggccaatgatcccggggactgtcagttcacaagtatccagaagactccaaatgaaccgcagttggaattcatccttgcatgcaaggatctcgtggctcctgtccgtgatcgtaaactgaatacactggtgcagatctccgtaatccaccccgtggagcagagtctgacaagatactccagcaccgaaattgtggagggaacaagggacccactgtttttgactggtgtcacattcccatctgagtatcccatctatgaggagaccaaaataaaactaacagtctatgatgtcaaggataagtctcatgacaccgttcgaaccagtgtcctaccagaacataaggatcccccgccagaagttgggcgaagtttcttgggctatgccagttttaaagtgggagagctgctgaagtcaaaggagcaattgctggtcctgagcctgagaacttcagatggtggcaaagtggttggcaccatagaagtcagtgtcgtgaagatgggggagattgaggatggggaagccgaccacatcaccacagatgtacagggacaaaagtgtgccctggtatgtgaatgtacagccccggaaagtgtgagcggaaaagataacttaccttttttgaattcagtgttaaagaacccagtatgtaaattatatagatttcccacatctgacaataagtggatgcgaattcgagagcagatgtcagagagcattctttcctttcatattcctaaggaattgatttcccttcacattaaagaagatttgtgcagaaaccaggagataaaagaacttggtgagctttctccacattgggacaatctgcgaaaaaatgtccttactcactgtgatcaaatggtgaatatgtaccaagacattctgacagaacttagcaaggaaacagggtcctctttcaaatcaagcagcagcaaaggagagaaaacattagaatttgttccaataaatctacatctgcaaagaatgcaggtacacagccctcacttgaaagatgctctctacgatgtcatcactgtgggagccccagctgcccattttcagggatttaagaatggtggtcttcggaagctactccatagatttgaaacagaaagaagaaataccggataccagtttatttactattcacctgaaaacacagccaaagcaaaggaagttctcagcaacatcaatcaactacaacctcttatagcaacccatgcagacctactgcttaattctgcaagccagcattctccagacagcttgaagaattctttaaagatgctttcagaaaaaacagagctttttgtacatgccttcaaggatcaacttgtcaggagtgctcttttagcactctacactgcaaggccaggaggcattcttaagaagccaccctctcctaagagcagcacagaggagagcagtccccaagaccaacccccagtgatgagagggcaggactccataccacatcattcagactatgatgaggaagagtgggacagggtgtgggccaatgtggggaagagcctgaactgcattattgctatggtggacaaactgattgaaagagatggtggcagtgaaggcagtggcggcaacaatgatggagaaaaggaaccttcattaacagatgccattccctctcacccaagagaggactggtatgaacagttgtatcccctcatccttaccctgaaggactgcatgggagaagtggtgaaccgagccaagcagtccctgacatttgtgctccttcaggaacttgcgtacagcttgccccagtgtctgatgctgacgctaagaagagacatcgtcttcagccaagcacttgctggattggtttgtggttttatcatcaaattacagacaagtctgtatgacccaggcttcctacagcagcttcacacagtggggttgatagtacaatatgaaggactgctaagtacatacagcgatgaaattggaatgctagaggacatggccgttggcatttccgatttaaagaaagttgcatttaaaataattgaagccaaatccaatgatgtgttgccagttataacaggaagacgagaacattacgtggtagaggtcaagcttccagccagaatgtttgagtcactacctctacagattaaagaaggacagttgcttcatgtgtatccagtactttttaatgttggaatcaatgaacagcaaactctggctgaaaggtttggagatgtctctttgcaagaaagtattaatcaggaaaacttcgaacttctacaagaatattacaagatatttatggaaaagatgcctcctgattatatttcacattttcaggaacaaaatgatttaaaagcattgctagaaaatctccttcaaaatatccaatccaaaaaaagaaagaatgtagaaattatgtggctggctgcaacgatttgccgcaaactgaatggtattcgtttcacctgttgtaaaagtgccaaagacaggacatcgatgtcagtgacacttgaacaatgctcaatcttgagagatgagcaccagttacacaaggacttctttatccgagcgctggattgcatgagaagagaaggatgccgcatagagaatgtactgaagaatatcaaatgcagaaagtatgctttcaacatgctacagctgatggctttccccaagtactacagacctccagaggggacttatggaaaagctgacacctaagtttaccaacatgttaataaacaggaacacaaatacatttcagttggataatcttcaccttggtcttttttgtttgtttttattgtcatgaatttgtggtgggggagatgatcacagatgtttcccaaaatctaggaactacttcaattcatcatcagcatattgctctgaaagaaatccattttaaaaaatcttacatgattcagtactgtcatttctagttctaagcttctatgtgttgagcctagctgattgagattggttcacaaagtgtaaatttcattcatgagtatttaaatgtttctgaggaaacatggatcatttcaataggactaggggtgattcacagagcaccactctccaaccaaatggaagagaggagagggggaaaaggaacatattttttttgtgatacaacttaatagcctatgagaacacagtcaacctgagaatcaatgtaagggatttaaaaaaaatgtgtagccactcaattaggtagagttaactcatgatctggaatactgaggcagtttgcaggtatgttccacaatgatctctatcatccagtcaaggtgtgactcctcccttgcaacaggcatatgcatggagtgagtaaagtggtcaacagacctttcaaaaccatggcatcttttcagaactctgacttgggttgtgtgatctagctgtgaatgtagcaatatagaacgtttaatagaatgataagcaaaacactgcaatgatctaaaattacaaaaaaaaaaaaaaaaaaa

SEQ ID NO: 2175 - DNA, 3955 bp, Homo Sapiens
  NM_003869
gtggcgtggcgacggagtcgcgcgagggacacgccgcgttgtgggttctcggcctgaggtgcgagagaagcggtgaccgcggccctggctgctcggacccgggaacatgatggtcgctggagcagaaggcgctgagaagggaccacggcggcgctgggtcgtgcgagccagtagcgggctgaaacgtagaggccagaaccaggtctcagggggcactaaaggcggtcggaggtaatccccacaccgcttcctcctggaagtcaggctggccgggagctcccgtatccaggacggttggtcgcctctggcctggcagggatcctagtgtctcgggacctcccggtgacgcgcctgcctcccctgctgcaccataggcccgggagtacggcgtccccacagcttggaccggcaggggctcgtgaaatgtttgtcaagtggataaatgaccatggccgtggtctccgcgggaggtgaggaaactgaaagccaccgaggaaaaggggggcgctccttaagaagtgccgcggtcacgtgtacgtttcaaaagaatggcgtgactgagtagggaggggaccgcggagaccctcagaccctggactgtaaggagatgaggggccgtgaaggggaacccaggaaactgagtcctgaaagcaaggaggaacttccagaatgaagggcgccgacactccttcctgcctttgctcaagcggttccttcaccccgatcaagttccttcccatttctccatctgggggatcctgaacgtgcacatcctcagagaagccctcctggggtctccaattctagtttattgccccctcctatcgatcccccagcgcgctcatcgggcctgtggacaaggacaggtttgaagagaggattccctggatcgcggaagggctgcaggaatggcacagccccttccgaggatgccaaaggagcccgggcaaaggaaagtggccgtgcccgggcctgcctaccactagatccccacccacctatgactgctcagtcccgctctcctaccacacccacctttcccggcccaagccagcgcaccccgctgactccctgcccagtccaaactccaaggctgggcaaggcactgatccactgctggacagacccggggcagcctctgggtgaacagcagcgtgtccgccggcagcgaaccgagaccagcgagccgaccatgcggctgcacagacttcgtgcgcggctgagcgcggtggcctgtgggcttctgctgcttcttgtccggggccagggccaggactcagccagtcccatccggaccacacacacggggcaggtgctggggagtcttgtccatgtgaagggcgccaatgccggggtccaaaccttcctgggaattccatttgccaagccacctctaggtccgctgcgatttgcaccccctgagccccctgaatcttggagtggtgtgagggatggaaccacccatccggccatgtgtctacaggacctcaccgcagtggagtcagagtttcttagccagttcaacatgaccttcccttccgactccatgtctgaggactgcctgtacctcagcatctacacgccggcccatagccatgaaggctctaacctgccggtgatggtgtggatccacggtggtgcgcttgtttttggcatggcttccttgtatgatggttccatgctggctgccttggagaacgtggtggtggtcatcatccagtaccgcctgggtgtcctgggcttcttcagcactggagacaagcacgcaaccggcaactggggctacctggaccaagtggctgcactacgctgggtccagcagaatatcgcccactttggaggcaaccctgaccgtgtcaccatttttggcgagtctgcgggtggcacgagtgtgtcttcgcttgttgtgtcccccatatcccaaggactcttccacggagccatcatggagagtggcgtggccctcctgcccggcctcattgccagctcagctgatgtcatctccacggtggtggccaacctgtctgcctgtgaccaagttgactctgaggccctggtgggctgcctgcggggcaagagtaaagaggagattcttgcaattaacaagcctttcaagatgatccccggagtggtggatggggtcttcctgcccaggcacccccaggagctgctggcctctgccgactttcagcctgtccctagcattgttggtgtcaacaacaatgaattcggctggctcatccccaaggtcatgaggatctatgatacccagaaggaaatggacagagaggcctcccaggctgctctgcagaaaatgttaacgctgctgatgttgcctcctacatttggtgacctgctgagggaggagtacattggggacaatggggatccccagaccctccaagcgcagttccaggagatgatggcggactccatgtttgtgatccctgcactccaagtagcacattttcagtgttcccgggcccctgtgtacttctacgagttccagcatcagcccagctggctcaagaacatcaggccaccgcacatgaaggcagaccatggtgatgagcttccttttgttttcagaagtttctttgggggcaactacattaaattcactgaggaagaggagcagctaagcaggaagatgatgaagtactgggccaactttgcgagaaatgggaaccccaatggcgagggtctgccacactggccgctgttcgaccaggaggagcaatacctgcagctgaacctacagcctgcggtgggccgggctctgaaggcccacaggctccagttctggaagaaggcgctgccccaaaagatccaggagctcgaggagcctgaagagagacacacagagctgtagctccctgtgccggggaggagggggtgggttcgctgacaggcgagggtcagcctgctgtgcccacacacacccactaaggagaaagaagttgattccttcattcacttcgccattcattcatacttccgtccatccattcagaaagcatttattaagaatttactcaggcatgatggcccatacttgtaatcccagctattgggaaggatgagatgggaggatggcttgaggccagaggtttgagaccgaccagccagggcaacacagtgagaccccttctcaaaaaaaaaaaaaaaaaagagagagtgtgtgattagaagctaaataggaaagttttgagcttcaagtcagtgaggagtaaaaaagatttttaaaaagcaaagaaaacaaaatataagggaaaaatatgagaaaaataaaaataaaaagagaataataggccaggcactgtggctcatgcccctaatcccagcacttttgggaggtcaaggtgagcagaacacctgaggacaggagtttgagaccagcctgcccaacgtggtgaaaccccatctctatgaaaaatacaaaaatcagacgggcacagtggtggtgcccacctgtgatcccagctactcaggaggctgaggcaggagaattacttgaacctgggaggcagaggttgcagtgagctgagattgtgccactgtactccagcctgggcaacaagagcgagactccgtttccaaaaaaataagagagaatagaagaagctactgcatgatgttagttaccaagcctgccatgggtcctctcttgctagacacactccatagatccccccactgagctgtggatgggcaaaccccggtggaatcccaccctccccaacaccccactgagccctgggccccctcctcccttcctcacctccaccttctccctgccttctctcttctctcgtctgagcccccaggccttttccactttgagggaggtgcttcgaagaatgttgcccacacctaagtgttagaagcctatgtccgttcatccctgagaggtctgaaagaataaaaataaattctaaaaaaaaaaaaaaaaaaa

SEQ ID NO: 2176 - DNA, 7219 bp, Homo Sapiens
  NM_003870
ggaccccggcaagcccgcgcacttggcaggagctgtagctaccgccgtccgcgcctccaaggtttcacggcttcctcagcagagactcgggctcgtccgccatgtccgccgcagacgaggttgacgggctgggcgtggcccggccgcactatggctctgtcctggataatgaaagacttactgcagaggagatggatgaaaggagacgtcagaacgtggcttatgagtacctttgtcatttggaagaagcgaagaggtggatggaagcatgcctaggggaagatctgcctcccaccacagaactggaggaggggcttaggaatggggtctaccttgccaaactggggaacttcttctctcccaaagtagtgtccctgaaaaaaatctatgatcgagaacagaccagatacaaggcgactggcctccactttagacacactgataatgtgattcagtggttgaatgccatggatgagattggattgcctaagattttttacccagaaactacagatatctatgatcgaaagaacatgccaagatgtatctactgtatccatgcactcagtttgtacctgttcaagctaggcctggcccctcagattcaagacctatatggaaaggttgacttcacagaagaagaaatcaacaacatgaagactgagttggagaagtatggcatccagatgcctgcctttagcaagattgggggcatcttggctaatgaactgtcagtggatgaagccgcattacatgctgctgttattgctattaatgaagctattgaccgtagaattccagccgacacatttgcagctttgaaaaatccgaatgccatgcttgtaaatcttgaagagcccttggcatccacttaccaggatatactttaccaggctaagcaggacaaaatgacaaatgctaaaaacaggacagaaaactcagagagagaaagagatgtttatgaggagctgctcacgcaagctgaaattcaaggcaatataaacaaagtcaatacattttctgcattagcaaatatcgacctggctttagaacaaggagatgcactggccttgttcagggctctgcagtcaccagccctggggcttcgaggactgcagcaacagaatagcgactggtacttgaagcagctcctgagtgataaacagcagaagagacagagtggtcagactgaccccctgcagaaggaggagctgcagtctggagtggatgctgcaaacagtgctgcccagcaatatcagagaagattggcagcagtagcactgattaatgctgcaatccagaagggtgttgctgagaagactgttttggaactgatgaatcccgaagcccagctgccccaggtgtatccatttgccgccgatctctatcagaaggagctggctaccctgcagcgacaaagtcctgaacataatctcacccacccagagctctctgtcgcagtggagatgttgtcatcggtggccctgatcaacagggcattggaatcaggagatgtgaatacagtgtggaagcaattgagcagttcagttactggtcttaccaatattgaggaagaaaactgtcagaggtatctcgatgagttgatgaaactgaaggctcaggcacatgcagagaataatgaattcattacatggaatgatatccaagcttgcgtggaccatgtgaacctggtggtgcaagaggaacatgagaggattttagccattggtttaattaatgaagccctggatgaaggtgatgcccaaaagactctgcaggccctacagattcctgcagctaaacttgagggagtccttgcagaagtggcccagcattaccaagacacgctgattagagcgaagagagagaaagcccaggaaatccaggatgagtcagctgtgttatggttggatgaaattcaaggtggaatctggcagtccaacaaagacacccaagaagcacagaagtttgccttaggaatctttgccattaatgaggcagtagaaagtggtgatgttggcaaaacactgagtgcccttcgctcccctgatgttggcttgtatggagtcatccctgagtgtggtgaaacttaccacagtgatcttgctgaagccaagaagaaaaaactggcagtaggagataataacagcaagtgggtgaagcactgggtaaaaggtggatattattattaccacaatctggagacccaggaaggaggatgggatgaacctccaaattttgtgcaaaattctatgcagctttctcgggaggagatccagagttctatctctggggtgactgccgcatataaccgagaacagctgtggctggccaatgaaggcctgatcaccaggctgcaggctcgctgccgtggatacttagttcgacaggaattccgatccaggatgaatttcctgaagaaacaaatccctgccatcacctgcattcagtcacagtggagaggatacaagcagaagaaggcatatcaagatcggttagcttacctgcgctcccacaaagatgaagttgtaaagattcagtccctggcaaggatgcaccaagctcgaaagcgctatcgagatcgcctgcagtacttccgggaccatataaatgacattatcaaaatccaggcttttattcgggcaaacaaagctcgggatgactacaagactctcatcaatgctgaggatcctcctatggttgtggtccgaaaatttgtccacctgctggaccaaagtgaccaggattttcaggaggagcttgaccttatgaagatgcgggaagaggttatcaccctcattcgttctaaccagcagctggagaatgacctcaatctcatggatatcaaaattggactgctagtgaaaaataagattacgttgcaggatgtggtttcccacagtaaaaaacttaccaaaaaaaataaggaacagttgtctgatatgatgatgataaataaacagaagggaggtctcaaggctttgagcaaggagaagagagagaagttggaagcttaccagcacctgttttatttattgcaaaccaatcccacctatctggccaagctcatttttcagatgccccagaacaagtccaccaagttcatggactctgtaatcttcacactctacaactacgcgtccaaccagcgagaggagtacctgctcctgcggctctttaagacagcactccaagaggaaatcaagtcgaaggtagatcagattcaagagattgtgacaggaaatcctacggttattaaaatggttgtaagtttcaaccgtggtgcccgtggccagaatgccctgagacagatcttggccccagtcgtgaaggaaattatggatgacaaatctctcaacatcaaaactgaccctgtggatatttacaaatcttgggttaatcagatggagtctcagacaggagaggcaagcaaactgccctatgatgtgacccctgagcaggcgctagctcatgaagaagtgaagacacggctagacagctccatcaggaacatgcgggctgtgacagacaagtttctctcagccattgtcagctctgtggacaaaatcccttatgggatgcgcttcattgccaaagtgctgaaggactcgttgcatgagaagttccctgatgctggtgaggatgagctgctgaagattattggtaacttgctttattatcgatacatgaatccagccattgttgctcctgatgcctttgacatcattgacctgtcagcaggaggccagcttaccacagaccaacgccgaaatctgggctccattgcaaaaatgcttcagcatgctgcttccaataagatgtttctgggagataatgcccacttaagcatcattaatgaatatctttcccagtcctaccagaaattcagacggtttttccaaactgcttgtgatgtcccagagcttcaggataaatttaatgtggatgagtactctgatttagtaaccctcaccaaaccagtaatctacatttccattggtgaaatcatcaacacccacactctcctgttggatcaccaggatgccattgctccggagcacaatgatccaatccacgaactgctggacgacctcggcgaggtgcccaccatcgagtccctgataggggaaagctctggcaatttaaatgacccaaataaggaggcactggctaagacggaagtgtctctcaccctgaccaacaagttcgacgtgcctggagatgagaatgcagaaatggatgctcgaaccatcttactgaatacaaaacgtttaattgtggatgtcatccggttccagccaggagagaccttgactgaaatcctagaaacaccagccaccagtgaacaggaagcagaacatcagagagccatgcagagacgtgctatccgtgatgccaaaacacctgacaagatgaaaaagtcaaaatctgtaaaggaagacagcaacctcactcttcaagagaagaaagagaagatccagacaggtttaaagaagctaacagagcttggaaccgtggacccaaagaacaaataccaggaactgatcaacgacattgccagggatattcggaatcagcggaggtaccgacagaggagaaaggccgaactagtgaaactgcaacagacatacgctgctctgaactctaaggccaccttttatggggagcaggtggattactataaaagctatatcaaaacctgcttggataacttagccagcaagggcaaagtctccaaaaagcctagggaaatgaaaggaaagaaaagcaaaaagatttctctgaaatatacagcagcaagactacatgaaaaaggagttcttctggaaattgaggacctgcaagtgaatcagtttaaaaatgttatatttgaaatcagtccaacagaagaagttggagacttcgaagtgaaagccaaattcatgggagttcaaatggagacttttatgttacattatcaggacctgctgcagctacagtatgaaggagttgcagtcatgaaattatttgatagagctaaagtaaatgtcaacctcctgatcttccttctcaacaaaaagttctacgggaagtaattgatcgtttgctgccagcccagaaggatgaaggaaagaagcacctcacagctcctttctaggtccttctttcctcattggaagcaaagacctagccaacaacagcacctcaatctgatacactcccgatgccacatttttaactcctctcgctctgatgggacatttgttacccttttttcatagtgaaattgtgtttcaggcttagtctgacctttctggtttcttcattttcttccattacttaggaaagagtggaaactccactaaaatttctctgtgttgttacagtcttagaggttgcagtactatattgtaagctttggtgtttgtttaattagcaatagggatggtaggattcaaatgtgtgtcatttagaagtggaagctattagcaccaatgacataaatacatacaagacacacaactaaaatgtcatgttattaacagttattaggttgtcatttaaaaataaagttcctttatatttctgtcccatcaggaaaactgaaggatatggggaatcattggttatcttccattgtgtttttctttatggacaggagctaatggaagtgacagtcatgttcaaaggaagcatttctagaaaaaaggagataatgtttttaaatttcattatcaaacttgggcaattctgtttgtgtaactccccgactagtggatgggagagtcccattgctaaaattcagctactcagataaattcagaatgggtcaaggcacctgcctgtttttgttggtgcacagagattgacttgattcagagagacaattcactccatccctatggcagaggaatgggttagccctaatgtagaatgtcattgtttttaaaactgttttatatcttaagagtgccttattaaagtatagatgtatgtcttaaaatgtgggtgataggaattttaaagatttatataatgcatcaaaagccttagaataagaaaagctttttttaaattgctttatctgtatatctgaactcttgaaacttatagctaaaacactaggatttatctgcagtgttcagggagataattctgcctttaattgtctaaaacaaaaacaaaaccagccaacctatgttacacgtgagattaaaaccaattttttccccattttttctccttttttctcttgctgcccacattgtgcctttattttatgagccccagttttctgggcttagtttaaaaaaaaaatcaagtctaaacattgcatttagaaagcttttgttcttggataaaaagtcatacactttaaaaaaaaaaaaaactttttccaggaaaatatattgaaatcatgctgctgagcctctattttctttctttgatgttttgattcagtattcttttatcataaatttttagcatttaaaaattcactgatgtacattaagccaataaactgctttaatgaataacaaactatgtagtgtgtccctattataaatgcattggagaagtatttttatgagactctttactcaggtgcatggttacagcccacagggaggcatggagtgccatggaaggattcgccactacccagaccttgttttttgttgtattttggaagacaggttttttaaagaaacattttcctcagattaaaagatgatgctattacaactagcattgcctcaaaaactgggaccaaccaaagtgtgtcaaccctgtttccttaaaagaggctatgaatcccaaaggccacatccaagacaggcaataatgagcagagtttacagctcctttaataaaatgtgtcagtaattttaaggtttatagttccctcaacacaattgctaatgcagaatagtgtaaaatgcgcttcaagaatgttgatgatgatgatatagaattgtggctttagtagcacagaggatgccccaacaaactcatggcgttgaaaccacacagttctcattactgttatttattagctgtagcattctctgtctcctctctctcctcctttgaccttctcctcgaccagccatcatgacatttaccatgaatttacttcctcccaagagtttggactgcccgtcagattgttgctgcacatagttgcctttgtatctctgtatgaaataaaaggtcatttgttcatgttaaaaaaaaa

SEQ ID NO: 2177 - DNA, 8245 bp, Homo Sapiens
  NM_003874
ggaggaagaaaactcaagtgaaactgactctgctagaacagtgccgtgcttttccacagaaggttagaccctgaaagagatggctcagcaccacctatggatcttgctcctttgcctgcaaacctggccggaagcagctggaaaagactcagaaatcttcacagtgaatgggattctgggagagtcagtcactttccctgtaaatatccaagaaccacggcaagttaaaatcattgcttggacttctaaaacatctgttgcttatgtaacaccaggagactcagaaacagcacccgtagttactgtgacccacagaaattattatgaacggatacatgccttaggtccgaactacaatctggtcattagcgatctgaggatggaagacgcaggagactacaaagcagacataaatacacaggctgatccctacaccaccaccaagcgctacaacctgcaaatctatcgtcggcttgggaaaccaaaaattacacagagtttaatggcatctgtgaacagcacctgtaatgtcacactgacatgctctgtagagaaagaagaaaagaatgtgacatacaattggagtcccctgggagaagagggtaatgtccttcaaatcttccagactcctgaggaccaagagctgacttacacgtgtacagcccagaaccctgtcagcaacaattctgactccatctctgcccggcagctctgtgcagacatcgcaatgggcttccgtactcaccacaccgggttgctgagcgtgctggctatgttctttctgcttgttctcattctgtcttcagtgtttttgttccgtttgttcaagagaagacaagatgctgcctcaaagaaaaccatatacacatatatcatggcttcaaggaacacccagccagcagagtccagaatctatgatgaaatcctgcagtccaaggtgcttccctccaaggaagagccagtgaacacagtttattccgaagtgcagtttgctgataagatggggaaagccagcacacaggacagtaaacctcctgggacttcaagctatgaaattgtgatctaggctgctgggctgaattctccctctggaaactgagttacaaccaccaatactggcaggttccctggatccagatcttctctgcccaactcttactgggagattgcaaactgccacatctcagcctgtaagcaaagcaggaaaccttctgctgggcatagcttgtgcctaaatggacaaatggatgcatacccttcctgaaatgactcccttctgaatgaatgacaaagcaggttacctagtatagttttcccaaacttcttcccatcatagcacatgtagaaaataatatttttatggcacactgggataaacaagcaagattgctcacttctggaagctgcatatgactagaggcctcttgtgactggaggtaacaaccctgcccagtaactgtgggagaaggggatcaatattttgcacacctgtaataggccatggcacaccagccaagatgctctgctcacagtcagtatgtgtgaagatccctggtgcgtggccttcaccacgcatcttgagcaaattaggaaaatgtacccttcgcttgaggcagatgcagcccttcccccgagtgcatggcttggagagcagaatgtgggctgcatataagcacactcatccctttgtctgggaatctttgtgcagggcataacaggcttagtaagtccaaacacagatgacagtgctgtgtgggtctctgtcagagttgtggctctcagccatgtagacacactctccaaatggagtgttggaaaatgttctttctgcagggtctagagactgctgggacacttttcttggagtgctacttcagaagccttataggattttctttctggccaagatttccttctgtatcactccaagcagcctcagcagaagaagcagccatgcccagtattcccactctccaaaaggaactgaccagcttatatttctcacacttctggggaactgggtataatccaaccatcaaaatagaagaccttgcaagaagcagagtcattctccagaaggaacttgggagatgatggtgcagatgatgaaactgggttcatcccagttccaaagactcagagaactagagtttaagctgaggcagagtgccgccaccctggcatgccccacaaacagatcaccagccagcttacacaggcattaactctcctcaatgaggaagaatcattcacaactgagcaagacattcatatgatcatttaaggaagtgtttcccttatgtgttagcaagtataatcggctaactcctaaatcccaatgaatagtcctaggctggacagcaatgggctgcaattaggcagataaagacatcagtcccagtaaatgaatccatagactcatctagcaccaactaccattagcactatgttaggagctgcaaggccccaaagtagaagatgtgcataatgtctgctcttgtgtagctcaggagacaattccagcacagacactacagttaacgctgaactgcagctgcaagtaatagcatgaacagtcagaaaaataccttatgagggggcagggctgaagctgggccttgaaggatggatgaaatttggatagagaatgaggaagacagagggcctccaagtgagagaagcatgaaaaatgagcaggggcctggatcagtggggtgtattcagagcacctctccagatgcaccatgcatgctcacagtcccttgcctatgtgtggcagagtgtcccagccagatgtgtgccctcaccccatgtccatttacatgtccttcaatgcccacctcaaaaggtacctcttctgtaaagctttccctggtatcaggaatcaaaattaatcagggatcttttcacactgctgttttttcctctttggtccttctatcactaaaactcatctcattcagccttacagcataactaattatttgttttcctcactacattgtacatgtgggaattacagataaacggaagccggctggggtggtggctcacgcctgtaatcccaacactttgggaggccaaggcaggcggatcacctgaggtcaggagttcgagattagtctggccaacatggtgaaaccccatctctactaaaaatacgaaattagccaggtgtggtggcacacatctgtagtcccagctactctggaggctgagacaggagaatcgcttgaacccaggaagtggaggttgcagtgagctgagatcacaccactgcactccagcctgggagagacagagtgagactccatctcgaaaaaaaaaaaaagatagaagccaataagcatggtgcaatcaaattctggcaagcattaaatatcaggatgcagctgggcacggtggctcacgcctgtaatcccagcactttgggaggccaaggtgggcggatcacttgaggtcaggaatttgagaggatcctggccagcatggcaaaaccccatctgtacttaaaatacaaaaaaattagctgggcgtggtggtgcacacctgtaatcccagctacttgggaggctgaggtgggagaattgcttgaacctgggaggtggaggttgcagtgagctgagatcctgccactgcactccaggctgggcaacagagtgagaccatgtctcaaaaaataaaaataaaataaaataatatcaggatgcatacatcagaggctgttcctagtgtaaaggcactttggagggagaagactttcagagttaggcagaccaactaagaggtcagctgaagcacctaaccagttgtaaggaggtgaaagacagcaccccaagaagagacgtgcaggaaggaggaaagaggcttggtcataaaggatggaggaattccaaagtgacactgaacaggctgcgtttatcctaaaataaaaccactcctcactctgtggatgcgttgaagactcattcccaaacatctttattctctaacttgccctcttcctcttcctaatatgctcactcaagtaaaattactagtgtcctaatgcccctatgcatattgtcaaaaataaaaatcagaagcaggttagatctgttaggtcttccagaagagcaaacctgggatgaagccagagcccaggaattctgaaggtagcctttggactcaggacaccctactcttgtctctcctctcagtttctctgctatgaatctcctgattcatgaacacgttatctgttcacccttctctctaggtcttagttcttagattttccttctgtaaaatgcatgtgatcttattttcccctccacaactttccagatgaactagactgtgaccaagaggtctataaaatcaaagcatcatggaacaggatcttgtatcagaccaaagtgtgccagtttttaaaaatgtgcatcaaaatggaagtctcagagacagagccctctggtggaaagttctagtaggttaggacagtcctgcctgcagacaccttgggctttactgagggactcaactgagaaaatgaggaatgttgcagctcatgattcttagaagaagaaagtgaagcttgtttaaaatatgatttaaaaaatctgtagaacactgtaaactacacaggctatgagggaatagcctggttgggccagcttggaaatcgggcacaggcaggaaggggcctgtctggtttgggccgtgtccacagagagcacttcttaggtcctgcctggagagaaggaatggctgggctatattttcttccagactcattatttttcttctgtttgacttttctctgaatttcccttgatttgtataaattttctcaataattagtgacagtgtctactgattgtaaaatgaagcttgaaggccaggcgcagtggctcatgcctgtaatcctagaattttgggaggccaaggtgggtggatcacaaggagttcgagaccagcctggccaaggttgtgaaaccgcgtctctactaaaaatacaaaaaaattagccgggcatggtggcacgtgcctgtagtcccagctactcaggaagctgaggcaacagaatcacttgaacctgggaggtggaggttgcagtgagccgagatcacgccactgcactccagcctgggcgagagagtgagactccgtctcaaaaaaaaaaaaaaaaaaaaaagtttgaagaacaaagacaataagaggaaatataatgagtggtcataaatgtgggctctgacagtagagtgcctgggtctgcatcctggtttcttagtcatgtgaccttaggcaagttactttaacctcgctgtacctcaggttgtccatctgtaaaatggggataataatagtgcctaccttttaaggttgatgtggggattaaatgaggtgttgctcatacaggaatgtgcctgtgcatggcaaagttcgggaaattttttataagctgttctaggcctgaaatcttcagaagatgctaatctaaattcatgaaataagcttcttacaacagaaatgctgctagtattatgcaaaattaatgttgtatatcaaacttttaactctcatccctccttattcagatatattttgttataagcaatgtttgttcccctcgttattataccacagtctacttacctgatgctatatctgcctccccagttagactgagagaacaggggatatacctaaataataataataataataataataataaataataatggagagctccttgaagatagggagcctgtaagaatcattgagggcttattttgtataccaactgctaaactagatgcttcatacattgttgtcaatactcatgacagccttgtaaagtagaaattaattcttccagttaacactaaggctgacatatgaataccttggcaaatctggaaagctgggaagacagtatttgaattcaagacttcttgtcaccaagggccatgcacttgtactctgccatgtggcccttttttacctcctgtggattctccctacctggtacttggccttaggtgtacacacacctggcactttgcttgacacataataggtggaccacaaatatctactaaatgaatatttgcatatagtaatattttaaggtactaaaagcagctcaaagtaaatatattaatatattaattccattgctatctggataaccactcaactttcctgctgaaaatgcccatttaattaaagaaggttggatagagctctctatatgcattttggacaggcaggggtttcaggtcataaacattctgatgagttaatataaaataagagaaactgtaaatttccactactaaaaatcacaaaaataacagaaacaaaagaagagataagaatttggggaattgtgctgaacaatttagtggttaaaaaaaacaactgtgcatgtttagacttaaataagcccccatccaagtgtgaggggtccagtaatttttcaaaacatatgaaagtgttaatacatttcgacaaaggaccattaaaaaagtcctgaattctgacttgagggaggaaagtaatgactaatacattctctagagacttgcagactttgggaattcataaaggaatggatgataattattaactgttgctggctgattgcccagacagttctcaacagccctgtacaagtctctgggtttgggatggatcaattctgagactggaaaatggccaaatctttgcaaatgagaaatatttttcttataagttcttattgtaggcaaataattacatagattattcatcagagaatttttaaatgctcataatctcaactctttcatttacaacttgtatttccaatagtttatgggtcatctctgcatagatgtcagaagtcacctcaagtttagcgtgtccaaaatctaactcacaggtctgtttctgacctcccaacttgctttccttgtgtttttcctatgctaatgatccaccataatcaaaataattaacatttatccagtgcctactatgtactattccctgtcctgttttacatttactcatttaaagtccataagaaacattaaatctcatctgccttctgaagaagatacaaccatgctctcttttacaaagtaggaaactgggtcacagaaaggtgaagtctttaaggctgaatcacagtagctcatcctagtaaatagaaaagccaggattcaactccaggggctgggtgcagaactgctattcttcactgcttcaccaatcagcagctacccaaggcagaaaactttttcatccttggctccttcattctccctgtcaccccagatcccctctacatctagtcagagaataggtcctgtcaattccaacttctctatatggctcctctcaggcatgtgcccttaattggcctaattctctaatacaccttccctctacatgctcactccctcagatcattgctttatcacgtgttacctgggttgctattacataaagagcaatctttctaaaatgaggatcttatcacttcacttccacactaaaatgtttttcctggggaaccacactccttagcaatctgacccatcagaccttccaggctgtctcctgcctgctccctaaggctccagccacacagaattatcatgggcccacacacccaccaaatcctcccatgcctttgcccatgttgtctgggatgcccttctctcccttctgtctacatcaagcatcagactgaatatccctcttgtgcggccttctaaaacctcccgtccaaagcgaaatatattgccctctatttatacttttacagcatttggcacacaagtacagagtagtagctttttatcacattctctgataattatatagatatggtatttcttagctctctctccaactggctaataagttgctttttgtctgagtgcctaattttgtgttttgtgtctgagtgcctcagttcctcaaaaaaaggttttttgattagttcattattcatttgaacatggaaattatgctcactagtggcaaatgccactaaccgtattccagaagctaggtgtcatgtttgcaataagatatattatcccttctacaagtcaccttttatttcaggcatttgtaaatgcccattaataaagtatggttcataaattttaccttgtaagtgcctaagaaatgagactacaagctccatttcagcaggacacaataaatattattttataatgcatctaaaaaaaaaaaaaaaaaa

SEQ ID NO: 2178 - DNA, 1396 bp, Homo Sapiens
  NM_003876
agacagcgcggcggcccccagcgggagaggcagcctggcggccaggacagcgcggccgggcgcctccgcgcagtgctctgggagttgtaggcacttgcctctcctctctccttcagctactggctctcgaaactcaaggacctaccggtgggtgggcgcctgtgactcccaggctgcgaacgccgggaactcagtttcttcagaaatgctcgaaccaggacggctcctggagtcctcgcgccctcgcagaaggactacgggccccggcgaccccgggggcggggcttccggcgcgctgccttgtgggcacggtagttccgccgggtctggcttccgcctgccgagcggccccggaccgcaggccggactacacttcccgtcggcccgcctgctctcccgatgccgccttggcgcgagacgttggcaagcagagtgtctccaagatggccgcttggggaaggaggcgtcttggcccgggcagcagtggcggcagcgcccgagagagggtgagcttgtcggccacagactgctacattgtgcatgagatctacaatggggagaatgcccaagaccagtttgagtacgagctggagcaggccctggaagcccagtacaagtacattgtgattgagcccactcgcattggcgacgagacagcccgctggatcaccgtgggcaactgcctgcacaagacggccgtgctggcgggcaccgcctgcctcttcaccccgttggcgctgcccttagattattcccactacatttccctgcccgctggtgtgctgagcctggcctgctgcaccctctatgggatctcctggcagtttgacccttgctgcaagtaccaagtggagtacgacgcctataaactgtcgcgcctgcctctgcacacactcacctcctccaccccggtggtgctggtccggaaggacgacctgcacagaaagagactgcacaacacgatagcactggccgccctggtgtactgtgtaaagaagatttacgaactctatgccgtatgatttcagtagaacagggagcgaagcaaaaccacccggcccacaagagacaacagagtattcagatcgccacactctgtgaggcagcagagcctgggcaggtgtttggcttagtatttgttatttttaaaaaataacagatcacgggtgtacccagggtttttcagctcattacactaagatgtggatttccataacccaagaggggggtctgaggctgtggaagtccgactgggcagtggaatgctgatggaggcagacgctgccgagggggtgtggacgtgctttgggggaggtctttaagtctattgtttaactgtaccatccagagcccaccagaagctattgatcattaaaattatgagaatttcaactcc

SEQ ID NO: 2179 - DNA, 2210 bp, Homo Sapiens
  NM_003877
agccgcggcctcaactaaaagtggccattgacctttcaagctttcgagcagtgatgcaatagaatagtatttcaaagaaaaatgcttatcgaaattttggatccggttttcccgtgattgttaagggtttcttttaaaaagtaggtcacatttcaagtaggtcatatttcgggggcgggtgcgcagacaaggagatgagtttccactaaggccagggggcctccaacggggttggaggtgagaatcccaggtagggtagaggtgccgagatccttccgaatcccagccctggggcgtcagccctgcagggaatggcagagacactctccggactgagggaaccgaggccagtcaccaagccccttccgggcgcgcaggcgatcagtgggtgaccgcggctgcgagggactttgtcatccgtcctccaggatctggggagaaagagccccatcccttctctctctgccaccatttcggacaccccgcagggactcgttttgggattcgcactgacttcaaggaaggacgcgaacccttctctgaccccagctcgggcggccacctgtctttgccgcggtgacccttctctcatgaccctgcggtgccttgagccctccgggaatggcggggaagggacgcggagccagtgggggaccgcggggtcggcggaggagccatccccgcaggcggcgcgtctggcgaaggccctgcgggagctcggtcagacaggatggtactggggaagtatgactgttaatgaagccaaagagaaattaaaagaggcaccagaaggaactttcttgattagagatagctcgcattcagactacctactaacaatatctgttaaaacatcagctggaccaactaatcttcgaatcgaataccaagacggaaaattcagattggactctatcatatgtgtcaaatccaagcttaaacaatttgacagtgtggttcatctgatcgactactatgttcagatgtgcaaggataagcggacaggtccagaagccccccggaacggcactgttcacctttatctgaccaaaccgctctacacgtcagcaccatctctgcagcatctctgtaggctcaccattaacaaatgtaccggtgccatctggggactgcctttaccaacaagactaaaagattacttggaagaatataaattccaggtataaatgtttctctttttttaaacatgtctcacatagagtatctccgaatgcagctatgtaaaagagaaccaaaacttgagtgctctggataactatatggaatgctttctaagaacagctgaagctaatctaatttaaatttaacagcttgaagaggtagctaggtgtttaaagttcctccagatacttttacctgagtgatgcttcccttcctaaggctgaccaagacctgttgatccttttagattaaaaataaaatgtcgcatgtaaaggctgaagtcgcgttttatcagaatgccttgccttcttaggttcttttccattatgtcaaaggtccaggctccagtaggagagaaagaactcctcataggaatactgaagaagtgggaaggaaccaagctgacacaggcctcactgcaatttgatatgcctgctgatcagagtctcttgggcattttatattttgcattctgatgtacctaggagttttgttaaacagatgatgtatgtgagtatttatcccattttatgcaattaaccaaatcaaccaaaaaaagtgaccatgaagtcctgtatttgtctttttactacatgtaggaactctcatgtgaatgagtactgtagtaatccattctatgggagccttatttcagaaatatttcaaactggtgcaaatggaaaagactttctcttttcctttaaagctaaagacaagaatatcatgctatacaggtgcaactcaatccccgttaataaaaaccaatgtaggtataggcattctaccctttgaaatagctgtgtcccaacctgttgccattgattttttggaaatggctttagaaatatccaagttgtccttgaattgtctaaccatggacataaacagttgtctcccttctactgtgtagaatactttgacttaattttcttccagatacagggggatacctgcctgtttttcaaagtgtttatttactgctgttactatttgattagaatgtattaaataaaaaaaacctgatttct

SEQ ID NO: 2180 - DNA, 1505 bp, Homo Sapiens
  NM_003878
cagagtctccgcttaggcggcccgtgggggtcggggtcgcggtcgcggtcgcggaccggggacagagcaatggggcgggcgcgcagcgccggctgcactcccagagcctcccaccgccgccccacggccgcctagcgcgcgccgggactgcatttcccataggcccacgctgcggagcaccgcccacccgagtctcacgcgagtgcgctgccgcgaggtgtccctgccgcagcccccgcccgcccgcagagcttttgaaaggcggcgggaggcggcgagcgccatggccagtccgggctgcctgctgtgcgtgctgggcctgctactctgcggggcggcgagcctcgagctgtctagaccccacggcgacaccgccaagaagcccatcatcggaatattaatgcaaaaatgccgtaataaagtcatgaaaaactatggaagatactatattgctgcgtcctatgtaaagtacttggagtctgcaggtgcgagagttgtaccagtaaggctggatcttacagagaaagactatgaaatacttttcaaatctattaatggaatccttttccctggaggaagtgttgacctcagacgctcagattatgctaaagtggccaaaatattttataacttgtccatacagagttttgatgatggagactattttcctgtgtggggcacatgccttggatttgaagagctttcactgctgattagtggagagtgcttattaactgccacagatactgttgacgtggcaatgccgctgaacttcactggaggtcaattgcacagcagaatgttccagaattttcctactgagttgttgctgtcattagcagtagaacctctgactgccaatttccataagtggagcctctccgtgaagaattttacaatgaatgaaaagttaaagaagtttttcaatgtcttaactacaaatacagatggcaagattgagtttatttcaacaatggaaggatataagtatccagtatatggtgtccagtggcatccagagaaagcaccttatgagtggaagaatttggatggcatttcccatgcacctaatgctgtgaaaaccgcattttatttagcagagttttttgttaatgaagctcggaaaaacaaccatcattttaaatctgaatctgaagaggagaaagcattgatttatcagttcagtccaatttatactggaaatatttcttcatttcagcaatgttacatatttgattgaaagtcttcaatttgttaacagagcaaatttgaataattccatgattaaactgttagaataacttgctactcatggcaagattaggaagtcacagattcttttctataatgtgcctggctctgattcttcattctgtatgtgactatttatataacattagataattaaatagtgagacataaatagagtgtttttcatggaaaagccttcttatatctgaagattgaaaaaaataaatttactgaaatacaaaaaaaaaaaaaaa

SEQ ID NO: 2181 - DNA, 10640 bp, Homo Sapiens
  NM_003879
atactcagtcacacaagccatagcaggaaacagcgagcttgcagcctcaccgacgagtctcaactaaaagggactcccggagctaggggtggggactcggcctcacacagtgagtgccggctattggacttttgtccagtgacagctgagacaacaaggaccacgggaggaggtgtaggagagaagcgccgcgaacagcgatcgcccagcaccaagtccgcttccaggctttcggtttctttgcctccatcttgggtgcgccttcccggcgtctaggggagcgaaggctgaggtggcagcggcaggagagtccggccgcgacaggacgaactcccccactggaaaggattctgaaagaaatgaagtcagccctcagaaatgaagttgactgcctgctggctttctgttgactggcccggagctgtactgcaagacccttgtgagcttccctagtctaagagtaggatgtctgctgaagtcatccatcaggttgaagaagcacttgatacagatgagaaggagatgctgctctttttgtgccgggatgttgctatagatgtggttccacctaatgtcagggaccttctggatattttacgggaaagaggtaagctgtctgtcggggacttggctgaactgctctacagagtgaggcgatttgacctgctcaaacgtatcttgaagatggacagaaaagctgtggagacccacctgctcaggaaccctcaccttgtttcggactatagagtgctgatggcagagattggtgaggatttggataaatctgatgtgtcctcattaattttcctcatgaaggattacatgggccgaggcaagataagcaaggagaagagtttcttggaccttgtggttgagttggagaaactaaatctggttgccccagatcaactggatttattagaaaaatgcctaaagaacatccacagaatagacctgaagacaaaaatccagaagtacaagcagtctgttcaaggagcagggacaagttacaggaatgttctccaagcagcaatccaaaagagtctcaaggatccttcaaataacttcaggctccataatgggagaagtaaagaacaaagacttaaggaacagcttggcgctcaacaagaaccagtgaagaaatccattcaggaatcagaagcttttttgcctcagagcatacctgaagagagatacaagatgaagagcaagcccctaggaatctgcctgataatcgattgcattggcaatgagacagagcttcttcgagacaccttcacttccctgggctatgaagtccagaaattcttgcatctcagtatgcatggtatatcccagattcttggccaatttgcctgtatgcccgagcaccgagactacgacagctttgtgtgtgtcctggtgagccgaggaggctcccagagtgtgtatggtgtggatcagactcactcagggctccccctgcatcacatcaggaggatgttcatgggagattcatgcccttatctagcagggaagccaaagatgttttttattcagaactatgtggtgtcagagggccagctggaggacagcagcctcttggaggtggatgggccagcgatgaagaatgtggaattcaaggctcagaagcgagggctgtgcacagttcaccgagaagctgacttcttctggagcctgtgtactgcggacatgtccctgctggagcagtctcacagctcaccatccctgtacctgcagtgcctctcccagaaactgagacaagaaagaaaacgcccactcctggatcttcacattgaactcaatggctacatgtatgattggaacagcagagtttctgccaaggagaaatattatgtctggctgcagcacactctgagaaagaaacttatcctctcctacacataagaaaccaaaaggctgggcgtagtggctcacacctgtaatcccagcactttgggaggccaaggagggcagatcacttcaggtcaggagttcgagaccagcctggccaacatggtaaacgctgtccctagtaaaaatacaaaaattagctgggtgtgggtgtgggtacctgtattcccagttacttgggaggctgaggtgggaggatcttttgaacccaggagttcagggtcatagcatgctgtgattgtgcctacgaatagccactgcataccaacctgggcaatatagcaagatcccatctctttaaaaaaaaaaaaaaaggacaggaactatcttactcaatgtattagtcatgtttctctagagggacagaactaataggatacatgtatataaaaaggggagtttattaaggagtattgactcacatgatcacagggttaggtcccacaataggtcatctgcaagcaaggaagccaattcaagtcccaaagctgaagaacttggagtccaatgtttgagggcaggaagcattcagcatgagagaaagatggaggccagaagactacaccagtctagtctttccatgttttgcctgcttttattctggcagtgctggcagctgattagatggtgcccacccagattgaggatggtctgcctttcccagtccactgactcaaatgttaaatctcctttggcagcaccctcacagatgtacccgggaacactttgcatccttctattcaatcaagttgatactcagtattaaccatcacagtccatttgggcaactataccaaattaccatagaccaggtgacttaaacagcagttatttctcacagttccggaggctgggaaatccaacatctaagtggtagcatatctggtgtctggtaaggcatgcttccagatcttaccagatgtcagtcttttgatgttctcacatggcagaaaaagaggatgcaaactctcaagtatatctttaagggcacaaattccattcatgagggctctaccctcatcacctaattacctcccaaaggccccaccttctgatactgtcactttggggatactgtctcccctttgaattctggggggaatacaaacattcagtttgtaacaatagccttatgatttagaggttacttgttcattcacctagacctcaaattgcattttacagctagtcaagtatatctttctctgatttgatagtgtgacctaaaaggggaccattgtttgaaatatcattagagttgcttattattattattattattattattattattattattattattattgagacagagtttcattctgctgcccaggctggagtgcagtggcatcatcttggctcattgcaacctctgccttctgggttcaagcgattctcctgcctcagcctcccgagtagctgggattacaggctcctgccaccacacccggctaatttttgtatttttagtggagacagggtttccaccatgttggccagcgtggtcttgaactcctgacctcaggtgattcaccagcctcggcctcccaaagtgctgggattacaggtgtgagccactgcacctggcctattattatttttaaattttttttttttaattgatcattcttgggtgtttctcacagagggtgatttggcagggtcacaggacaatagtggagggaaggtcagcagataaacaagtgaacaaaggtctctggttttcctaggcagaggaccctgcggccttccgcagtgtttgtgtccctgggtacttgagattagggagtggtgatgactcttaaggagcatgctgccttcaagcatctgtttaacaaagcacatcttgcactgcccttaatccatttaaccctgagtggacacagcacatgtttcagagagcacagggttgggggtaaggtcatagatcaacagcatcctaaggcagaagaatttttcttagtacagaacaaaatgaagtctcccatgtctacttctttctacacagacacagcaacaatctgatttctctatcttttccccacctttcccccttttctattccacaaaaccgccatcgtcatcatggcctgttctcaatgagctgttgggtacacctcccagacggggtggcggctgggcagaggggctcctcacttcccagatggggcggccaggcggacgcgccccccacctccctcccggacgggatagctggccgggcgggggctgaccccccacctccctccccgacggggcggctggccgggcgggggctgacccccacgcctccctcccggacggggcggctgccaggcggaggggctcctcacttctcagacggggtggctgctgggcggagacgctcctcacttcccagacagggtggctgtcgggcggaggggctcctcacttctcagacggggcagctgcgggcggaggggctcctcacttctcagacggggtggccgggcagagaagctcctcacatcccagacgggggggcggggcagaggcgctccccacatctcagacgatgggcggccgggcagagacgctcctcacttcatcccagacggggtggcggccgggcagaagctgtaatctcggcaccctggggggccaaggcaggcggctgggaggcggaggccgtagccagctgagatcacaccactgcactccagcctgggcaacattgagcactgagtggacgagactctgcccgcaatcccggcacctcgggaggccgaggctggcagatcactcgcagtcaggagctggagaccagcccggccaacacagtgaaaccctgtctccaccaaaaaaatacgaaaaccagtcaggcgtggcggcgcccgcaatggcaggcacgcggcaggccgaggcgggagaatcaggcagggaggctgcagtgagccgagatggcagcagtacagtccagcttcggctcggcatcagagggagaccgtggggagagggagaagagagggagggggagagggctatttttaaaattttttaaaattgctgaacaggggtacctctgggcagtgtgtcagaataccactttttaaatattttatgatttatttatttttctatttcttgaggttttaactgatgtgtatctgtatgtctatttgtgtatattttgtcatgatcatgtaacagagtctgaaaagtgtcgaagagacagttttcaggaacaacaagcaattattcctactttccaagttattttgatgccatggtggctcatacctataatctgagtactttgggaggctgaggtggactgatcacttgagcccaggagtttgagaccagcctgggcaacatagcaagactccatctctacaaaaaaagacaaaatttagctgagcgtggtggcgtgttcctgtagtcccagctacttgggaggctgaagtgagtggatcccctgagcccagagaggtcaaggttgtgatgagctgtgatcacaccactgcacttcagcatgggagacagagtgagaccctgtttcagaaaaaataaataaataaaaccaccagcaccacaaacaacaacaaaaagttattttgtacttgttttgagcacaggactcctgagggtatctttgcatttaatattacataggggtgccagtgggaagtaatgtgtatgcttggcctcatgagctaaaaccctgtgttaattatgacagaaggaaagtgtgtgagagagatcttaactacctagcagctctagctgccatcttgaaccatgaagatacgggccacacgtaggggtagctgggtagtgagcagcaagaagccttgttggatgagggcacgaaggagcagaatcactggaatcactgtgtcagccctaattacctacctctggacttttatgtgaggggaaaaaaaattgacagtttatatttatctcaacctagttaacccaagtgatgcattgttatgagattaaaatgtttggaggccgggtgcggtggctcacgcctataatcccagccctttgggaggccaaggcgggcggatcacgaggtcaggagatcaagaccatcctggctaacatgtaaaaccccgtctctactaaaaatacaaaaaattagccaggcgttgtggcggtcgcctgtagtccctgctatttgggaggccgaggcaagagaacggcatgaacctgggaggtggagcttgcagcgagctgagatcttgccactgcactccagcctgggcgacagtgcgagactctgtctcaaaaataaataaataaataaataataaataaaatgtttggaatgttggcttcatccctgggatgcaaggctggttcaacatacgcaaatcaagaaacataattcatcacataaacagaactaaagacaaaaaccacatgattatctcaatagatacagaaaaggccttcaataaaattcaacgttgcttcatgttaaaaactctcaataaactaggtattgatggaaaatatctcaaaataataaccatttatgacaaacccacagccattatcatactgaatgggcaaaagctggaagcattccccttgaaaactggcacaagacagggatgccgtctcaccactcctatttaacatagtattggaagttctggccaagaaaatcaggcaagagaaacaaataaggggtattcaaataggaaaagaggaagtaaaactgtgtttgcagatgacatgatactatatctagaaaaccccattatctccacccaaaagttccttaagctgataagcaacttcagcaaagtctcaggatacaaaatcaatgtgcagaaatcacaagcattctatacaccaacaatacacaagcagagagccaaatcatgaatgaactcccattcacagttgctagaaagagaataaaatacctaggaatacagctaataagatgtgaaggatctcttcaaggagaactacaaaccactgctcaaggaaataagagaggacacaaatgaaaaaacattccattctcgtggataggaagaatcaatatcatgaaaatggccatactacccaaagtaatttataggttcattgctattcccattaaactactattgacattcttcacagaattagaaaaaaactactttaaaattcaaatggaaccaaaaaagagcccgtataaccaagacaacaataagcaaaaagaacaaagctggaagcatcacactacccaacttcaaagtatactgcaaggctacagtagccaaaatggcatggtactggtacaaaaacagacacatagaccaatggaacagaatagagaccagagaaagaagaccacacatctacagccatctgatcatcgacaaacctgacaaaaacaagcaatggggaaaagattccctatttaataaatggtgctgggaaaactggctagccatatgcagaaaattgaaactgaccccttccttacaccttatacaaaaattaactcaagattaaagacttaatgtaaaacctaaaactataaaaaccctagaagaaaatctatttaataccattcaagacataggcacaagcaaaggtttcatgacaaaaacatcaaaagcaattgcaacaaaagcaaaaattacaaatgggatctaattaaactaaagagctcctgcacagcaaaagaaactatcattagagtgaacaggcaacctacagaatgggagaacatttttgcaatctatccatctgacaaaggtctaatatccagaacctacaaggaacttaaaacaaatttacaaggaaaaaaacaaccccatcaaaaagtggacaaaggacatgaacagacacttctcaaaagaagacatttatgtggccaacaaacatataaaaaaaagctcaaccttactgatcattagagaaatgcaaaggagaaccacaatgagataccatctcatgccggtcagaatggtgattattaaaaagtcaaaaaacaacagatgctggcgaggctgtggagaagtaggaacacttttacattgttggtgggaatgtaaattagttcaaccgttgtggaagtgtgtgtggctattcctcaaagatctagaactagaaatactatttgtcccagcaatcccattactgggtatatacccaaaggaatataaaccattttattataaagatacatgcacatttttgttcattgcagcactcttcacaatagcaaagacacaatagcaaatgcccatcaaagatagactggataaagaaaatgtggtacatatacaccatggaatactgtgcagtgcagccattacagcttttggtgatacagtgaatcagatttttcattaattcttttaattggttattactgaacgtgaaaaagtaatgtttgtattgaaatcttgagtctggccatgtttctattttaaattcataaagaattctaacaagaggaattccaagaatgtcataaatggatgtttctccatggatgaaggaactgttttattcacttgctgataattcagcctaatccagtttgacatcatatagataagtagttgaattatggatttaaaatacatatcattttctaactccaaaggtaatacttatttaaatggttttgaaaatatagaaaggcacaatttctttttaaatctgttattctccaccaccactcaatctgtctatcatctatctctccattcattcttccatttgtttatatctgttaatctttgtatgtgttcatgtatagcttttacatgattggaatcataatgcatattccattttgaagtctgcttttttttacacaaaaatatgttgtgaatattttcctatattatgaaatatcattagctgagcttttagaattgactgcatgttttggtaccatttagatatagtttaagatacttagaagttatgtggctttgccactatggatgaatcttatttactcaatattaattacttacaaataacctcacctaaacactactcagccataaaaaggaatgaattaatgacattcacagcaacctggagactattactctaaaggaagtaactgaggaatggaaaaccaaacattgtatgttctcactcataagtgggagataagctatgaggatgcaaaggcataagaaggatacaatggactttggggacttaggggaaagggtgggaggggggtgaaggataaaagaatacaaattgggttcagtgtatactgctcaggtgatgggtgcaccagaatctcacaagtaaccacttaattacttacgcatgtaaccagataccacctgttccccaaacacctatggaaataattttgtttttttttttaaaaaaggaatgagatcatgtcctttgcagggacatggatgaagctggaagccattatcctcagcaaactaacagaggagcaggaaaccaaacaccacatgttctcacttgtaagcggaagctgaacaatgagaacacacggacacagggatgagatcaacacacactggggcctgatgcaggggccgtagcggggagagcatcaggataactagctaatgcatgtggggcttaatacctaggtgataggttgataggtgcagcaaaccaccatgggacacgtttacctatgtaacaaacccgcacatcctgcacttgtatccagaacttaaaatattttaaaaatctttagagaatacaaaaaaaaaaaaaaagattcttcaatgcatacacaataaaattgcagttcagtcaaacattggaagtctttctctgactgtctagttggtatcttcattttcagcttcttcaagatcccactccaaacactgttagctcagccaaattgaacagctcatatctcctacctctggatctttggttctggtgattgtatatttctggaccatctggaaccccagcatatcaccctaccccacatctccacatccccaaaatataaccatacttcaagggcagttcaaataccatctccttctatcctccatgaagtcagttatctcttccattggaattatcgccccctctcctgaacagtactatttcgtgtgaatctcctccaagccttcttttcattttatatctcatgctgtaattcttggaaagtatgctgtagctcaagtgcagaattctcatcagttttatctttatatctctcctaaacactttacctgatgaagagcctggcatacacataaatatatattgaatgaatcagtgatggattgaaaagagaaatgatggatctcctaaattttaacttttataaaatattttgatacattcatgaccttactttagcaagcaatgaacgtgatgtaaactattgttgatatagtttttatattggaagtgtaagtagtttgtggcatgggattgtgacatatcctaggtttcctcatcttctttttattgaaatgtaattcacaagccataaaatttgcccctttaaagtaaatgatgcagtggattttagtatatttacagagttgtgcaatcatcaccactatctaattccagaacatttccatctacctagaaactccataccagtgagctgccactctaatcctcctcttcccccagcctctagaaacaataatccattttctgtctctatgatttgcctgttctagatattttataaaaataaacatgtggcctttcgtgtctgacttccttcacttaaaaaaaaaaaaaaaaaa

SEQ ID NO: 2182 - DNA, 1965 bp, Homo Sapiens
  NM_003883
gggaggggctggcggcggccgcgggcggcgggcggcggaggtgcggggcctgctcccgccggcaccatggccaagaccgtggcctatttctacgaccccgacgtgggcaacttccactacggagctggacaccctatgaagccccatcgcctggcattgacccatagcctggtcctgcattacggtctctataagaagatgatcgtcttcaagccataccaggcctcccaacatgacatgtgccgcttccactccgaggactacattgacttcctgcagagagtcagccccaccaatatgcaaggcttcaccaagagtcttaatgccttcaacgtaggcgatgactgcccagtgtttcccgggctctttgagttctgctcgcgttacacaggcgcatctctgcaaggagcaacccagctgaacaacaagatctgtgatattgccattaactgggctggtggtctgcaccatgccaagaagtttgaggcctctggcttctgctatgtcaacgacattgtgattggcatcctggagctgctcaagtaccaccctcgggtgctctacattgacattgacatccaccatggtgacggggttcaagaagctttctacctcactgaccgggtcatgacggtgtccttccacaaatacggaaattacttcttccctggcacaggtgacatgtatgaagtcggggcagagagtggccgctactactgtctgaacgtgcccctgcgggatggcattgatgaccagagttacaagcaccttttccagccggttatcaaccaggtagtggacttctaccaacccacgtgcattgtgctccagtgtggagctgactctctgggctgtgatcgattgggctgctttaacctcagcatccgagggcatggggaatgcgttgaatatgtcaagagcttcaatatccctctactcgtgctgggtggtggtggttatactgtccgaaatgttgcccgctgctggacatatgagacatcgctgctggtagaagaggccattagtgaggagcttccctatagtgaatacttcgagtactttgccccagacttcacacttcatccagatgtcagcacccgcatcgagaatcagaactcacgccagtatctggaccagatccgccagacaatctttgaaaacctgaagatgctgaaccatgcacctagtgtccagattcatgacgtgcctgcagacctcctgacctatgacaggactgatgaggctgatgcagaggagaggggtcctgaggagaactatagcaggccagaggcacccaatgagttctatgatggagaccatgacaatgacaaggaaagcgatgtggagatttaagagtggcttgggatgctgtgtcccaaggaatttcttttcacctcttggttgggctggagggaaaaggagtggctcctagagtcctgggggtcaccccagggcttttgctgactctgggaaagagtctggagaccacatttggttctcgaaccatctacctgcttttcctctctctcccaaggcctgacaatggtacctattagggatgagatacagacaaggatagctatctgggacattattggcagtgggccctggaggccagtccctagccccccttgccccttatttcttccctgcttccctcgaacccagagatttttgagggatgaacgggtagacaaggactgagattgcctctgacttcctcctcccctgggttctgacttcttcctccccttgcttccagggaagatgaagagagagagatttggaaggggctctggctccctaacacctgaatcccagatgatgggaagtatgttttcaagtgtggggaggatatgaaaatgttctgttctcacttttggctttatgtccattttaccactgtttttatccaataaactaagtcggtattttttgtacctttaaaaaaaaaaaaaaaaaaaa

SEQ ID NO: 2183 - DNA, 16407 bp, Homo Sapiens
  NM_003890
ctgcagccatgggtgccctatggagctggtggatactctgggctggagcaaccctcctgtggggattgacccaggaggcttcagtggacctcaagaacactggcagagaggaattcctcacagccttcctgcagaactatcagctggcctacagcaaggcctacccccgcctccttatctccagtctgtcagagagccccgcttcagtctccatcctcagccaggcagacaacacctcaaagaaggtcacagtgaggcccggggagtcggtcatggtcaacatcagtgccaaggctgagatgataggcagcaagatcttccagcatgcggtggtgatccattctgactatgccatctctgtgcaggcactaaatgccaagcctgacacagcggagctgacactgctgcggcccatccaggccctaggcaccgagtattttgtgctcacaccccccggcacctcagccaggaatgtcaaggagtttgccgtggtggccggtgccgcaggtgcctcggtcagtgtcacgctgaaggggtcagtgacattcaatggcaagttctatccagcaggcgatgtcctaagagtgactctacagccctacaatgtggcccagctacagagctcagtggatctctcggggtcaaaggtcacagctagtagccccgtggctgtcctctctggccacagctgtgcgcagaaacatacgacctgcaaccatgtggttgagcagctgctacccacgtctgcctggggcacccactatgtagtacccacgctggcctcccaatctcgctatgatttggccttcgttgtggccagccaggccacaaagctgacctacaaccatgggggtatcactggctcccgtgggctccaggcaggtgatgtggtagagtttgaggtccggccatcctggccactctacctgtctgcaaatgtgggcatccaggtcctgttgtttggcacaggtgccataaggaatgaagtgacttatgacccctacctggtcctgatcccagatgtggcggcctactgcccagcctatgtggtcaagagtgtaccaggctgtgagggcgtggccctggtagtggcacagacgaaggctatcagcgggctgaccatagatgggcatgcagtgggggccaagctcacctgggaggctgtgccaggcagtgagttctcgtatgctgaagtggagctcggcacagctgacatgatccacacggccgaggccaccaccaacttgggactgctcaccttcgggctggccaaggctataggctacgcaacagctgctgattgcggccggactgtactgtccccagtggagccctcctgcgaaggcatgcagtgcgcagccgggcagcgctgccaggtggtaggcgggaaggccgggtgtgtggcggagtccaccgctgtctgccgcgcccagggcgacccccattacaccaccttcgacggccgtcgctacgacatgatgggcacctgttcgtacacgatggtggagctgtgcagcgaggacgacaccctgcccgccttcagcgtggaggccaagaacgagcaccggggcagccgccgcgtctcctacgtgggcctcgtcactgtgcgcgcctacagccactctgtgtcgctgacccgcggtgaagttggcttcgtcctggttgacaaccagcgctcgcgcctgccagtctccctgagtgagggtcgcctgcgtgtgtaccagagcggaccacgggccgtggtggagctggtctttgggctggtggtcacttatgactgggactgccagctggcactcagcctgcctgcacgcttccaagaccaggtgtgcgggctgtgtggcaactataatggtgacccagcagacgacttcctcacgcctgacggggctctggctcctgacgctgtggagttcgcaagtagctggaagctggatgatggggactacctgtgtgaggatggctgccagaacaactgtcccgcctgcaccccaggccaggcccaacactatgagggcgaccgactctgtggcatgctgaccaagctcgatggccccttcgctgtctgccatgacaccctggaccccaggcccttcctggagcagtgtgtatatgacctgtgtgtggtcggtggggagcggctcagcctgtgccgtggcctcagcgcctatgcccaggcctgtctggagcttggcatctcggttggggactggagatcaccagccaactgccccctgtcctgccctgccaacagccgctatgagctctgcggccctgcttgcccgacctcctgcaacggggctgcggcgccgtccaactgctccgggcgcccctgcgtggagggctgcgtgtgcctcccaggcttcgtggccagcggcggcgcctgcgtgccggcctcgtcgtgtggctgcaccttccagggtctccagctcgctccgggccaggaagtgtgggcggacgagttgtgccaaaggcgctgcacctgcaacggcgccacccatcaggtcacctgccgcgacaagcagagctgcccggcgggtgagcgctgcagcgtccagaacggcctcctgggctgctaccccgatcgcttcgggacctgccaggggtccggggacccacactatgtgagcttcgacggccggcgcttcgacttcatgggcacctgcacgtacctgctggtcggctcatgcggccagaacgcagcgctgcctgccttccgggtgctggtggaaaacgagcatcggggcagccagactgtgagctacacgcgcgccgtgcgggtggaggcccgcggggtgaaggtggccgtgcgccgggagtaccccgggcaagtgctggtggatgacgtccttcagtatctgcccttccaagcagcagatgggcaggtgcaggtgttccgacagggcagggatgccgtcgtgcgcacggactttggcctgactgtcacttatgactggaatgcacgagtgactgccaaggtgcccagcagctatgctgaggccctgtgtggactctgtgggaacttcaacggggacccagctgatgacctggctctgcggggtgggggtcaagctgccaatgcactggcctttgggaacagctggcaagaagagacgaggcccggctgtggagcaactgaaccgggtgactgtcccaagctggactccctggtggcccagcagctgcagagcaagaatgagtgtggaatccttgccgaccccaaggggcccttccgggagtgccatagcaagctggacccccagggtgccgtgcgcgactgtgtctatgaccgctgcctgctgccaggccagtctgggccactgtgtgacgcactggccacctatgctgctgcatgccaggctgctggagccacagtgcacccctggaggagtgaagaactttgcccactgagctgcccaccccacagccactatgaggcgtgttcctacggctgcccgctgtcctgtggagacctcccagtgcccgggggctgtggctcagaatgccatgagggctgcgtgtgcgatgagggctttgcgctcagtggtgagtcctgcctgcccctggcctcctgtggctgcgtacaccagggcacctaccacccaccaggccagaccttctaccctggccccggatgtgattccctttgccactgccaggagggcggcctggtgtcctgtgagtcctccagctgcggaccgcacgaggcctgccagccatccggtggcagcttgggctgtgtggccgtgggctctagcacctgccaggcgtcaggagacccccactacaccaccttcgatggccgccgcttcgacttcatgggcacctgcgtgtatgtgctggctcagacctgcggcacccggcctggcctgcatcggtttgccgtcctgcaggagaacgtggcctggggtaatgggcgagtcagtgtgaccagggtgatcacggtccaggtggcaaacttcaccctgcggctggagcagagacagtggaaggtcacggtgaacggtgtggacatgaagctgcccgtggtgctggccaacggccagatccgtgcctcccagcatggttcagatgttgtgattgagaccgacttcggcctgcgtgtggcctacgaccttgtgtactatgtgcgggtcaccgtccccggaaactactaccagcagatgtgtggcctgtgtgggaactacaacggcgaccccaaggatgacttccagaagcccaatggctcacaggcaggcaacgccaatgagttcggcaactcctgggaggaggtggtgcccgactctccctgcctgccgcccaccccttgcccgccggggagcgaggactgtatccccagccacaagtgtcctcccgagctggagaagaagtatcagaaggaggagttctgtgggctcctctccagccccacagggccactgtcctcctgccacaagctggtggatccccagggtcccttgaaagattgcatctttgatctctgcctgggtggtgggaacctgagcattctctgcagcaacatccatgcctacgtgagtgcttgccaggcggctggaggccacgtggagccctggaggactgaaactttctgtcccatggagtgccctccgaacagtcactacgagctctgtgcggacacctgctccctgggctgctcagctctcagtgcccctccacagtgccaggatgggtgtgctgagggctgccagtgtgactccggcttcctctacaatggccaagcctgcgtgcccatccagcaatgcggctgctaccacaatggtgtctactatgagccggagcagacagtcctcattgacaactgtcggcagcagtgcacgtgccatgcgggtaaaggcatggtgtgccaggaacacagctgcaagccggggcaggtgtgccagccctccggaggcatcctgagctgcgtcaccaaagacccgtgccacggcgtgacatgccggccacaggagacatgcaaggagcagggtggccagggcgtgtgcctgcccaactatgaggccacgtgctggctgtggggcgacccacactaccactccttcgatggccggaagtttgacttccagggcacctgtaactatgtgctggcaacaactggctgcccgggggtcagcacccagggcctgacacccttcaccgtcaccaccaagaaccagaaccggggcaaccctgctgtgtcctacgtgagagtcgtcaccgtggctgccctcggcaccaacatctccatccacaaggacgagatcggcaaagtccgggtgaacggtgtgctcacagccttgcctgtctctgtggccgacgggcggatttcagtgacccagggtgcatcgaaggcactgctggtggctgactttggactgcaagtcagctatgactggaactggcgggtagacgtgacgctgcccagcagctatcatggcgcagtgtgcgggctctgcggtaacatggaccgcaaccccaacaatgaccaggtcttccctaatggcacactggctccctccatacccatctggggcggcagctggcgagccccaggctgggacccactgtgttgggacgaatgtcgggggtcctgcccaacgtgccctgaggaccggttggagcagtacgagggccctggcttctgcggacccctggcccccggcacagggggccctttcaccacctgccatgctcatgtgccacctgagagcttcttcaagggctgtgttctggacgtctgcatgggtggtggggaccgtgacattctttgcaaggctctggcttcctatgtggccgcctgccaggctgctggggttgtcatcgaagactggcgggcacaggttggctgtgagatcacctgcccagaaaacagccactatgaggtctgtggctcaccctgcccggccagctgtccgtcccctgcaccccttacgacgccagccgtatgtgagggcccctgtgtggagggctgccagtgcgacgcgggtttcgtgttaagtgctgaccgctgtgttcccctcaacaacggctgcggctgctgggccaatggcacctaccacgaggcgggcagtgagttttgggctgatggcacctgctcccagtggtgtcgctgcgggcctgggggtggctcgctggtctgcacacctgccagctgtgggctgggtgaagtgtgtggcctcctgccatccggccagcacggctgccagcccgtcagcacagctgagtgccaggcgtggggtgacccccattacgtcactctggatgggcaccgattcaatttccaaggcacctgcgagtacctgctgagtgcaccctgccacggaccacccttgggggctgagaacttcactgtcactgtagccaatgagcaccggggcagccaggctgtcagctacacccgcagtgtcaccctgcaaatctacaaccacagcctgacactgagtgcccgctggccccggaagctacaggtggacggcgtgttcgtcactctgcccttccagctggactcgctcctgcacgcacacctgagcggcgccgacgtggtggtgaccacaacctcagggctctcgctggctttcgacggggacagcttcgtgcgcctgcgcgtgccggcggcgtacgcgggctctctctgtggcttatgcgggaactacaaccaggaccccgcagacgacctgaaggcggtgggcgggaagcccgccggatggcaggtgggcggcgcccagggctgcggggaatgtgtgtccaagccatgcccgtcgccgtgcaccccagagcagcaagagtccttcggcggcccggacgcctgcggcgtgatctccgccaccgacggcccgctggcgccctgccacggccttgtgccgcccgcgcagtacttccagggctgcttgctggacgcctgccaagttcagggccatcctggaggcctctgtcctgcagtggccacctacgtggcagcctgtcaggccgctggggcccagctccgcgagtggaggcggccggacttctgtcccttccagtgccctgcccacagccactacgagctctgcggtgactcctgtcctgggagctgcccgagcctgtcggcacccgagggctgtgagtcggcctgccgtgaaggctgtgtctgcgatgctggcttcgtgctcagtggtgacacgtgtgtacctgtgggccagtgtggctgcctccacgatgaccgctactacccactgggccagaccttctaccctggccctgggtgtgattccctttgccgctgccgggagggcggtgaggtgtcctgtgagccctccagctgcggcccgcatgagacctgccggccatccggtggcagcttgggctgcgtggccgtgggctctaccacctgccaggcgtcgggagatccccactacaccaccttcgatggccgccgcttcgacttcatgggcacctgcgtgtatgtgctggctcagacctgcggcacccggcctggcctacatcggtttgccgtcctgcaggagaacgtggcctggggtaatgggcgagtcagtgtgaccagggtgatcacggtccaggtggcaaacttcaccctgcggctggagcagagacagtggaaggtcacggtgaacggtgtggacatgaagctgcccgtggtgctggccaacggccagatccgtgcctcccagcatggttcagatgttgtgattgagaccgacttcggcctgcgtgtggcctacgaccttgtgtactatgtgcgggtcaccgtccctggaaactactaccagctgatgtgtggcctgtgtgggaactacaacggcgaccccaaggatgacttccagaagcccaatggctcgcaggcaggcaacgccaatgagttcggcaactcctgggaggaggtggtgcccgactctccctgcctgccgccgcccacctgcccgccggggagcgagggctgtatccccagcgaggagtgtcctcccgagctggagaagaagtatcagaaggaggagttctgtgggctcctctccagccccacagggccactgtcctcttgccacaagctggtggatccccagggtcccttgaaagattgcatctttgatctctgcctgggtggtgggaacctgagcattctctgcagcaacatccatgcctacgtgagtgcttgccaggcagctggaggccaggtggagccctggaggaatgaaactttctgtcccatggaatgccctcagaacagtcactacgagctctgtgcggacacctgctccctgggctgctcggctctcagtgcccctctgcagtgcccagatgggtgtgctgagggctgccagtgtgactccggcttcctctacaacggccaagcctgcgtgcccatccagcaatgtggctgctaccacaatggtgcctactatgagccggagcagacagtcctcattgacaactgtcggcagcagtgcacgtgccatgtgggtaaagtcgtggtgtgccaggaacacagctgcaagccggggcaggtgtgccagccctccggaggcatcctgagctgcgtcaacaaagacccgtgccacggcgtgacatgccggccacaggagacatgcaaggagcagggtggccagggcgtgtgcctgcccaactatgaggccacgtgctggctgtggggcgacccacactaccactccttcgatggccggaagtttgacttccagggcacctgtaactatgtgctggcaacaactggctgcccgggggtcagcacccagggcctgacacccttcaccgtcaccaccaagaaccagaaccggggcaaccctgctgtgtcctacgtgagagtcgtcaccgtggctgccctcggcaccaacatctccatccacaaggacgagatcggcaaagtccgggtgaacggtgtgctcacagccttgcctgtctctgtggccgacgggcggatttcagtgacccagggtgcatcgaaggcactgctggtggctgactttggactgcaagtcagctatgactggaactggcgggtagacgtgacgctgcccagcagctatcatggcgcagtgtgcgggctctgcggtaacatggaccgcaaccccaacaatgaccaggtcttccctaatggcacactggctccctccatacccatctggggcggcagctggcgagccccaggctgggacccactgtgttgggacgaatgtcgggggtcctgcccaacgtgccctgaggaccggttggagcagtacgagggccctggcttctgcggacccctggcccccggcacagggggccctttcaccacctgccatgctcatgtgccacctgagagcttcttcaagggctgtgttctggacgtctgcatgggtggtggggaccgtgacattctttgcaaggctctggcttcctatgtggccgcctgccaggctgctggggttgtcatcgaagactggcgggcacaggttggctgtgagatcacctgcccagaaaacagccactatgaggtctgtggcccaccctgcccggccagctgtccgtcccctgcaccccttacgacgccagccgtatgtgagggcccctgtgtggagggctgccagtgcgacgcgggtttcgtgttaagtgctgaccgctgtgttcccctcaacaacggctgcggctgctgggccaatggcacctaccacgaggcgggcagtgagttttgggctgatggcacctgctcccagtggtgtcgctgcgggcctgggggtggctcgctggtctgcacacctgccagctgtgggctgggtgaagtgtgtggcctcctgccatccggccagcacggctgccagcccgtcagcacagctgagtgccaggcgtggggtgacccccattacgtcactctggatgggcaccgattcgatttccaaggcacctgcgagtacctgctgagtgcaccctgccacggaccacccttgggggctgagaacttcactgtcactgtagccaatgagcaccggggcagccaggctgtcagctacacccgcagtgtcaccctgcaaatctacaaccacagcctgacactgagtgcccgctggccccggaagctacaggtggacggcgtgttcgtcactctgcccttccagctggactcgctcctgcacgcacacctgagcggcgccgacgtggtggtgaccacaacctcagggctctcgctggctttcgatggggacagcttcgtgcgcctgcgcgtgccggcggcgtacgcgggctctctctgtggcttatgcgggaactacaaccaggaccccgcagacgacctgaaggcggtgggcgggaagcccgccggatggcaggtgggcggcgcccagggctgcggggaatgtgtgtccaagccatgcccgtcgccgtgcaccccagagcagcaagagtccttcggcggcccggacgcctgcggcgtgatctccgccaccgacggcccgctggcgccctgccacggccttgtgccgcccgcgcagtacttccagggctgcttgctggacgcctgccaagttcagggccatcctggaggcctctgtcctgcagtggccacctacgtggcagcctgtcaggccgctggggcccagctccgcgagtggaggcggccggacttctgtcccttccagtgccctgcccacagccactacgagctctgcggtgactcctgtcctgggagctgcccgagcctgtcggcacccgagggctgtgagtcggcctgccgtgaaggctgtgtctgcgatgctggcttcgtgctcagtggtgacacgtgtgtacctgtgggccagtgtggctgcctccacgatgaccgctactacccactgggccagaccttctaccctggccctgggtgtgattccctttgccgctgccgggagggcggtgaggtgtcctgtgagccctccagctgcggcccgcatgagacctgccggccatccggtggcagcttgggctgcgtggccgtgggctctaccacctgccaggcgtcgggagatccccactacaccaccttcgatggccaccgcttcgacttcatgggcacctgcgtgtatgtgctggctcagacctgcggcacccggcctggcctgcatcggtttgccgtcctgcaggagaacgtggcctggggtaatgggcgagtcagtgtgaccagggtgatcacggtccaggtggcaaacttcaccctgcggctggagcagagacagtggaaggtcacggtgaacggtgtggacatgaagctgcccgtggtgctggccaacggccagatccgtgcctcccagcatggttcagatgttgtgattgagaccgacttcggcctgcgtgtggcctacgaccttgtgtactatgtgcgggtcaccgtccctggaaactactaccagctgatgtgtggcctgtgtgggaactacaacggcgaccccaaggatgacttccagaagcccaatggctcgcaggcaggcaacgccaatgagttcggcaactcctgggaggaggtggtgcccgactctccctgcctgccgccgcccacctgcccgccggggagcgcgggctgtatccccagcgacaagtgtcctcccgagctggagaagaagtatcagaaggaggagttctgtgggctcctctccagccccacagggccactgtcctcctgccacaagctggtggatccccagggtcccttgaaagattgcatctttgatctctgcctgggtggtgggaacctgagcattctctgcagcaacatccatgcctacgtgagtgcttgccaggcggctggaggccacgtggagccctggaggaatgaaactttctgtcccatggaatgccctcagaacagtcactacgagctctgtgcggacacctgctccctgggctgctcggctctcagtgcccctctgcagtgcccagatgggtgtgctgagggctgccagtgtgactccggcttcctctacaacggccaagcctgcgtgcccatccagcaatgtggctgctaccacaatggtgtctactatgagccggagcagacagtcctcattgacaactgtcggcagcagtgcacgtgccatgtgggtaaagtcgtggtgtgccaggaacacagctgcaagccggggcaggtgtgccagccctccggaggcatcctgagctgcgtcaccaaagacccgtgccacggcgtgacatgccggccacaggagacatgcaaggagcagggtggccagggcgtgtgcctgcccaactatgaggccacgtgctggctgtggggcgacccacactaccactccttcgatggccggaagtttgacttccagggcacctgtaactatgtgctggcaacaactggctgcccgggggtcagcacccagggcctgacacccttcaccgtcaccaccaagaaccagaaccggggcaaccctgctgtgtcctacgtgagagtcgtcaccgtggctgccctcggcaccaacatctccatccacaaggacgagatcggcaaagtccgggtgaacggtgtgctcacagccttgcctgtctccgtggccgacgggcggatttcagtggcccagggtgcatcgaaggcactgctggtggctgactttggactgcaagtcagctatgactggaactggcgggtagacgtgacgctccccagcagctatcatggcgcagtgtgcgggctctgcggtaacatggaccgcaaccccaacaatgaccaggtcttccctaatggcacactggctccctccatacccatctggggcggcagctggcgagccccaggctgggacccactgtgttgggacgaatgtcgggggtcctgcccaacgtgccctgaggaccggttggagcagtacgagggccctggcttctgcggacccctttcatctggcacagggggccccttcaccacctgccatgctcatgtgccacctgagagcttcttcaagggctgtgttctggacgtctgcatgggtggtggggaccgtgacattctttgcaaggctctggcttcctacgtggccgcctgccaggccgctggggttgtcatcgaagactggcgggcacaggttggctgtgagatcacctgcccagaaaacagccactatgaggtctgtggcccaccctgcccagccagctgtccgtcccctgcaccccttacgacgccagccgtatgtgagggcccctgtgtggagggctgccagtgcgacgcgggtttcgtgttaagtgctgaccgctgtgttcccctcaacaacggctgcggctgctgggccaatggcacctaccacgaggcgggcagtgagttttgggctgatggcacctgctcccagtggtgtcgctgcgggcctgggggtggctcgctggtctgcacacctgccagctgtgggctgggtgaagtgtgtggcctcctgccatccggccagcacggctgccagcccgtcagcacagctgagtgccaggcgtggggtgacccccattacgtcactctggatgggcaccgattcgatttccaaggcacctgcgagtacctgctgagtgcaccctgccacggaccacccttgggggctgagaacttcactgtcactgtagccaatgagcaccggggcagccaggctgtcagctacacccgcagtgtcaccctgcaaatctacaaccacagcctgacactgagtgcccgctggccccggaagctacaggtcgacggcgtgttcgtggctctgcctttccagctggactcgctcctgcacgcacacctgagcggcgccgacgtggtggtgaccacaacctcagggctctcgctggctttcgatggggacagcttcgtgcgcctgcgcgtgccggcggcgtacgcggcctctctctgtggcttatgcgggaactacaaccaggaccccgcagacgacctcaaggctgtgggcgggaagcccgctggatggcaggtgggcggggcccagggctgcggggaatgtgtgtccaagccatgcccgtcgccgtgcaccccagagcagcaggagtccttcggcggcccggacgcctgcggcgtgatctccgccaccgacggcccgctggcaccctgccacggccttgtgccgcccgcgcagtacttccagggctgcttgctggacgcctgccaagttcagggccatcctggaggcctctgtcctgcagtggctacctacgtggcagcctgtcaggccgctggggcccagctcggcgagtggaggcggccggacttctgtcccttgcagtgccctgcccacagccactatgagctctgcggtgactcctgccctgtgagctgcccgagcctctcagcacccgagggctgtgagtcggcctgccgtgaaggctgtgtctgcgatgctggcttcgtactcagtggtgacacctgcgtacccgtgggccagtgtggctgcctccatgatggccgctactacccactgggcgaggtcttctacccgggccctgagtgtgagcggcgctgtgagtgtgggccaggtggccatgtcacctgccaggagggcgcagcctgtgggccccatgaggagtgccggttagaggatggtgtccaggcctgtcatgccacaggctgtggccgctgcctggccaacgggggcatccactacatcacccttgatggccgtgtctacgacctgcatggctcctgctcctatgtcttggcccaagtctgccacccaaagcctggggacgaggacttttccatcgtgcttgagaagaatgcagctggagatctccaacgcctcctggttactgtggctggccaggttgtgagcctagctcaggggcagcaggtcaccgtggacggcgaggctgtggccctgcctgtggctgtgggccgcgtgcgggtgaccgccgagggccgaaacatggttctgcagacgaccaaggggctgcggcttctctttgatggcgatgcccacctcctcatgtccatccccagccccttccgtggacggctctgtggcctctgtgggaacttcaatggcaactggagtgacgactttgtcctgcccaatggctcagcagcgtccagtgtggagaccttcggggctgcatggcgggcgcccggctcctccaagggctgtggcgagggctgcgggccccaaggctgcccagtgtgcttggcagaggagactgcaccctatgagagcaacgaggcctgcgggcagctccggaacccccagggccccttcgcgacctgccaggcggtgctgagtccctctgagtacttccgccaatgcgtatacgacctgtgcgcgcaaaagggtgacaaagccttcctgtgccgcagcctggcagcctacacggcggcctgtcaggcagctggcgtggccgtgaagccctggaggacagacagcttctgcccgctccattgccccgcccacagccactactccatctgcactcgcacctgccagggatcctgtgcggctctctccggcctcacgggctgcaccacccgctgttttgagggctgtgagtgcgacgaccgcttcctgctttcccagggtgtctgcatccctgtccaagattgtggctgcacccataatggccgatacttgccggtaaactcctccctgctgacctcagactgcagcgagcgctgttcctgttcctcaagctctggcctgacatgccaggcagctggctgcccaccaggccgtgtatgtgaggtcaaggctgaagcccggaactgctgggccacccgtggtctctgtgtcctgtctgtgggtgccaacctcaccacctttgatggggcccgtggtgccaccacctctcctggtgtctatgagctctcttcccgctgcccaggactacagaataccatcccctggtaccgtgtagttgccgaagtccagatctgccatggcaaaacggaggctgtgggccaggtccacatcttcttccaggatgggatggtgacgttgactccaaacaagggtgtgtgggtgaatggtctccgagtggatctcccagctgagaagttagcatctgtgtccgtgagtcgtacacctgatggctccctgctagtccgccagaaggcaggggtccaggtgtggcttggagccaatgggaaggtggctgtgattgtcagcaatgaccatgctgggaaactgtgtggggcctgtggaaactttgacggggaccagaccaatgattggcatgactcccaggagaagccagcgatggagaaatggagagcgcaggacttctccccatgttatggctgatcagtcatccaccaggaacgaagatttcctgaagaagacctggtccctctggaggttgcagtggctgaaggatgcatcatgtgctcctaccctgctctaccgcttttctgggtcacagaggccaaatgtgagagcattgaataaatatcttaagctaagctgcaaaaaaaaaaaaaaaaaa

SEQ ID NO: 2184 - DNA, 1254 bp, Homo Sapiens
  NM_003897
ctcacttggccttacactccgctcggctcaccatgtgtcactctcgcagctgccacccgaccatgaccatcctgcaggccccgaccccggccccctccaccatcccgggaccccggcggggctccggtcctgagatcttcaccttcgaccctctcccggagcccgcagcggcccctgccgggcgccccagcgcctctcgcgggcaccgaaagcgcagccgcagggttctctaccctcgagtggtccggcgccagctgccagtcgaggaaccgaacccagccaaaaggcttctctttctgctgctcaccatcgtcttctgccagatcctgatggctgaagagggtgtgccggcgcccctgcctccagaggacgcccctaacgccgcatccctggcgcccacccctgtgtccgccgtcctcgagccctttaatctgacttcggagccctcggactacgctctggacctcagcactttcctccagcaacacccggccgccttctaactgtgactccccgcactccccaaaaagaatccgaaaaaccacaaagaaacaccaggcgtacctggtgcgcgagagcgtatccccaactgggacttccgaggcaacttgaactcagaacactacagcggagacgccacccggtgcttgaggcgggaccgaggcgcacagagaccgaggcgcatagagaccgaggcacagcccagctggggctaggcccggtgggaaggagagcgtcgttaatttatttcttattgctcctaattaatatttatatgtatttatgtacgtcctcctaggtgatggagatgtgtacgtaatatttattttaacttatgcaagggtgtgagatgttccccctgctgtaaatgcaggtctcttggtatttattgagctttgtgggactggtggaagcaggacacctggaactgcggcaaagtaggagaagaaatggggaggactcgggtgggggaggacgtcccggctgggatgaagtctggtggtgggtcgtaagtttaggaggtgactgcatcctccagcatctcaactccgtctgtctactgtgtgagacttcggcggaccattaggaatgagatccgtgagatccttccatcttcttgaagtcgcctttagggtggctgcgaggtagagggttgggggttggtgggctgtcacggagcgactgtcgagatcgcctagtatgttctgtgaacacaaataaaattgatttactgtctgcaaaaaaaaaaaaaaa

SEQ ID NO: 2185 - DNA, 5069 bp, Homo Sapiens
  NM_003899
aaaaaagggtgaggagaagcagcggctgagcgggttggcatctggggcagcgggctcgctccaggccgtcgggggccgctcgccagcgtcgcccgctgtgttgggagcgcgggccgtgggcgtcgctcggccttgtccgcggcgtccccgctgccggccacggcgctcagcgcttgtgctctgtattgcaggtctaccccgagccccggagcgagagcgagtgcctgagcaacatccgcgagttcctgcgcggctgcggggcttccctgcggctggagacgtttgatgcaaatgatttgtatcaggggcagaattttaacaaggtcctcagttccttagtgactctaaataaagtaacagcagacatcgggctggggagtgactccgtgtgtgcccggccctcgtctcaccgcataaagtcttttgactcccttggatcacagtctttgcacactcggacttcaaaactgttccagggccagtatcggagtttggacatgaccgataatagcaacaatcaactggtagtaagagcaaagtttaacttccagcagaccaatgaggacgagctttccttctcaaaaggagacgtcatccatgtcacccgtgtggaagagggaggctggtgggagggcacactcaacggccggaccggctggttccccagcaactacgtgcgcgaggtcaaggccagcgagaagcctgtgtctcccaaatcaggaacactgaagagccctcccaaaggatttgatacgactgccataaacaaaagctattacaatgtggtgctacagaatattttagaaacagaaaatgaatattctaaagaacttcagactgtgctttcaacgtacctacggccattgcagaccagtgagaagttaagttcagcaaacatttcatatttaatgggaaatctagaagaaatatgttctttccagcaaatgctcgtacagtctttagaagaatgcaccaagttgcccgaagctcagcagagagtcggaggctgctttttaaacctgatgccacagatgaaaaccctgtacctcacgtattgtgccaatcacccttctgcagtgaatgtcctcacggaacacagtgaggagttgggggagttcatggagaccaaaggtgccagcagccctgggattctcgtgctgaccacgggcctgagcaaacccttcatgcgcctggataaataccctacgctgctcaaagagctcgagagacacatggaggattatcatacagatagacaagatattcaaaaatccatggctgccttcaaaaacctttcagcccaatgtcaagaagtccggaagaggaaagagcttgagctgcagatcctgacggaagccatccggaactgggagggcgatgacattaaaactctgggcaacgtcacttacatgtcccaggtcctgattcagtgtgccggaagtgaggaaaagaatgaaagatatcttctactcttcccaaatgttttgctaatgttgtctgccagtcctaggatgagtggctttatctatcagggaaagcttccaacgacaggaatgacaatcacaaagcttgaggacagtgaaaatcatagaaatgcatttgaaatatcagggagcatgattgagcggatattagtgtcgtgcaacaaccagcaggatctgcaggaatgggtggagcacctacagaagcaaacgaaggtcacgtctgtgggaaaccccaccataaagcctcattcagtgccatctcataccctcccctcccacccggtcactccgtccagcaagcacgcagacagcaagcccgcgccgctgacgcccgcctaccacacgctgccccacccctcccaccacggcaccccgcacaccaccatcaactggggacccctggagcctccgaaaacacccaagccctggagcctgagctgcctgcggcccgcgcctcccctccggccctcagctgctctctgctacaaggaggatcttagtaagagccctaagaccatgaaaaagctgctgcccaagcgcaaacctgaacggaagccttcagatgaggagttcgcgtcccggaaaagcacagctgctttggaagaagatgctcagattctgaaagtcattgaagcttactgcaccagcgccaaaacaaggcaaacactcaattcaagttcacgcaaagaatctgctccacaagttttgcttccagaagaagagaaaattatagtggaagaaactaaaagtaatggtcagacagtgatagaagaaaagagtcttgtggataccgtatatgcattaaaggatgaagttcaagaattaagacaggacaacaaaaagatgaagaaatctctagaggaagaacagagagcccgcaaagacctggagaagctggtgaggaaagtcctgaagaacatgaatgatcctgcctgggatgagaccaatctataagggatgtcctcagttctttctgttgaagaccagttctgaggtgaagctgggcacccctgacccaagtcggggtgcactcaggaccacagggcagggctgggtggggcgccaccttgctctctgtatatagaaaagctggagcttattctgcgaatggagacgatcaaaccatgactgatgaatccagacaggagggattgactctgaggacctgagctacatcaatccactctgtgaacatctcagttacctcattctgcaataagttcagtgactgactaaaagtcttgtttttccagactttgaattgaatatataaatattatatatacatgtttcttgtaaatatcccattttgaatgcatacctgtggtggttctgtccgggctaatccccatgctagaatgtcctttccagctacgtgaataagaagtcccatgcccgcatccaccggaagcagaagcctggtggatgcctggttcgttccgcagcaccagggcctccaccgtgctgtggcagcaccccccatgtcggtatttctaaataaccttatttatacctgcagagatacacttcagtcccattcagaagtcttctcttaaagcagcattacagtcccagacctgcgggtttctgagggcaacttgctggctgacagactcagtcttgacctcaaggaaggcccatacggcactgccgcatccacctagaggtgtttgctcttgtccgctgtctgagtactgtgattctcagatgagtttgctgcgttttgggaggacacagacggttctgtataggctagttcagtaacaacaaaatacactgttttgtcttccctcaaagagagatcttactagaacctgtaaatagaatgtattatttattataagtcactgcagctgatgaaaacagatggaggccatgctgcaggctgatactgatgggtggagttttgtcatcaggccagcctcatcccgaggtctcctccaccattggccgtagccagcaggcttcagtgctcaccgaaagtaaaatcccctccttcagcaagaataaagcaatatacaccttaggttccactaagtaacataggcataagcagggaacgtttcccccactgtgttccagtgcagaggagacgaagcctgtcctcaccgcggctcgctgggcccaggctggctctggaaagcctgtgcggtcctgggcaggaagcccggcccgtggagcaggttttcgttctgcttcagcaataaataagggtgaccacagggactttgcttttggtttcctttcctgtgaaaaggttggttttaaagtgagatacacttttccgtagaacaagtgttctatctttaaaaacccaaattgcagcaccgtggattactggtctcagaacaactcattgcgcatcagatttgactctctgattttctgtctattggccaaattgccctttaactgcacctgaatcctttgtgtactgatgcctttgagctgggcaccttgggagagtgttgtgttgctgtttacggttcttccttgcccttgctaattacagtctctggtgcccagcaagcccctttggcttccttccgtgactggtcacgttgtctgcctgggctcagcgtggacctgccccatgctgcagaacctggcctcacctggacttttcactagaattgccagcttcctcaacttagcagatcattcactcatgcgggcacaagcaaagatcaacactttcttttttggtaagcttgagttttacaagttattttttggtgatgcgtaagacattgcagtgggaaaccattcaacttgagtttattggagtttgctgttgtagcaggttttaactcaggaacaactcttgtctgatctctccgcccctctgccgggaggcgacattaactgtcctctcggagccggtagcgttgctgtccgagtccccaggacggatctcctgcagacctgccttaatgctcagatcgaagtatttcacaagaatacttgtgtttttaacagcccttcccctggacggtgcggccatgagggcctcatgttacggcattgccttttctttctgtggatccagtatcttcctcggctttttagggagcaggaaaaatgcgtctgagagcaactctttttaaaaacctgccctgttgtatataactgtgtctgtttcaccgtgtgacctcccaagggggtgggaacttgatataaacgtttaaaggggccacgatttgcccgagggttactcctttgctctcaccttgtatggatgaggagatgaagccatttcttatcctgtagatgtgaagcactttcagttttcagcgatgttggaatgtagcatcagaagctcgttccttcacactcagtggcgtctgtgcttgtccacatgcgctgggcgtctgggaccttgaatgcctgccctggttgtgtggactccttaatgccaatcatttcttcacttctctgggacacccagggcgcctgttgacaagtgtggagaaactcctaatttaaatgtcacagacaatgtcctagtgttgactactacaatgttgatgctacactgttgtaattattaaactgattatttttcttatgtcacaaaaaaaaaaa

SEQ ID NO: 2186 - DNA, 2884 bp, Homo Sapiens
  NM_003902
agcttcgacggccgccattttctttctttcttagctgttagctgagaggaagtctctgaacaggcggcagcggctcttatagtgcaaccatggcagactattcaacagtgcctcccccctcttctggctcagctggtggcggtggtggcggcggtggtggtggaggagttaacgacgctttcaaagatgcactgcagagagcccggcagattgcagcaaaaattggaggtgatgcagggacatcactgaattcaaatgactatggttatgggggacaaaaaagacctttagaagatggagatcaaccagatgctaagaaagttgctcctcaaaatgactcttttggaacacagttaccaccgatgcatcagcagcaaagcagatctgtaatgacagaagaatacaaagttccagatggaatggttggattcataattggcagaggaggtgaacagatctcacgcatacaacaggaatctggatgcaaaatacagatagctcctgacagtggtggccttccagaaaggtcctgtatgttaactggaacacctgaatctgtccagtcagcaaaacggttactggaccagattgttgaaaaaggaagaccagctcctggcttccatcatggcgatggaccgggaaatgcagttcaagaaatcatgattccagctagcaaggcaggattagtcattggaaaagggggagaaactattaaacagcttcaggaacgggctggagttaaaatggttatgattcaagacgggccgcagaacactggtgctgacaaacctcttaggattacaggagacccatataaagttcaacaagccaaggaaatggtgttagagttaattcgtgatcaaggcggtttcagagaagttcggaatgagtatgggtcaagaataggaggaaatgaagggatagatgtccccattccaagatttgctgttggcattgtaataggaagaaatggagagatgatcaaaaaaatacaaaatgatgctggtgttcgcattcagtttaagccagatgatgggacaacacccgaaaggatagcacaaataacaggacctccagaccgatgtcaacatgctgcagaaattattacagaccttcttcgaagtgttcaggctggtaatcctggtggacctggacctggtggtcgaggaagaggtagaggtcaaggcaactggaacatgggaccacctggtggactacaggaatttaattttattgtgccaactgggaaaactggattaataataggaaaaggaggtgaaaccataaaaagcataagccagcagtctggtgcaagaatagaacttcagagaaatcctccaccaaatgcagatcctaatatgaagttatttacaattcgtggcactccacaacagatagactatgctcggcaactcatagaagaaaagattggtggcccagtaaatcctttagggccacctgtaccccatgggccccatggtgtcccaggcccccatggacctcctgggcctccagggcctggaactccaatgggaccatacaaccctgcaccttataatcctggaccaccaggcccggctcctcatggtcctccagccccatatgctccccagggatggggaaatgcatatccacactggcagcagcaggctcctcctgatccagctaaggcaggaacggatccaaattcagcagcttgggctgcttattacgctcactattatcaacagcaagcacagccaccaccagcagcccctgcaggtgcaccaactacaactcaaactaatggacaaggagatcagcagaatccagccccagctggacaggttgattataccaaggcttgggaagagtactacaagaaaatgggtcaggcagttcctgctccgactggggctcctccaggtggtcagccagattatagtgcagcctgggctgagtattatagacaacaagcagcctattatgcccagacaagtccccagggaatgccacagcatcctccagcacctcagggccaataataagaagtggacaatacagtatttgcttcattgtgtgggggaaaaaaacctttgttaaatatatggatgcagacgacttgatgaagatcttaattttgtttttggtttaaaatagtgtttccttttttttttttttttttgaaaatgtacaaaatatctatcactactgataggaggttaatatttctgtgtagaaatgaaaattggtttgtttttagtatttagtgtagatgtacacattccagcaaatgtatttgcaattatgtggttgatgctttgtgatataaatgtactttttcaatgtatactttcacttttaaaatgcctgttttgtgctttacaataaatgatatgaaacctcctgtgtcggtaagttggatatgtgggtatttaaaggattcataatttcttagcaatgataaattaagatacatatacacaaatatataagctttccccatgaaatattgagtttttaaacactggcatgtttttccccccttgcagtatagtggtagattggaggatcttttccatttattgtattggctctttcagcacaagtaatcctgatatcttcattttttttccttctgtttgattaaaaactgcatgtgtgtacaatgatcttttggcatacttccattgcattaacagtgaaatttccttttatacatgaccactgtttcagacctgtactgctgctataacagttaacctttctgttcttaatttgataatacttgatttccaagactgtttcggcataactaattttaaacagttttcagatagtgaatatgagtagtctaataagaacagtttttttccatgtgaagcaactctttcaatgtatataa

SEQ ID NO: 2187 - DNA, 2235 bp, Homo Sapiens
  NM_003903
gagcctgggcagtgcacggggcctgggtggggggtgcgggtgtgggtggggacctgcggccttcgagtccgcggccttcgagtcctggggcggcggcggcggctgcaggcacgggcacgggcacggggcggggtgcttagggtgcaggaggcgcgcgcctagcggcggagtgtggcgtgaggccgggcccgcgccgccatgaacctagagcggctgcggaagcgcgtccggcagtacctcgaccagcaacagtatcaaagtgctctattttgggcagataaagtagcttcactctctcgtgaagaaccccaggacatctattggttggctcagtgtctttacctgacagcacaatatcacagagccgcccatgcacttcggtcacgaaaactggacaaattgtatgaagcatgtcgttaccttgcagctaggtgccattatgctgcaaaagagcaccagcaggcccttgatgttcttgacatggaagagcccatcaataaaagattatttgaaaaatacttgaaggacgaaagtggcttcaaagatccttccagcgactgggaaatgtcacagtcttcaataaagagttctatctgtcttctacgcgggaaaatctatgatgctctagataaccgaaccctggctacctacagctacaaagaagctttgaagcttgatgtctactgttttgaagcgttcgatcttttaacatcacatcacatgctgacagcacaagaagaaaaagaacttcttgaatcactaccccttagcaagctgtgtaatgaagaacaggaattgctgcgttttctatttgagaacaaattgaaaaaatataataagcctagtgaaacggtcatccctgaatctgtagatggcttgcaagagaatctggatgtggtagtgtctttagctgagagacattattataactgtgattttaaaatgtgctacaagcttacttctgtagtaatggagaaagatcctttccatgcaagttgtttacctgtacatatagggacgcttgtagagctgaataaagccaatgaacttttctatctttctcataaactggtggatttatatcctagtaatcctgtgtcttggtttgcagtgggatgttactatctcatggtcggtcataaaaatgaacatgccagaagatatctcagcaaagccacaacacttgagaaaacctatggacctgcatggatagcctatggacattcatttgcggtggagagtgagcacgaccaagcgatggctgcttacttcacagcagcacagctgatgaaagggtgtcatttgcctatgctgtatattggattagaatatggtttgaccaataactcaaaactagctgaaaggttcttcagccaagctctgagcattgcaccggaagacccttttgttatgcatgaggtcggcgtggttgcatttcagaatggagaatggaaaacagccgaaaaatggtttcttgatgctttggaaaaaattaaagcaattgggaacgaggtaacagttgacaaatgggaacctttgttgaacaacttggggcatgtctgcagaaaacttaaaaagtatgctgaggccttggattaccaccgtcaggcactggtgttgattcctcagaacgcatccacctactctgctattggatatatccacagtctgatgggcaactttgaaaatgctgtggactacttccacacagcccttggtcttaggcgagatgatacattttctgttacaatgcttggtcattgcatcgaaatgtacattggtgattctgaagcttatattggagcagacattaaagacaaattaaaatgttatgactttgatgtgcatacaatgaagacactaaaaaacattatttcacctccgtgggatttcagggaatttgaagtagaaaaacagactgcagaagaaacggggcttacgccattggaaacctcaaggaaaactccagattccagaccttccttggaagaaacctttgaaattgaaatgaatgaaagtgacatgatgttagagacatctatgtcagaccacagcacgtgactccagtcagtggtcctggtcccactgtcccagtgtaggaacagagacccgccttaagagactggatcgcacacctttgcaacagatgtgttctgattctctgaacctacaaaatagttatacatagtggaataaagaaggtaaaccatcaaaaaaaaaaaaaaaaaaaaaaaa

SEQ ID NO: 2188 - DNA, 1810 bp, Homo Sapiens
  NM_003904
aggaagccgaggtctgaattgcgcgtggtggccatggcggccagcggggctgtggaaccagggcccccgggggctgccgtcgccccgtcgcccgccccggccccgccgcctgcccctgatcacctgttccggcccatcagcgccgaggacgaggagcagcagcccaccgagatcgagtcgctatgcatgaactgttactgcaatggcatgacgcgcctcctgctcaccaagattcccttcttcagagaaataatagtgagctccttttcctgcgagcactgtggctggaacaacacggagatccagtcggcaggcaggatccaggaccagggagtgcgctacactttgtctgtcagggctctggaggacatgaacagagaagtggtgaagactgactctgctgccacaaggattcctgagctagattttgaaattcctgcctttagccagaaaggagctctgaccactgttgaaggattgatcacccgtgctatctctggcctggagcaggaccagcctgcacgaagggcaaacaaagatgctacagctgaaagaattgatgagttcattgtcaaactgaaggagctaaagcaagtagcctcccctttcactctgatcattgatgatccctcagggaacagttttgtggaaaacccacatgctcctcagaaagatgatgccctggtgatcacacactacaaccggacccgacagcaggaagagatgctggggcttcaagaagaagcaccagcagagaagccagaagaggaagatctcagaaatgaagtgctccagttcagcacaaactgcccagaatgcaatgcccccgctcagaccaacatgaagctagtacaaatccctcactttaaggaggttatcatcatggctaccaactgcgagaactgtgggcatcggaccaatgaggtgaaatctggaggagcagtagaacccttgggcaccaggatcaccctccacatcacagatgcctcagatatgaccagagacctcctcaagtctgagacttgcagtgtggaaatcccagagctagaatttgaactgggaatggcagtcctcgggggcaagttcaccacactggaagggctgctgaaagacatccgggaactggtgaccaaaaatcctttcacactgggcgacagttccaatcctggacagacggagagactacaggagtttagccagaagatggaccagatcatcgaaggtaacatgaaggcccactttattatggatgatccagcaggaaacagttacttgcagaatgtgtatgcgcctgaagatgatcctgagatgaaggtggagcgttacaagcgcacctttgaccaaaatgaggagctagggctcaatgacatgaagacagagggctatgaggcaggcctggctccgcaacggtagcagtgggtggctcaagggccagcctccagcgctgctctttctgtaggttatttattagtattggatgaaggcgaaggctgggagtgtctttcccaccagcccttgcccatggtggggaggacatctggtctgagtcagagatctgtgcacactttctaaacagcttgtgatgcaagtgtgagcctattgtgttacttgaccttattttggaagttttgaattggcctaggaggaaacccagaaatgaaccaggggtatgtcatcacttttttcatatcaagtcctcaccctccttccacataatgctctatcctctaaggttggaactctgaagttggagaaggtggaataaagttacacctggaaaaaaaaaaaaaaaaaaaaaaaaaaaaaaaaa

SEQ ID NO: 2189 - DNA, 6113 bp, Homo Sapiens
  NM_003906
taatacttaattaccttctaataattggagcagaagatgaacccaactaatcctttcagtgggcagcagcctagtgctttttcggcgtcttctagtaatgtaggaacacttccatctaagccgccatttcgatttggtcaaccttctctttttggacaaaacagtaccttatctgggaagagctcgggattttcacaggtatccagctttccagcgtcttctggagtaagtcattcctcttcagtgcaaacattagggttcacccaaacctcaagtgttggacccttttctggacttgagcacacttccacctttgtggctacctctgggccttcaagttcatctgtgctgggaaacacaggatttagttttaaatcacccaccagtgttggggctttcccaagcacttctgcttttggacaagaagctggagaaatagtgaactctggttttgggaaaacagaattcagctttaaacctctggaaaatgcagtgttcaaaccaatactgggggctgaatctgagccagagaaaacccagagccaaattgcttctgggttttttacattttcccacccaattagtagtgcacctggaggcctggcccctttctcttttcctcaagtaacaagtagttcagctaccacttcaaattttaccttttcaaaacctgttagtagtaataattcattatctgcctttacccctgctttgtcaaaccaaaatgtagaggaagagaagagaggacctaagtcaatatttggaagttctaataatagcttcagtagcttccctgtatcatctgcggttttgggcgaacctttccaggctagcaaagcaggtgtcaggcaggggtgtgaagaagctgtttcccaggtggaaccacttcccagcctaatgaaaggactgaaaaggaaggaggaccaggatcgctccccaaggagacatggccacgagccagcagaagattcggatcctctgtcccggggcgatcatcctccagacaaacgacctgtccgcctgaatcgaccccggggaggtactttatttggtcggacgatacaggatgttttcaaaagcaataaggaagtaggtcgtctgggcaacaaggaggccaaaaaggaaactggctttgttgagtctgcagaaagtgaccacatggctatcccaggagggaatcagtctgtcctggcaccttcccggattccaggtgtgaataaagaggaagaaactgaaagtagagagaagaaagaagattctctaagaggaactccggcgcgtcagagtaacagaagcgagagcacagacagtcttgggggcttgtctccctctgaagtcacagccatccagtgcaagaacatccctgactacctcaacgacaggaccattctggagaaccattttggcaaaattgctaaagtgcagcgcatctttaccaggcgcagcaaaaagcttgcagtggtacatttctttgatcatgcatctgcagccctggctagaaagaaggggaaaagtttgcataaagacatggctatcttttggcacaggaagaaaataagccccaataagaaacccttttccctgaaggagaagaaaccaggtgacggtgaagtcagcccgagcacagaggatgcaccctttcagcactctcctcttggcaaggccgcagggaggactggtgctagcagcctcctgaataaaagctctccagtgaagaagccaagtcttctaaaggcccaccaattcgagggagactcttttgactcagcctccgagggctccgagggcctcgggccatgtgtgctctccctcagtaccctgataggcactgtggctgagacatccaaggagaagtaccgcctgcttgaccagagagacaggatcatgcggcaagctcgggtgaagagaaccgatctggacaaagcgaggacttttgttggcacctgcctggatatgtgtcctgagaaggagaggtacatgcgggagacccgtagccagctgagcgtgttcgaagtggtcccagggactgaccaggtggaccacgcagcagctgtgaaagagtacagtcggtcctcggcggatcaggaggagcccctgccccacgagctgcggcccttgccagtgctcagcaggaccatggactacctggtgacccagatcatggaccagaaggagggcagcctgcgggattggtatgacttcgtgtggaaccgcacgcgtggcatacggaaggatatcacgcagcagcacctctgtgaccccctgacggtgtccctgattgagaagtgcacccggtttcacatccactgtgcccacttcatgtgtgaggagcccatgtcctcctttgatgccaagatcaataatgagaacatgaccaagtgcctgcagagcctgaaggagatgtaccaggacctgagaaacaagggtgtcttctgtgccagcgaagcggagttccagggctacaatgttctgctcagtctcaacaagggagacatcctaagagaagtacaacagttccatcctgctgttagaaactcatctgaggtgaaatttgctgttcaggcttttgctgcattgaacagtaataattttgtgagatttttcaaactggtccagtcagcttcttacctgaacgcttgtcttttacactgttacttcagtcagatccgcaaggatgctctccgggcgctcaactttgcgtacacggtgagcacacagcgatctaccatctttcccctggatggtgtggtgcgcatgctgctgttcagagactgtgaagaggccaccgacttcctcacctgccacggcctcaccgtttccgacggctgtgtggagctgaaccggtctgcattcctggaaccagagggattatccaagaccaggaagtcggtgtttattactaggaagctgacggtgtcagtcggggaaattgtgaacggagggccattgccccccgtccctcgtcatacccctgtgtgcagcttcaactcccagaacaagtacatcggggagagcctggccgcggagctgcccgtcagcacccagagacccggctccgacacagtgggcggagggagaggagaggagtgtggtgtagagccggatgcacccctgtccagtctcccacagtctctaccagcccctgcgccctcaccagtgcctctgcctcctgtcctggcactgaccccgtctgtggcgcccagcctcttccagctgtctgtgcagcctgaaccaccgcctccagagcccgtgcccatgtactctgacgaggacctggcgcaggtggtggacgagctcatccaggaggccctgcagagggactgtgaggaagttggctctgcgggtgctgcctacgcagctgccgccctgggtgtttctaatgctgctatggaggatttgttaacagctgcaaccacgggcattttgaggcacattgcagctgaagaagtgtctaaggaaagagagcgaagggagcaggagaggcagcgggctgaagaggaaaggttgaaacaagagagagagctggtgttaagtgagctgagccagggcctggccgtggagctgatggaacgcgtgatgatggagtttgtgagggaaacctgctcccaggagttgaagaatgcagtagagacagaccagagggtccgtgtggcccgttgctgtgaggatgtctgtgcccacttagtggacttgtttctcgtggaggaaatcttccagactgcaaaggagaccctccaggagcttcagtgcttctgcaagtatctacagcggtggagggaagctgtcacagcccgcaagaaactgaggcgccaaatgcgggctttccctgctgcgccctgctgcgtggacgtgagcgaccggctgagggcgctggcgcccagcgcagagtgccccattgctgaagagaacctggccaggggcctcctggacctgggccatgcagggagattgggcatctcctgcaccaggttaaggcggctcagaaacaagacagctcaccagatgaaggttcagcacttctaccagcagctgctgagtgatgtggcatgggcgtctctggacctgccatccctcgtggctgagcacctccctgggaggcaggagcatgtgttttggaagctggtgctggtgttgccggatgtagaggagcagtccccagagagttgtggcagaattctagcaaattggttaaaagtcaagttcatgggagatgaaggctcagtggatgacacatccagcgatgctggtgggattcagacgctttcgcttttcaactcacttagcagcaaaggggatcagatgatttctgttaacgtgtgtataaaggtggcccatggcgccctcagtgatggtgccattgatgctgtggagacacagaaggacctcctgggagccagtgggctcatgctgctgcttccccccaaaatgaagagtgaggacatggcagaggaggacgtgtactggctgtcggccttgctgcagctcaagcagctcctgcaggctaagcccttccagcctgcgcttcctctggtggttcttgtgcctagcccaggaggggacgccgttgagaaggaagtagaagatggtctgatgctacaggacttggtttcagctaagctgatttcagattacactgttaccgagatccctgataccattaatgatctacaaggttcaactaaggttttgcaagcagtgcagtggctggtttcccactgcccccattcccttgacctctgctgccagactctcattcagtacgtcgaagacgggattggccatgagtttagtggccgctttttccatgacagaagagagaggcgtctgggcggtcttgcttctcaggagcctggcgccatcattgagctgtttaacagtgtgctgcagttcctggcttctgtggtgtcctctgaacagctgtgtgacctgtcctggcctgtcactgagtttgctgaggcagggggcagccggctgcttcctcacctgcactggaatgccccagagcacctggcctggctgaagcaggctgtgctcgggttccagcttccgcagatggaccttccacccctgggggccccctggctccccgtgtgctccatggttgtccagtacgcctcccagatccccagctcacgccagacacagcctgtcctccagtcccaggtggagaacctgctccacagaacctactgtaggtggaagagcaagagtccctccccagtccatggggcaggcccctcggtcatggagatcccatgggatgatcttatcgccttgtgtatcaaccacaagctgagagactggacgcccccccggcttcctgttacatcagaggcgctgagtgaagatggtcagatatgtgtgtatttttttaaaaacgatttgaaaaaatatgatgttcctttgtcgtgggaacaagccaggttgcagacgcagaaggagctacagctgagagagggacgtttggcaataaagccttttcatccttctgcaaacaattttcccataccattgcttcacatgcaccgtaactggaagaggagcacagagtgtgctcaagaggggaggattcccagcacagaggatctgatgcgaggagcttctgctgaggagctcttggcgcagtgtttgtcgagcagtctgctgctggagaaagaagagaacaagaggtttgaagatcagcttcagcaatggttgtctgaagactcaggagcatttacggatttaacttcccttcccctctatcttcctcagactctagtgtctctttctcacactattgaacctgtgatgaaaacatctgtaactactagcccacagagtgacatgatgagggagcaactgcagctgtcagaggcgacaggaacgtgtctaggcgaacgactaaagcacctggaaaggctgatccggagttcaagggaagaggaagttgcctctgagctccatctctctgcgctgctagacatggtggacatttgagcagcctgacctgtggggagggggtctctcccgaagagtttctgtttttactcaaaataatgttattctcagatgcttgatgcactgttggaaatgtgattaatttaatcatgcagataaaccatttaaatgtc

SEQ ID NO: 2190 - DNA, 2898 bp, Homo Sapiens
  NM_003907
gattcccgatggagctggccccttcgtggcgaccacaagtcctatcacgccacaagaatctcggcttgttcacctacaaatgaaggccgacgatacttgcagaccgagtctgacatctatgggaccccactcctaccctgcgcctcaggggccgggacaaccgtgacccgtaccgactcctcgcgcctccgggatcaacctcagacccctgtgggctcccggggaagacgcatgcgcactgctccctcctcgtctccttcccttcgttaattagtccatcgcatttcaagtgctggatcctttttgtcccctactgcgtgcggtggcagcttccttgcggaagtggtgaccgtgagagaagaagatggcggcccctgtagtggcgccgcctggtgtggtggttagtcgggctaacaagcgcagcggcgcggggccgggaggcagcggtggcgggggagccagaggggcggaggaggaaccgccgccgcccctacaagcagttctggtggccgatagcttcgatcgccgcttcttccccatctccaaggaccagcctcgggtcctcttgcccctggccaatgtggcattaattgactacactctggaattcctgactgccacaggtgtacaggaaacatttgtcttttgttgctggaaagctgctcaaatcaaagaacatttactgaagtcaaagtggtgccgccctacatctctcaatgtggttcgaataattacatcagagctctatcgatcactgggagatgtcctccgtgatgttgatgccaaggctttggtgcgctctgactttcttctggtgtatggggatgtcatctcaaacatcaatatcaccagagcccttgaggaacacaggttgagacggaagctagaaaaaaatgtttctgtgatgacgatgatcttcaaggagtcatcccccagccacccaactcgttgccacgaagacaatgtggtagtggctgtggatagtaccacaaacagggttctccattttcagaagacccagggtctccggcgttttgcatttcctctgagcctgtttcagggcagtagtgatggagtggaggttcgatatgatttactggattgtcatatcagcatctgttctcctcaggtggcacaactctttacagacaactttgactaccaaactcgagatgactttgtgcgaggtctcttagtgaatgaggagatcctagggaaccagatccacatgcacgtaacagctaaggaatatggtgcccgtgtctccaacctacacatgtactcagctgtctgtgctgacgtcatccgccgatgggtctaccctctcaccccagaggcgaacttcactgacagcaccacccagagctgcactcattcccggcacaacatctaccgagggcctgaggtcagcctgggccatggcagcatcctagaggaaaatgtgctcctgggctctggcactgtcattggcagcaattgctttatcaccaacagtgtcattggccccggctgccacattggtgataacgtggtgctggaccagacctacctgtggcagggtgttcgagtggcggctggagcacagatccatcagtctctgctttgtgacaatgctgaggtcaaggaacgagtgacactgaaaccacgctctgtcctcacttcccaggtggtcgtgggcccaaatatcacgctgcctgagggctcggtgatctctttgcaccctccagatgcagaggaagatgaagatgatggcgagttcagtgatgattctggggctgaccaagaaaaggacaaagtgaagatgaaaggttacaatccagcagaagtaggagctgctggcaagggctacctctggaaagctgcaggcatgaacatggaggaagaggaggaactgcagcagaatctgtggggactcaagatcaacatggaagaagagagtgaaagtgaaagtgagcaaagtatggattctgaggagccggacagccggggaggctcccctcagatggatgacatcaaagtgttccagaatgaagttttaggaacactacagcggggcaaagaggagaacatttcttgtgacaatctcgtcctggaaatcaactctctcaagtatgcctataacataagtctaaaggaggtgatgcaggtactgagccacgtggtcctggagttccccctgcaacagatggattccccgcttgactcaagccgctactgtgccctgctgcttcctctgctaaaggcctggagccctgtttttaggaactacataaagcgcgcagccgaccatttggaagcgttagcagccattgaggacttcttcctagagcatgaagctcttggtatttccatggccaaggtactgatggctttctaccagctggagatcctggctgaggaaacaattctgagctggttcagccaaagagatacaactgacaagggccagcagttgcgcaagaatcaacagctgcagaggttcatccagtggctaaaagaggcagaagaggagtcatctgaagatgactgaagtcacactgcctgctcctttgggtgtgattgagtgccctcctggctcctgggctgggacaagtgaggaactagctgcagagggatgagtgaccaccatccaggctgagactgaaaggagcagaggctggaactacagtattctttcccctgctagcaaccatgtgcctcccatcctgactgtggagttgggatgtggaagtggggctggaacaaagcttctgcctagggaggagctaagcaggcccggcagttggaggaaggccagaggaacagctttgtgctccggctttccctcagggaacagcagagagcagttggctctttctgctgcttgtatatgttaatattaaaagagagagtggtgta

SEQ ID NO: 2191 - DNA, 4883 bp, Homo Sapiens
  NM_003909
cttgctctgccagtccagccctaggttctcctgaatcctgcggtcccagcgtcgctccggacgctgccaacctgttctccaccgtcgctcgacttccacctctaagactcccacgaaactcaggttgaataattcatcaaattacacaactgaactcaagacatggctgcccagtgtgtcacaaaggtggcgctgaatgtttcctgtgccaatcttttggataaagatatagggtcaaagtcagaccctttatgtgtgttgtttttgaatacaagtggtcaacagtggtatgaggttgagcgcacagaaaggattaagaattgcttgaatccccaattttccaagacatttattattgattactactttgaagtggttcagaaattgaaatttggggtttatgacatcgacaacaaaactattgagctgagtgatgatgacttcttaggggaatgtgaatgtacccttggacaaattgtttccagcaagaagctaactcgaccactggtgatgaaaactggcagacctgcaggaaaagggagcattacgatttcagctgaagaaataaaagataatagagtggtcttgtttgaaatggaagccagaaaactggataataaggatctatttggaaagtcagacccatacctggaattccacaagcagacatctgatggaaactggctaatggttcatcggacagaggttgttaaaaacaacttgaatcctgtttggaggcctttcaagatctctcttaactcactgtgttacggagatatggacaaaaccattaaggtggagtgttatgattatgacaatgatgggtcacatgatctcattggaacatttcagaccaccatgacaaaactgaaagaagcctccagaagctcacctgttgaatttgaatgcataaatgagaaaaaaaggcaaaagaaaaaaagctacaagaattcaggtgttatcagtgtgaaacagtgtgagattacagtagaatgcacattccttgactatataatgggaggatgtcagctgaattttactgtgggagtggacttcactggctccaatggtgacccaaggtctccagactcccttcattacatcagccccaatggcgttaatgagtatttgactgctctctggtctgtgggactggtcattcaagattatgatgctgataagatgtttccagcttttggttttggcgctcagatacctcctcagtggcaggtatcacatgaatttccaatgaacttcaacccatccaatccctactgcaatggaatccaaggcattgtagaggcgtatcggtcttgtcttcctcagataaaactctatggaccaactaatttttctccaatcataaatcacgtggccaggtttgctgctgcagccacgcaacagcagacagcttctcaatattttgtgcttttgattattactgatggtgtgatcacagaccttgatgaaaccagacaagctatagttaatgcctccaggctgcctatgtccatcataattgttggagttggaggtgctgacttcagcgccatggagtttctggatggtgatggtggaagtctccgctccccattgggcgaagtggccatcagagatattgtccagtttgtgcctttcagacagttccagaatgctccaaaagaagcacttgctcagtgtgtcttggcagagattccccagcaggtggtgggctacttcaatacatacaaactccttcctcccaagaacccagccacgaaacaacagaagcagtgaccacttcaacagaattcttttgtgttatgtggagcaatgccatctctcaccccaaatcgtgtatctgtcattctacgtactttttacccccagcatttatgatgtaaatctctttctctatggattatatctgtttaaagcattctttctaggttattttggggggacagtgccaagtccatctttgcccagtcaattcagtgattgatagcaatttacattaattgcagtaaagctctttggattagaaattagtgtggggaaagcttattctgttgttgtttttgtttactttcatatgatgaaaatgctgtgtttaagtgtttgtcaataggaagaatggaaaactgttgggatgatgtggtttgcaggttgctgtgcctgattcacagtgtatgttgtataagccaatgtccatacctgattatgagagcttcttaaattatatgatatcaaatttgttcctgtaactctgtatacagtgcttttctgcaaggtaaaaataacctgtctatgcatctgatttttgctacagtttagacactgtggtttacaaaacagcatgcactcaacttgggactttatgaaaagtactgaatgagcaggaaaaggcacatactcagttttttaaatgtacaatcaacaagtaaaaataacctcatgtaagtaagccatttttatttgcctttctagatattttattttattgtggaaaactgtaaacatggtcagatttggctttttttttcattaactgagcaagactttcaggatattgtagatgcacagatggtaggttgtcctgaattctacattattagattactttaattgagatttgttaaaacggttaggactgttttgtccaggaaagataagaggaccaaacatataaggtgaaattcagaattccgtttccttctaactaatgaaaaactgcttactaaaaaaaaattttatactttccttgctaaggtcccatatattgatttgtacagatccacttagtcattttctcctttttttaagaaccattttcatctgatttttaaactcacgataccagttatctgttaatcaaaattgcattttacaatttaataatgtgatatttcctatgtctacagcataccttattaggtataaaacctactgcaacttagaaaaaggaaagaaaaaagaaaacttttccaactgctgcattaagatagggtggattttatgtgctttttttttttaagagttgaatttcttttcctgacttttaccttttacagcgtattacttagtgaacattacattttcagaatagatcctaatattttattgagggcctatgtgctaaaaactatgcatatctatatattggccaattatctttaataatttaccttttgaaattgcatgtttatcatatatccttaagtggacacatacagtgccatgttgatgtgcctctcagttttattgaaaagctgccccacagcccatgtctcttgttctctgcaatgcctcaagggagtgagctctcaaccacagatagctgtggcttctcagaagcagctcattgccaaggccaggctgagaggggacctgcttgctgtggtggttgcctagcccagatgagcatttacctaccaccttcccacttggctagctgtcctttggatatgtgctgttaactggggaaggcatctaactagtagcctgctactccatagtatggctcaatagatgacacatcattttgacattatcaataggagaaaagaaaactaacccttcttctgattgtttggagccatagttgtctcagatgttctaattctctttgtatgcttggaaacagcatagatatgttgctgtggttttcagaattttctcttttaatcacaagaagccttttaaaaaatgacttacacatattctcaatgtacagtaaaacagacagaagtgagcttatctgtttgatgctgtggcagggtcccagtcactgggcatatcctccttctccttaaccagctccacagcagcccctgagtcacctgcacaaggtgcttgggaactgctggttatgagcattcctggttttcttcagccaaataacaggtaatcactgtcaattggatttggtcttcattattttatattctgattttatcagaattattctattttaaaattgttttaaaatttaaaacatttaattcatgatcatgttcatcagtagatgctattattcataagaactgtgattccagcaaactagggtaattggtgcctttttacagttttgaataaaagcatttacaatttctaaattatcagttttcacagtttcagcactcaacctcatcatacgctgatttaatattgttttacattaaaatagtccttttccctgttgtgccaccattcatttaagtgctgtttgttcttaaaatgcatttaaagaaaaattacccatattgactttcacacctcatataatcagatctattacaaatatatatcggagtgacggtgcccaggatagatgtaatatttcttacagatgctggcacagaggaaataatataccagctaatctagtcacctaaccttgtggttagaattgcaattttaagaccagaaaaatttgaagtctgatcagagatttacaactgttcattatagtggtgccttaggcaatctttccaaagtaaattcagggccccattgctacttatgccatatttggacatactttttttttcttcaattttgtaaacttcctggaaagctgtcttcactaagtatcccctagtctctatatatgtggttagtagtcatggaaatgacacataaagtacgccagaagtttgatggaacgtgttagaaactgttttgtgcttttatggatgtcatacttgacaatacatgtgtaagttactaatatatgaattgatgctaaatatatcttacatttgaattccttttggataaagttatttcttgatgtgacagagtagtgtgttttcatttttattctttacatgtgaccaaaacaatagaaaagttaaaaataaaatatagtgttttaggtggcaaaaaaaaaaaaaaaaaaa

SEQ ID NO: 2192 - DNA, 1060 bp, Homo Sapiens
  NM_003910
cagctacccaagctccaggagcttccggtatgtgttttccctctgttctcgattaccttggcaacggctgaggcgggagaccggtggtctgcaccgtcctggagggagatatgagtggctggactctcagccagccactgggatgtgttcgggctttggaccttgaggccggagagagctcccgagaggaggcggcgccacgttcgttcttctgaggggacggtagatttgggggttttcctctaggattctcgcgccgtttcctctgaagaaacaggaccagagagggaaggtgacctgaaagtcacagaataattttttagagctgaacaagaatccaagcctgcaactgcagagacgagagatctttctgctgtctatactcttggaaagcacatcctaagatctttgcagattatcctgtggaaggaaaatgcctaaagtcaaaagaagccggaaagcacccccagatggctgggagttgattgagccaacactggatgaattagatcaaaagatgagagaagctgaaacagaaccgcatgagggaaagaggaaagtggaatctctgtggcccatcttcaggatccaccaccagaaaacccgctacatcttcgacctcttttacaagcggaaagccatcagcagagaactctatgaatattgtattaaagaaggctatgcagacaaaaacctgattgcaaaatggaaaaagcaaggatatgagaacttgtgctgcctgcggtgcattcagacacgggacaccaacttcgggacgaactgcatctgccgcgtgcccaaaagcaagctggaagtgggccgcatcatcgagtgcacacactgtggctgtcgtggctgctctggctgaggctggcgcgctccaccctggactctggacttcgcaggttcctgcctgtcacgccacccccttcctgggagcagcgagcagtgccccaggcccgagttggagcacggtctctatggggaaggcttcgctgtctatcagctgtgatttgtaaaaataaaatctttaaatctctcgaaaaaaaaaaaaaaaaaa

SEQ ID NO: 2193 - DNA, 7482 bp, Homo Sapiens
  NM_003913
gcggcagctcttttccttcttcctccacttcccctaccctccaccgtccgggagccgccgccaccgccgccgaggagtcaggaagttcaagatggccgccgcggagacccagtcgctacgggagcagccagagatggaagatgctaattctgaaaagagtataaatgaagaaaatggagaagtatcagaagaccagtctcaaaataagcacagtcgtcacaaaaaaaagaagcataaacacagaagtaaacataagaaacataaacattcctcagaagaagacaaggataaaaaacataaacataagcataaacataagaaacacaaaagaaaagagattattgatgcttctgataaagagggtatgtctccagcaaaaagaactaaacttgatgatttagctttgctagaagacttggaaaaacagagagccttgattaaggccgaacttgataatgagttaatggaaggaaaggtccagtctggtatggggctcattttgcaaggttatgagtctggctctgaagaagagggggaaattcatgaaaaggcaagaaatggaaataggtctagtactagatcttcaagtacaaaggggaaacttgaacttgtggacaataaaattactacaaagaaacgaagtaaaagcagatccaaagaacggactagacataggtctgataaaaagaaaagtaaggggggtattgaaatcgttaaagagaaaacaactaggagcaagtcaaaggagaggaaaaaatctaaaagcccatccaaaagaagtaagtctcaagatcaagcaaggaaatcaaaatcccctacccttagaaggcgatctcaagagaaaattggtaaggccagatctcctactgatgataaggttaaaattgaagataaaagtaaatcaaaagataggaaaaaatccccaattataaatgaaagtagaagtcgcgatcgaggtaaaaaatccagatccccagttgatttaagaggtaaatccaaagacagaaggtcacggtccaaagagagaaaatcaaaacggtctgaaactgataaagaaaagaagccaattaaatctccctctaaagatgcttcatctgggaaagaaaataggtcacccagcagaagacctggtcgtagtcctaaaagaagaagtttgtctccaaaaccacgtgataaatcaagaagaagcaggtctccacttttgaatgatagaagatctaagcagagcaaatccccctcgcggacactgtctcctgggagaagagccaagagccgatccttagaaagaaaacgacgagaaccagagaggagacgactttcttctccaagaacacgacctcgagatgatatcctcagtagacgtgaaagatcaaaagatgccagccccatcaatagatggtctccaacccgaagaagaagtagatctcccattagaaggaggtctcgttccccactcagacgtagcaggtctccaagaagaagaagcagatctcctcggagaagggacagaggtcggaggagcagatcacgcttgcgaaggcggtctcgatcacgcggtggtcgtagacgaaggagcagaagcaaagtaaaggaagataaatttaaaggaagtctttctgaaggaatgaaagttgagcaggaatcttcgtctgatgataaccttgaagactttgatgtagaggaagaagatgaagaagccctaatagaacagagaagaatccaaaggcaggcaattgttcagaaatataaataccttgctgaagatagcaacatgtctgtgccatctgaaccaagcagcccccagagcagtacgagaacacgatcaccatctccagatgacattctggagcgagtagctgctgatgttaaagagtatgaacgggaaaatgttgatacatttgaggcctcagtgaaagccaagcataatctaatgacagttgaacagaataatggttcatctcagaagaagttgttggcacctgatatgtttacagaatctgatgatatgtttgctgcgtattttgatagtgctcgtcttcgggccgctggcattggaaaagatttcaaagagaatcccaacctcagagataactggaccgatgcagaaggctattatcgtgtgaacataggtgaagtcctagataaacgttacaatgtgtatggctacactgggcaaggtgtattcagtaatgttgtacgagccagagataatgcaagagccaaccaagaagtggctgtaaagatcatcagaaacaatgagctcatgcaaaagactggtttaaaagaattagagttcttgaaaaaacttaatgatgctgatcctgatgacaaatttcattgtctgagactcttcaggcacttctatcacaagcagcatctttgtctggtattcgagcctctcagcatgaacttacgagaggtgttaaaaaaatatggtaaagatgttggtcttcatattaaagctgtaagatcctatagtcagcagttgttcctggcattgaaactccttaaaagatgcaatatcctacatgcagatatcaagccagacaatatcctggttaatgaatccaaaactattttaaagctttgcgattttgggtcggcttcacatgttgcggataatgacataacaccttatcttgtcagtagattttatcgtgctcctgaaatcattataggtaaaagctatgactatggtatagatatgtggtctgtaggttgcaccttatacgaactctatactggaaaaattttattccctggcaaaaccaataaccatatgctgaagcttgcaatggatctcaaaggaaagatgccaaataagatgattcgaaaaggtgtgttcaaagatcagcattttgatcaaaatctcaacttcatgtacatagaagttgataaagtaacagagagggagaaagttactgttatgagcaccattaatccaactaaggacctgttggctgacttgattgggtgccagagacttcctgaagaccaacgtaagaaagtacaccagctaaaggacttgttggaccagattctgatgttggacccagctaaacgaattagcatcaaccaggccctacagcacgccttcatccaggaaaaaatttaaacaagatgaagaaactccaagggtttgagtaaatacaaagactgaagaaatttcacagcagtttattaatgtatataaacttataaatatttctccagcaaatttgaggaagcatgatatatttgaattaacaccaagggtgatatttcttttagagatgttagttaatctgttttgtgtcttacgtgaaatttcactgtagactgttttaaattgccaagactgcacaaaattacagtgctaatgtatatggttgcagttcacataaagacaaaagcatctgttatgaaatgagtagtaatattgggtggttgatttgttcttagcagacttggcttcattttggtcttgagataaaatggccagcataaatgctgtttatattcacgttttcctaggtgtgtgtgtgcaggccacagcagcatgcccttggtgtagtcagtgccgaaaggggtctgttccttcttgagcctgcctgcagggatggtctccttttaaagcaggttgtgtgcagcattcagtacactgaaggtaagctaaaccatcaacatctctggtgttttaagatgttattttattggaacaactgacaaatgagggatgttagctttgtggcagaattccctgcatgtgtgataactgatcttgttttattttttggcattgcaactgtggcatagttacaatttctgtttgttcatcacatttaaaattggaagagaacgcgcttgatggatagagcgccttcagtgtactgtttcttattaactttactttttttaaatcaacttgctatagactttatatacattttgttaaatatagttcctagtgacatagaaacgatgcgtagttttcatttactaattacaaatgttgaggcctaattctgaaagtcctcatatttaaaggctagacaacgtaatgaaatttttaactatttgtatgtcattttgaaagtgtactgctttatggtaaaagtgtttttcatttgttcattgttttcattatttgtgatcatgttgtctttcaatacaggcataaaccttccactcttgaacaaagcagctgctttttaaaagcggtaattgcttctttaccttttatttcttttgtaaatgaagcttttctttaagaatgtgactttaaagtgttgtctattgcataaaacagttgacactcacttattgtaaagtgaagattgttctactgcatgtgaagtggaccatgcagatttctgtatgttctcagtatgcatcactagataataaagtcttttgtgaacaaggcatttgtagccatttttaaaagtttttgtcttcagtgctggtaagtcaggtaaaccataaatagttaaaagcaaccttttgtttttttcctgaaagtttttaattgaaagtattattagttaaagatgtaaacctagccaaaattaccagtttattaataattaggatcctaattatttcaaaaaatcctacaaatattgtcagctttcagtgtagtgagattattcctgtaggttatggggtataattcaggatttaactaatgtttctgctattttctcacttttccttttgatggtgcggaaagagaaaaaggaaaacggggcacaggccattcgacgccttctccaaggggtctgatttgctgagacaccagcttcaccttcttaacaaggttatttctgacagcatgtgtagataaacatttagcaacaatttaagacaaaatcgtttaaatcagcttggttttgcaacacaaaggaatttgtattattaacatggtagaagagaatttttcagaaatatatgtaatctttgctgtttggggggtaaaattaatgcttgtctccctgaggaatatggaaaataatcagattttaggggtttaaataatatttttaaattgtaaatgggatttttttattcacccaggcacctaattacaacaagcatgcacattttggtgcattcaagaatggaaaatcagaatagcagcattgattcttctggtgggttttgctccatttaaagacatgaaatgaactacagccaggaaggtgatagatgatataataagccacctctgaacctacaccccgtctcttcacggtttagacttactaaaataaatacaaggtgattttcatcttcaggtagagtgaagccttttaattaaggcgtcacaggtgcagctattctaccttaatgaaatgggtagtgattttcccaccattatttatttcggtgataatatgctgcatattcaagtctcttgtagttattttcacccaaagtagttgacaatttgatgcttctggtgatgtttatggcttcattttatgtaattttttaagtaagttccactagaaacagttcatcttataccttcaaaactgttacctgttctttaaaaaacaaagttgcttgttacttgttctttgtgttttaggtgcagctcagtggaagatgatgacaaccagaagacatgagctaaggtttctgtcctataaaagatttattaaaaaacaatccttcatttattttttgtctaattttttagttttcagcattatgatttgggttttattggtgtttggtatttagaattagtgctgttgtggagtgcgtctgtaaagtgcttgttttatcatacttcctgcctctcccctcccccagtttctcctcccctaaaataaaaatagtggtcaactttagtaatataaaaggctgctggatgctgagattccacataacacatggttgtcaaaattggatgttaaggattcttagaaaaacagcaaccaccagaatagcatatatctgaaagtagtcttcagctttaggcagatgcaaaagaatacaaactggaatattaagaatactgttcaactcctttagtatctgttccccaacttaccctgtagaaacctcgttattaaccagtgttccagtcttaaagtagacaaaatattcagagccattttttttaagggaaatgaaaaagatactctgggttttttatactccccaatttagcatatctagactacctatttgaaaggaaccctatcaactgtcttatgtacgttacatgattttcctacactctgtaattttgctgaggtgcaatttggaactctgcaagacctactagattgaatttatttagtgaatgctcctgaataaatgtgcattcctcttttagagtagctgtatgcttttcaaatgctatctgccgtgaattttttgcttttattatactttatggcaaaagtgatatcaagtgattgtcagacttgagggctcatagaagtgttaggtacggctctcaaagatgttacagttttttctagggttgggagaatagttgagatctggaaagcatagacattttttacactctggatagactttattcttgaagatcatcagaaatgaggttggaatttcgaggttttgagcagggggagcatcttatattcacccttaaatcgttattaatacatcctgttttcttcattccctgatagctatctcatttcactctactgtctcaaaattttgttttaaaataatagaaatgttttgccattattaagtaccactttattcctaacaaaaataagtactcaggacttttttttcaaaatgaaatatttatgtactgttttatggtatgtggtagagtaagtaaaatgtaatgttctcagttttgttccatatttgcattcctcttatgctttacctgtattttatcatttgtaagcagaactctagctatatggggtagaaataaaatctctgagatgaaacaaaggaatcaacatgataaaatttaggcgaagtagttaagaaatggcccttttgaatgttgaagataggaaagaaagccatatattcaaatatgtaattttcctcatttagttataatgacatctttaccaattgggcttcataaatgtgtttctttcttaatagtatcctagttccagcatatattcaacatgaattttatcattctcctcctaatggaatgtcttccttatagaaatgttcacgacaaattcatttgtgttttttacatgtcaataatgtatgctaaattaaaatgttttccagttattctgatagatgtcattatggcatccttaatttttcttctccttctgtatatagggtaagggactgttctgaagaacctttccatttagtgatcaagatatggaagctgatttctgaaaatgctcagtgtgtactctaattatttatggtaccatttgaattgtaacttgcattttagcagtgcatgtttctaattgacttactgggaaactgaataaaatatgcctcttattatca

SEQ ID NO: 2194 - DNA, 1965 bp, Homo Sapiens
  NM_003914
aacagacgcgggtgggcagctcagccgcatcgctaagcccggccgcctcccaggctggaatccctcgacacttggtccttcccgccccgcccttccgtgccctgcccttccctgcccttccccgccctgccccgcccggcccggcccggccctgcccaaccctgccccgccctgccccgcccagccggccacctcttaaccgcgatcctccagtgcacttgccagttgttccggacacatagaaagataacgacgggaagagcggggcccgctttggggtccaggcaggttttggggcctcctgtctggtgggaggaggccgcagcgcagcaccctgctcgtcacttgggatggagaccggctttcccgcaatcatgtaccctggatcttttattgggggctggggagaagagtatctcagctgggaaggaccggggctcccagatttcgtcttccagcagcagcccgtggagtctgaagcaatgcactgcagcaaccccaagagtggagttgtgctggctacagtggcccgaggtcccgatgcttgtcagatactcaccagagccccgctgggccaggatcccccgcagaggacagtgctagggctgctaactgcaaatgggcagtacaggaggacctgtggccaggggatcacaagaatcaggtgttattctggatcagaaaatgccttccctccagctggaaagaaagcactccctgactgtggggtccaagagccccccaagcaagggtttgacatctacatggatgaactagagcagggggacagagacagctgctcggtcagagaggggatggcatttgaggatgtgtatgaagtagacaccggcacactcaagtcagacctgcacttcctgctggatttcaacacagtttcccctatgctggtagattcatctctcctctcccagtctgaagatatatccagtcttggcacagatgtgataaatgtgactgaatatgctgaagaaatttatcagtaccttagggaagctgaaataaggcacagacccaaagcacactacatgaagaagcagccagacatcacggaaggcatgcgcacgattctggtggactggctggtggaggttggggaagaatataaacttcgagcagagaccctgtatctggctgtcaacttcctggacaggttcctttcatgtatgtctgttctgagagggaaactgcagctcgtaggaacagcagctatgcttttggcttcgaaatatgaagagatatatcctcctgaagtagacgagtttgtctatatcaccgatgatacatacacaaaacgacaactgttaaaaatggaacacttgcttctgaaagttctagcttttgatctgacagtaccaaccaccaaccagtttctccttcagtacttgaggcgacaaggagtgtgcgtcaggactgagaacctggctaagtacgtagcagagctgagtctacttgaagcagatccattcttgaaatatcttccttcactgatagctgcagcagctttttgcctggcaaactatactgtgaacaagcacttttggccagaaacccttgctgcatttacagggtattcattaagtgaaattgtgccttgcctgagtgagcttcataaagcgtaccttgatataccccatcgacctcagcaagcaattagggagaagtacaaggcttcaaagtacctgtgtgtgtccctcatggagccacctgcagttcttcttctacaataagtttctgaatggaagcacttccagaacttcacctccatatcagaagtgccaataatcgtcataggcttctgcacgttggatcaactaatgttgtttacaatatagatgacattttaaaaatgtaaatgaatttagtttcccttagactttagtagtttgtaatatagtccaacattttttaaacaataaactgcttgtcttatgaccatgtgttaga

SEQ ID NO: 2195 - DNA, 5154 bp, Homo Sapiens
  NM_003920
tcgcgcaggcggggaccggtccagctgagcctggtggcggaaaggctgcggccccgcgccagagggccggtggctcctccgggcttctgaggacccgcagggagcgggcctcatcatttctgtctcctgtttctccacttccttctctattggttggtccactgatgtatggacttgcacatgatgaactgtgaacttctagccacatgtagtgcccttgggtacttggagggagacacttaccataaggaaccagattgcttagagagcgtgaaggatctgatccgctatttgaggcatgaggatgagacacgagatgtgcggcagcagctgggggcagcccagatcctacagagcgaccttctgcccatcctcacccagcaccaccaggacaagcctctctttgatgctgttatcagactgatggtgaacttgacacaaccagccttgctctgttttggcaatctgcctaaggagcccagctttcggcaccattttttgcaggtgctaacttatttgcaggcctacaaagaggcctttgccagtgagaaggcttttggagtcctcagtgaaaccttgtatgagctgctgcagctgggctgggaggaacggcaggaggaagacaacttgctgattgaacggatcctactgctggtcagaaatattctccatgtcccagctgaccttgatcaggagaagaagattgatgatgacgccagtgcccatgaccagctcctctgggcgattcacctcagcggcctggatgacctgctcctctttctggccagctcgtctgctgaggagcaatggagcctacatgtgctagagattgtctcccttatgtttcgtgaccagaaccccgagcagctggcgggagtagggcagggacgcttagctcaggagcggagtgcagattttgcagaactggaggtgttgcgccagcgagagatggcagaaaagaagactcgagccctccagcgaggcaacaggcattctcgatttgggggctcctatattgtccaggggttgaaatccattggggagagggacctcatctttcacaaaggccttcacaacctacgaaactacagttcagatttgggaaagcagccgaaaaaggtgcctaaacgtcgccaggccgcccgagagctgtccattcagcgccgttctgccctcaatgtgaggctcttcctcagagacttctgctctgagttcctggagaactgttacaaccggctcatgggatcagtaaaggatcacctgcttcgggagaaagctcagcagcatgatgagacctattatatgtgggccttggctttcttcatggccttcaaccgagctgcctccttccggccaggcctggtttctgagaccctcagtgtccgtaccttccacttcattgagcagaacctcaccaactactatgagatgatgctgactgaccgcaaggaagctgcctcctgggcacgccggatgcacttggctctgaaggcctatcaggagctgctggcaacagtgaatgagatggacatatctccagatgaggctgtgagggagagcagccgcatcatcaagaacaatattttctatgtgatggagtaccgagaactattcctggcactttttcgaaagtttgatgagagatgccagccccgctctttccttcgtgacctggtggagaccacccacctcttcctcaaaatgttggagcgattctgtcggagccgtgggaacctggtggtgcagaacaaacaaaagaagagaaggaagaagaagaagaaggtcctagaccaggccattgtttctggtaatgtcccatctagcccagaagaagtggaggctgtgtggccagccctggctgagcagctacagtgctgtgcccagaattctgagctcagcatggactccgtggttccctttgatgcggcctcagaggtgccagtggaggagcagcgggcagaagctatggtacggatccaagactgtctcctggctggccaggccccacaggccctgactctcctgaggtctgctcgggaggtgtggcctgaaggagatgtgtttggctctcaagacatttctccagaggaagagatccagttgctgaaacaaatcctctctgctccacttccccggcagcagggcccagaggaacgtggggcagaggaagaagaagaggaggaggaggaggaagaggaggagttgcaagtggtccaggtgtcggagaaagaatttaattttctggactacctgaaacgctttgcatgttcaactgtcgttcgagcctatgtgctgctactaaggagctaccagcagaatagtgcccacactaaccattgcattgtgaagatgctgcaccggctggcccatgacctcaaaatggaagccctactttttcagctgtcagtcttctgcctcttcaatcgtctgcttagtgaccctgctgctggagcctacaaagagctagtgacttttgccaaatacatcctgggcaaattttttgcactggctgcagtcaaccaaaaagcctttgtggagctgttgttctggaagaacacagctgtggttcgagagatgactgagggctatggctccctggatgacaggtcttccagtcgcagagcacctacatggagccccgaagaagaggctcatcttcgggagctgtacctcgccaataaggacgtggaagggcaggatgtggtggaagccatcttggcccacctgaatactgttcctcgaacacgcaagcagatcatccaccatctggtacagatgggactggctgacagtgtcaaggacttccaaaggaaaggaacccatattgtactgtggacgggggatcaggagttggagctgcagcggctttttgaggaattccgggactcagatgatgtcctgggtcatatcatgaagaatatcacagccaaacgctcacgggcccgaatagtggataaactcttggctctggggctggtggctgagcggcgggagctgtacaagaaacggcagaaaaagttggcatcctccatcttgccaaatggagcggagtccctgaaagatttttgccaggaagatctggaagaagaggaaaacctgcctgaggaagacagcgaagaggaagaagaagggggctcagaagcagaacaagtccagggtagcttagtcctttcaaatgaaaaccttggtcaaagcctgcatcaggaaggcttttctatcccgctcctatggctccagaactgcctgatccgagcagctgatgatcgggaagaggatggctgctcccaggccgttccattggtgccactcacagaggaaaatgaggaagccatggaaaacgaacagtttcagcagctgttgcgcaagctaggggttcggccccctgcctctgggcaggaaaccttctggcgaattccagccaagctgagtcctacccagctccggagggcagcagcttctttgagtcaaccagaggaggaacagaagctgcagccagagctgcagcctaaagtccctggagagcaaggctctgatgaggagcactgtaaagagcaccgagcacaagccctgagggccctcttgctagcccacaagaagaaagcgggcctggcatccccagaggaggaagacgctgttggtaaagagccgctgaaggcagcacccaagaaacgacaattgctggacagcgacgaggaacaggaagaagatgagggcaggaacagagcaccagagttgggagctccaggaatccaaaagaagaaacgataccagattgaggatgatgaggatgactgaagagctaagaagcctaggggtagagatagacacgtttttagatggtgcattcaagtcagagttggaagggtcatacaggacccagaagctcctcttactggacagagcagtagaatcccaggctctttcacggatttaggctgagaaacttcagcagcagtattggacttctctgctgtcagtctttgtttctcccagtttttatcggtatgccccagcagctctctggagatttagttctcttcttctaggaaccatttcttttggttattggagctccttagcaaataagaggagtgagtgaaatagagaaagcaccccggaccccttttattggtctgttcctttggctttctcttggaggtgggtcgcagcaccagatggggagctttatgacatgacaggcgggagttttgtaccacttttagaagataccagatgcctctgtcctcattttgtttcctatgatcatcctctagataccagatagaggcccattcctgcatttgagatagggttggaatatagtactctagatgatgaatgtgtttgctttgtgtttggtattaaacatgtaagattagaagttctcatctcagtctgacttggcgatatgtctaagttccccagcccttcccctgctgtgctcttgaaagaagaacttaacaattttagggtaaaaagagaccaacagaccggcacagtggctcaaacctgttgtcctagcactttgggaggctgaggcgggcggatcacctgaggtcaggagtttgagaccggcctggacaatatggcgaaatcccatctccactaaaaatacaaaaattagccggccatggtggcatgcgcctgtaatcccagccactcgggtggctgaggcaggagaattgcctgaacccaggaggcagaggttgcagtgagctaaggtcacgccagtgcatatgcctgggcgacagagcaagactctgtctcaaaaaaaaagaaaaaaaaaaaagaccaacaaccttcccttttcttccgctttccctacagaagacacagaaaagcatttttgcctctagatccttttgtctagggtaaattcttagggtgacaagagtatgcggcaggaagaaggaggagccataaaggaagagaagccagcttgttggcatggggcatagaaaaggacaaaatctaggcatgaaaaggatggataaatactgcaaatattatgttcttacccattcttggaaacgtcagctttcttgcttcctgtgcttccagccgaggtagggcaaaggtgagattgagaaaatagccattcagctcaggaaggcttctaagtaaaggatggatttggaaaaaaaaaaaaaaaaa

SEQ ID NO: 2196 - DNA, 2559 bp, Homo Sapiens
  NM_003926
gcgggccgaggagccgggcgcaatggagcggaagaggtgggagtgcccggcgctcccgcagggctgggagagggaagaagtgcccagaaggtcggggctgtcggccggccacagggatgtcttttactatagcccgagcgggaagaagttccgcagcaagccgcagctggcgcgctacctgggcggctccatggacctgagcaccttcgacttccgcacgggcaagatgctgatgagcaagatgaacaagagccgccagcgcgtgcgctacgactcctccaaccaggtcaagggcaagcccgacctgaacacggcgctgcccgtgcgccagacggcgtccatcttcaagcagccggtgaccaagattaccaaccaccccagcaacaaggtcaagagcgacccgcagaaggcggtggaccagccgcgccagctcttctgggagaagaagctgagcggcctgaacgccttcgacattgctgaggagctggtcaagaccatggacctccccaagggcctgcagggggtgggacctggctgcacggatgagacgctgctgtcggccatcgccagcgccctgcacactagcaccatgcccatcacgggacagctctcggccgccgtggagaagaaccccggcgtatggctcaacaccacgcagcccctgtgcaaagccttcatggtgaccgacgaggacatcaggaagcaggaagagctggtgcagcaggtgcggaagcggctggaggaggcgctgatggccgacatgctggcgcacgtggaggagctggcccgtgacggggaggcgccgctggacaaggcctgcgctgaggacgacgacgaggaagacgaggaggaggaggaggaggagcccgacccggacccggagatggagcacgtctagggcaggtgctgcggggccacgggggctccctggagtcgggtcctggcagtggggactgcctggtgaacacagatgtgcttgggatgacgggtgcctcccaagagcttcccatctccctagaagagcccaagcgtccccgtcccgtggagtcgctaaagccagccctccctgtcctttccagaggccctgccgagagcccgtgctgcctgctggagccgcctgcagacgcggtcctcggccccacgtgaaccaggctcggcggcgaagcccagccttggagacacccaggaggaaggccgtgctcctggctccctcctcggcccgtccccacttcccggggcctcggggcacacagctggggctgcccccacccgaaagaccctccacgctcgtcctctacagagtccggcttcgggaagtgccgggtgctcctgggccctgcctggctccctacgacctttgggctcgaggccagctcctccccatgcccgctgtcccagctccttgagactggagagcagccagcaggtgcccggcagctcggcgccacggcttgctgacagctgggagggtttctcggtctggaggcgtagttttgaaactcacatcacccactgtgcagcgtgaggacgggactctggtctgctgtggggggcatgcaggacggcgccactctctgccctgccatgcggctggtggtgccacagagcctcaccgtgcctgagtggcatgcccaggaggccgctctccttcagtaaatgtaacacagtcgaggcacgtcatcgggcagccttccctgtgtgccaacgccagccttcgcttctgaaaaccaaactccagccgctgccagtcgggacttggtcgcccggcgctgccagaatgctccactgccagccggcccccctgcctcggtttcccttctgtttagtggcgacacaggcacccagctttggggtggtgctgacgctcccaggggtgccaggagccactgggacagggtgaggctcccagacgctcctcgaggtgcccagctctccagggagcttctggcccaaggccgtctgagggatctgctccttaaccccccagtgccttggcgagggcaggttccaagccacagacgcctgccccgagtggactctgcggccagtccctggtgccctcctggccctgctgcccagtgagggctcctacgggtgggttcattggcctgggcccagcgagcccccacctgcattgaccttaggcccatagagagggcctgtcccggtgctgccccagccaggatctggtcgctgccccagggggactgatgggcagagtcgcccctgtggctggactgtgaccatccctgatggggcctgaccgcgggagctgaggaagcgccgctccaccgtctgccctccaaggacccgcatggaggcagtgggctggcagcttcctgctgctccctgtcagagtcaaagcacaaatcctcaggacgggctcaagggccagggcagccgagggaagctccaggtggggaccacgtcttcctgaggttggtgcccactggctgggaccctttgcagtggggtggcctcccctctgtctgcctggtggagggagccgtgggcgtggggacgtgactgaataaagccaccatgggtggatgtgcttgg

SEQ ID NO: 2197 - DNA, 5190 bp, Homo Sapiens
  NM_003927
gggggcgtggccccgagaaggcggagacaagatggccgcccatagcgcttggaggacctaagaggcggtggccggggccacgccccgggcaggagggccgctctgtgcgcgcccgctctatgatgcttgcgcgcgtcccccgcgcgccgcgctgcgggcggggcgggtctccgggattccaagggctcggttacggaagaagcgcagcgccggctggggagggggctggatgcgcgcgcacccggggggaggccgctgctgcccggagcaggaggagggggagagtgcggcgggcggcagcggcgctggcggcgactccgccatagagcaggggggccagggcagcgcgctcgccccgtccccggtgagcggcgtgcgcagggaaggcgctcggggcggcggccgtggccgggggcggtggaagcaggcgggccggggcggcggcgtctgtggccgtggccggggccggggccgtggccggggacggggacggggccggggccggggccgcggccgtcccccgagtggcggcagcggccttggcggcgacggcggcggctgcggcggcggcggcagcggtggcggcggcgccccccggcgggagccggtccctttcccgtcggggagcgcggggccggggcccaggggaccccgggccacggagagcgggaagaggatggattgcccggccctcccccccggatggaagaaggaggaagtgatccgaaaatctgggctaagtgctggcaagagcgatgtctactacttcagtccaagtggtaagaagttcagaagcaagcctcagttggcaaggtacctgggaaatactgttgatctcagcagttttgacttcagaactggaaagatgatgcctagtaaattacagaagaacaaacagagactgcgaaacgatcctctcaatcaaaataagggtaaaccagacttgaatacaacattgccaattagacaaacagcatcaattttcaaacaaccggtaaccaaagtcacaaatcatcctagtaataaagtgaaatcagacccacaacgaatgaatgaacagccacgtcagcttttctgggagaagaggctacaaggacttagtgcatcagatgtaacagaacaaattataaaaaccatggaactacccaaaggtcttcaaggagttggtccaggtagcaatgatgagacccttttatctgctgttgccagtgctttgcacacaagctctgcgccaatcacagggcaagtctccgctgctgtggaaaagaaccctgctgtttggcttaacacatctcaacccctctgcaaagcttttattgtcacagatgaagacatcaggaaacaggaagagcgagtacagcaagtacgcaagaaattggaagaagcactgatggcagacatcttgtcgcgagctgctgatacagaagagatggatattgaaatggacagtggagatgaagcctaagaatatgatcaggtaactttcgaccgactttccccaagagaaaattcctagaaattgaacaaaaatgtttccactggcttttgcctgtaagaaaaaaaatgtacccgagcacatagagctttttaatagcactaaccaatgcctttttagatgtatttttgatgtatatatctattattcaaaaaatcatgtttattttgagtcctaggacttaaaattagtcttttgtaatatcaagcaggaccctaagatgaagctgagcttttgatgccaggtgcaatctactggaaatgtagcacttacgtaaaacatttgtttcccccacagttttaataagaacagatcaggaattctaaataaatttcccagttaaagattattgtgacttcactgtatataaacatatttttatactttattgaaaggggacacctgtacattcttccatcatcactgtaaagacaaataaatgattatattcacagactgattggaattctttctgttgaaaagcacacacaataaagaacccctcgttagccttcctctgatttacattcaactctgatccctgggccttaggtttgacatggaggtggaggaagatagcgcatatatttgcagtatgaactattgcctctggacgttgtgagaattgtgctttcaccagaatttctaagaatttctgctaaatatcacctagcatgtgtaattttttttccttgcctgtgacttggacttttgatagttctataagaataaggctttttcttcccttgggcatgagtcagatacacaaggacccttcaggtgttactagaaggcgtccatgtttattgttttttaaagaatgtttggcactctctaacgtccactagcttactgagttatcaggtgcaggtcagactcttggctacagtgagaggcagcttctagacagagttgcttaatgaaagggtttgtaatactttacaaaccattacctgtacctggcctggcctccaaaatattaacattctttttctgttgaaactcgcgagtgtaactttcataccacttgaatttattgatatttaattatgaaaactagcattacattattaaacgatttctaaaatcaaaacatacttaatctgataccaaggaagggagggagtggttataagcaaatgaaaacaaattttgagagacagagcaaaagtaaaatcattctatagaaaaggtgtgtttatttcttaactcttgagttcttttaaaattagaacctaaatgatgcagtcaggggtatgaccaattccacatgagtgtcacctgtacattttattaccactacctccagtttccaaggcagggaagaagaggggaatagtcaaagcaatatgactagctaggtttgggctgctgtttgggctgctgtttttcctggacttttatgccaaactacataaatacttcttggaattcctgatttacgctcaactttgatccctggaccctagggccattagtttccttgaagcagtcctgctggtggatgagcagggaaacttgtagaccctgggaagccaattggtagagggtgcctgcccgccccatcagactgtcccaactggggtgggggtgaggatcatagtgatttctttttaaaagctagtatgactagtgagaatggatgtccaagggcttttctcttcctcccccgagtccacgattcttcatttgtgatcagggttggggtaacttcaccttggtgatcatatattctttttacaaaccaatccagccaagatatatgtgcttttctaaacagcttgtaaaagcaaaaacacaatgtatacacatataaaactgatttttttttttttgcttatatactttgctcaggtggagaacaaggtatgaaagccattatatggtgtcccttggggaccatcccataagtccagggtgttcccaatatacccacaagacaacatgttcaaaacttcatcacctggtccccacaaacctaccaccctcttccattccctcactctggtaaaagcaagccatcttctccagttacgcaaggcagaagcccaggagtgagcacaatgctgccctttcccttgcttctgacttctcatcaatcctattagaactactgactgcaccccacctctcctccatccccacgatcactgccttcatatgaactgcctttcctgtcctctggactttcagtggcttccttttttgctcacctgtccactttcttccccttccctctctccatccctccacatagtcatcagaaagatcatcaaaacaggcaaatgtgactgtattatttccctcacttatctttgtatgcagtttagagtgatttttaagagcacacactttgaaattaggagaacctgtgtctgaatcctgatttttgccatttgtgtgacttgtcaggttatttaatctctttgagcctgtccctcctcagtgaaataggaataataatacctacctcatagagttgttgtgaggattcagtgagatagactgtttctaaagtgtgtagcacagtgcctggcacatagtgggtgctcacattggagcacactattgtcgctatccctgcaggtgtgagttttacatcctttccaagaggcatttgctaataaccctaactaccgcctatccctgtgacactattttctgcctcagcaccctatttcttttgtagacattttctaagtctgtattttatttatttgttggctttttgtctatttctctactagaatgtaagctccatgagagcaaggatgtgtttgtctgatttcccgttacagccccagcacttagctgagtgactggcacctagtaagcactcagtaactgtttgctgaataaatggaagaatggtcaaaaggctcttcttgatctgatccctgcttgtctgtctggcctcatgctgccactattcctcactgcaccttcagctcaagaaaaacctctttacttgcttctttgaagtgccccttgggcctctgtgtctttgtacctgttgttccctttgcctgaaacaccctttgcctgcccgtctacatggtgaattcctaatcattgatgaagtctcagctcaatggctacctcctctgtgaagctgtccctgatttcttcaggcagatgttctttcccgccttccctgttcccaccgcactttgtaaatacctccatggaagcactttattgtattgtattgtaatttttttttgcatgtctgtttctactattagactgtaagcaccgtaaaagcagagattgtgctttttcatcctcatgttccccgagcctagcccagtgcctggcacgtaatagcttgtcattaaatatttgttgaatgaatctgtgaatgaacaagagtcatgcagttggaaaagtgttagaagctgtatgtattataaaggaaagaaatgcccttggtggcttccagggtgtttttttttttttttttggtctaaagaggagatctagagagtgttatacaatctctttgaatataagattactcgtttggatttttaaaataatatagatcttcataaataattgcaaagatataaacaagctttgtgatttctcaaatgctatgaagtccaaaataaatatttgcactattagtatttccatagtaaatgctatgagaaaatgtacagcaataaattttgaagctttaaaactgttaa

SEQ ID NO: 2198 - DNA, 3984 bp, Homo Sapiens
  NM_003930
ggaaaaccgaggaatacacatgcgcagttggacccctcaggcccttcgtgtcccttcccacccatctccccgccccggccctctgggcggggctgggccgacagtccagctgcagctcgctggagattcagtgacttccttgttgtgagccccggcccggcagtgtcccgactcgtagccccgctgttcttaatccgggccgctagcctgagtctaggtcgcagccgcagccccaccccgtcggtcaccttttcagcgcaggtcctttccccgcacgccctgcgctccctaacatgcccaaccccagcagcacctcctctccctaccccctccctgaggaaattaggaacctgttggcagatgttgaaacatttgtagcagatatactgaaaggagaaaatttatccaagaaagcaaaggaaaagagagaatcccttattaagaagataaaagatgtaaagtctatctatcttcaggaatttcaagacaaaggtgatgcagaagatggggaagaatatgatgacccttttgctgggcctccagacactatttcattagcctcagaacgatatgataaagacgatgaagccccctctgatggagcccagtttcctccaattgcagcacaagaccttccttttgttctaaaggctggctaccttgaaaaacgcagaaaagatcacagctttctgggatttgaatggcagaaacggtggtgtgctctcagtaaaacggtattctattattatggaagtgataaagacaaacaacagaaaggtgaatttgcaatagatggctacagtgtcagaatgaataacactctaagaaaggatggaaagaaagattgctgttttgaaatctctgctcctgataaacgtatatatcagtttacagcagcttctcccaaagatgctgaagaatgggtacagcagctgaaatttgtattgcaagatatggaatctgatattattcctgaggattatgatgagagaggagaattatatgatgatgttgatcatcctctaccaataagcaatccactaacaagcagtcaaccaatagatgatgaaatttatgaagaacttccagaagaagaagaggacagtgctccagtgaaagtggaagaacaaaggaagatgagtcaggatagtgtccatcacacctcaggggataagagcactgattatgctaatttttaccagggattgtgggattgtactggagctttttctgatgagttgtcatttaagcgtggtgatgtgatttacattcttagcaaggaatacaatagatatggctggtgggtaggagaaatgaagggagccattggcttggtgcctaaagcctacataatggagatgtatgatatttgagagtcctggaaaaggaaaattcttctgcttgtctgcaaatgctttggatttagaagcgtcatgaaagcacgagtgacagctcctaacctctccttgttttattaaacattacttatctttgactgttattttatgcagtcgctcattaaaatattcctctgatgtgaaattaaatgaaggatattaatgtaaattagatgcaaccagttaagttatacctgttgctattttgcaaagaaataattatagtttttatttacccatttgatttgtgtgaagaattcatcactattttatacgtaacatatagtctactatagcatagtatgctactattgctacttctggtgtgatttgtaatgtttcttaatcattggacatcaattatttttagagagtaatgtataatttcatagcattttaaatttagtgtatcatgcgagttttttttggtagatgctgaagaatgtggttgctaaacaaagaatgctaaagaatgttcaaactttatagataactttattgttattatttattttcacacatttaattcctattaagtacagccgcaagaaagaaaaaatgatgaagttgcaaatggcagtgtgctgtcacctgcaacagaagtgcgtaccagaagtatgactcatgcaaagcattttaccgtacaaatatcctggtgcgatgatgggcctggcaacattttctactgtacttttgtttaaatttaatgaaacaaaaaattcctaagaaataccaccctaccactaacaaaatggtataaagaatctcccagccaggccaacatggtgaaaccctgtctctactaaaaattagccaagtgtggtaatgttcacctgcagtcccagctacttgggaggccaaggcacgagaattgcttgaacaaggtaggcagaggttgcagtgagccaagatcgcgccactgcactccagcctgggcgacagagtgagactccatctcagaaaaaaaaaaaaaaaaaaacagaatctcagtgtattctcaaagtaaaaaggcataaccaagcactctcttatcttgccttattgctatactatttacatcccactgcagaacagcagatttgaggcttttctatatacttctcagagcactgaaaagaaaggaagggtttgcagaggagagtgtagaaatcccagtggtagcatgtaccaacaggtgagtagaaaggtagtgttagcctgacatttgagttatactctgtgctgcctgagcaagatttgtagaatcatataattaccttttcatgtatatttgaaatcagaggtgtttaaaatacctatgagataccaatgtagccttaacatatgtcaaaatgcattgctggttagataattatttggactacacataaactcctaatattgaatcattacctatcaggtattatctttatggaacttttcaatatctttgctttataaagattctaaacatgtatctgagctggtaatattttaaaatctccattatttgtgtaaaactgtttataagcagtgtttgagagggtctgctttaccattaccccctcaatatcatgatcatccaatctcaaatgtgaaaaaaaaaaagaaatttgattttaggtattgtgagtaaacaagtttatatagagagacattgtgaagttaaagttttcagaagttacatttgtgcagttcttaccttttcctcatatagtgccattgaaatagactgaaattatcttggcaaaagttagacaaccaaagacgactttagtggactggttttcaaaacttgagcagctgaaaagcaaaagccgttgtttcccatgacaatgtagcctttgtggatttgggtttgtgctttgggttgaaaagaagtttttagtcctaggccagtagatggcagcagcttttcattgcagacaaaacctcttgaaacccttcccccatggcacaaactcgcccatgatggaaagcatctagatttctgcctccttttacagttaatccaggagagggagtcctttgccaactgatgaccaacagttccaagccagatagtctcgtgaacagtgacaatacagaaataaggtgttatttctgttcagatctccaccggcctttgttcttttaaaacttgaatataggtgggagacataagaaaggaaagaaaagacttaaaactggagtgacaggacaaataatcattactttcaattcatgactgctttatattcatttgatgaaatcatttgtatacaaaccagggagagttttctttacacccttgacaatatatcacatactcttcaagatcataataatatcattaatataaatttaaacaacatggcttgttagaaaatatgctaattgctatggtctcattatgtttgcttagcttttatttgtttttctgtgaacagttagagagctaatttttttcaaaggtgattgtaagtcatattttatatagcattttgcttgattatttgctctgtactgaatttgtactctattgccattagatcttacaataatgttccactctgcaaatttttaaggttcaaataaagtttaattgtttgcaaaaaaaaaaaaaaaa

SEQ ID NO: 2199 - DNA, 3175 bp, Homo Sapiens
  NM_003934
tttccttttccggctacgggtccccaagcggagcgggaggccggaccggggagccgagcggcggcgtcggcggcgtcggcggcggcggcgacggcggcgggggcggtaatggcggagctggtgcaggggcagagcgctcctgtggggatgaaggccgagggcttcgtggatgccctgcaccgggtccggcagattgctgctaaaattgattcaattcctcacttgaataattccacacctctagtggacccctcagtatatggatacggagtacaaaaacggcccttggatgatggagtaggtaaccagttaggggccttggtacatcaaaggacggtaataacggaagaattcaaagtgcctgacaaaatggttggatttattatcggcaggggaggtgagcagatttcacggattcaagcagaatctggttgcaaaattcagattgcttcagagagttctgggattccagagaggccctgtgtacttaccggaaccccagaaagtattgaacaagccaaacggctcctgggacagattgtggaccgctgtcgaaatggacctggctttcataatgacatagacagcaacagcacaatccaggagattctcattcccgcatctaaagtgggtctggtcatcggcagaggaggggaaacaatcaagcagttgcaggagcggacaggggtgaagatggtcatgatccaggatggcccattgcccacgggagcagacaagcctcttcgtatcactggagatgcatttaaagtacagcaagcaagagaaatggtactagagattatccgagaaaaagaccaagctgactttcggggtgtacgcggcgatttcaactctcgaatgggaggaggcagtatagaggtatctgtgcctaggtttgctgtggggattgtaataggaagaaacggggaaatgatcaaaaagatccagaatgatgctggtgtgaggattcagtttaaaccagatgatgggattagtccagaaagagctgcccaggtcatgggccctccggatcggtgtcagcatgcagcgcatatcatcagcgagctgattcttacagcccaggaaagagacggctttggaggcctggcagcagccagaggaagaggtcgtggccgtggcgactggagcgtgggagcccctggtggcgtccaggagataacatacacggtgccagccgataagtgtggcctcgtcataggcaaagggggtgagaacatcaaaagcatcaaccagcagtcaggggcgcacgtggagcttcagaggaacccccctcccaacagcgaccccaacctgcggagattcaccatcaggggggttccccagcagatcgaggtggccaggcagctcatagatgagaaagttggcgggaccaatctcggagcacctggagccttcggacagagtccattcagccagccacctgccccacctcatcaaaatacctttcctccaaggagctccgggtgcttcccaaacatggctgccaaggtgaatgggaacccccacagcacccctgtgagtggtcctccggcctttctgacccagggctggggcagcacctaccaggcgtggcagcagcccacacagcaggtcccaagccagcagagccagccgcagagcagccagcccaactacagcaaggcctgggaagactattacaaaaaacagagtcacgccgccagcgctgctcctcaggccagctccccaccggactacacaatggcctgggcagaatattacagacagcaggtcgctttctacggacagacgttagggcaggcgcaggcccacagccaggagcagtaggacagcgtcctcgtggccaactctcccctcaaaatcattgtcaaagaaaacctatttgtaacagaggtttttacatttgcaaaccttttgatgaagaactgttgttttgttctgtgaaacactatatttagattaacggaatttttctaaaaatcaggaaaattagttactaaaaattgctgatcatttttgtttcattatttttgttatttcaaatgtataagctctgggattctttttggagcaatacctacaaagtcaggcaccagaatgtgcctcagagctgtgacatttcaacatgatggttttggtttggtttggttttgtgtcctttttatttgcagttttttctgttgcaacagaaagtggcttggaagtcttaggtggtatgtaacaaattctttttaaaaattttaaagcagtatttaagtattcttaaatgtgtaaattcatttaatgttttacttctaatttcttgtatcttggctgtctggttttattgcatttttaaaaaaactgaactattatgtattgtaatgaatgatgtgaattctgaactgagacagataattgtattgctgtccaacaggggttgggaggggcattttgtagggtttgtataatttctagagttcgaaaggggtaatataaaaatgtgctcgtgtgtttagcctacgtttttctcatgcctccattaccagttgcaattgtgtatctaagacctccaagcttgtttttaaaacaaaacaaaaaacctttctctattatctcagaaatataaatactgttatttttaatattaagaaattcaatataacttttaacacacactgtggaacattaaaccgtataaaaatgtagttataactatttttaattccaaggtgttgtttgcttttttcttttaaatattttcttaatattttgtcagattaactagatgaataaataaatctagtattaaccgcattatgaattaaataattttgatttaatgaaagggataatatgatttccagtgtttactgtagtgtatcttgtacagataacatgtatttttaaaggaaaaaaaacggaattgaagctattttttcttgcatttctaattgacctgagggacattccgtttgaaatgtactgaagttacagtttctggttttttctccttatttttcttataatgcttgaaatgtctaactattaaaaaagacaattggaaaatgttatgcatggggtttttaagaaaacaaagtgttctttttatttgactgacaattcattttacactctatataataaaatctccacaaggcatcttgtgggcaaagtcaaaaaaaaaaaaaaaaaa

SEQ ID NO: 2200 - DNA, 3124 bp, Homo Sapiens
  NM_003935
ggatccgcggtgcggctgtgggtgagcggcgggctgcgggaccctcgcccggcggctcagaaaggcgggaagcgcacgcatttttctggcttgtttcctgaacgttggccggcggaggacccgcgagctcgggagagcgcccgggccgggctctgcattcttgttgcctcttccctggcgggggtgatactctcccgcggggcttgctgtgggggttcagggaggtggagatgggcccgccatgtgcctgcagggagcaggcgctgtggttaatacttttcttcttcgaaccctcccacagctctttagggtgagatctgctgtaccagtctcacaggagtcagcattggtaatagtgctgtgctgcggaagagtggagtctaaactttttcattgccagtgccccgaaactggagtgtgaaggaccgagacaagatgaagactgtgctcatggttgctgaaaagccgtccttggcacagtcaattgccaaaatcctctctagagggagcctgtcctcacacaaagggctgaacggggcctgctcagtccacgagtacactgggacctttgctggccagccagtgcgcttcaagatgacgtctgtctgtggtcacgtgatgaccctggatttcctgggaaaatacaacaaatgggacaaagtggaccccgcagaactgttcagccaagctcccacggagaagaaagaagctaaccccaagctgaacatggtgaagttcctgcaggtggagggcagaggctgcgactacatcgtgctgtggctggactgcgacaaggagggggagaacatctgctttgaggttcttgatgctgttctgcccgtcatgaacaaggcccatggtggcgagaagaccgtgttccgggccaggtttagctccatcacggacacagacatctgtaatgccatggcctgcctaggcgagcctgaccacaacgaggcgctctcagtggatgctcgccaggagctggacctgcgaatcggctgtgcattcaccaggtttcagactaaatatttccaggggaaatacggtgatttagacagctctctcatctcctttgggccgtgtcagactccaaccctgggattctgtgtggagagacatgataaaatccagtccttcaaaccagagacctactgggtgctgcaggccaaggttaacactgacaaagacagatctctccttttggactgggaccgagtaagagtgtttgaccgggagatcgcacagatgtttttaaacatgacaaagctggagaaggaagcccaggtggaggccacaagcaggaaagaaaaggccaagcagaggcccctggccctgaacactgtggagatgctgcgtgtggccagctcttctctgggcatggggccgcagcacgccatgcagacggctgagcggctctacacgcaaggctacatcagctacccacggacagagaccacccactaccctgagaactttgacctgaagggctctctgcggcagcaggccaaccacccctactgggccgacacggtgaagcggttgttagcagaaggtatcaaccgcccgcggaaaggccatgacgccggcgaccatccccccatcacccccatgaagtctgccacagaggccgaattagggggtgacgcgtggcggctctatgagtacatcaccagacacttcatcgccacggtcagccatgactgcaagtacctgcagagcaccatctccttcagaattgggcccgagctcttcacctgctccgggaagaccgtcctctcaccaggcttcacggaggtcatgccctggcagagcgtgcccctggaggagagcctgcccacttgccagcggggtgatgccttccctgtgggcgaggtgaagatgctggagaagcagacgaacccacccgactacctgacggaggccgagctcatcacgctcatggagaagcatggcatcggcacggatgccagcatccctgtgcatatcaacaacatctgccagcgcaactatgtcacggtggagagcgggcgccggctcaagcccaccaacctcggcatcgtcctggtgcacggctactataagattgatgcagagctggtgctccccaccatccgcagtgcagtggagaagcagctgaacctgatcgcccagggcaaggccgactaccgccaggtcctgggccacaccctggacgtgttcaagaggaagttccactactttgtcgactccattgctggcatggatgagttgatggaggtgtctttctcgcccctggcggccacaggcaagcccctctcacgctgtgggaagtgccaccgcttcatgaagtacatccaggccaagccaagccgcctgcactgctcccactgcgatgagacctacacgctcccccagaacggcaccatcaagctctacaaggagctccgctgccctctggatgacttcgagctggtcctgtggtcatcaggctctcggggcaagagctacccgctgtgcccctactgctacaaccacccacccttccgagacatgaagaaaggcatgggctgcaacgagtgtacgcacccctcctgccagcactcgctgagcatgctgggcatcggccagtgcgtggaatgtgagagcggggtgctggtgctggaccccacctcgggccccaagtggaaggtggcctgcaacaagtgcaacgtggtagcgcactgcttcgagaacgcccaccgcgtgcgggtgtccgccgacacctgcagtgtctgtgaggccgccttgcttgatgtggacttcaacaaggccaagtccccactcccgggcgatgagacgcagcacatgggctgcgtcttttgtgaccccgtcttccaggagctggtggagctgaagcatgcggcctcctgccaccccatgcaccgcggtggaccagggagaaggcagggtcgagggcggggccgggccaggaggccccctgggaagcccaaccccagacggcccaaggacaagatgtcagccctggccgcctactttgtatgatgaccctgtcctccctcacccaggctgcagtgccatgcagacacctcatggcacttcaaactattaaaatgcattttatcttaaaaaaaaaaaaaaaaaa

SEQ ID NO: 2201 - DNA, 4863 bp, Homo Sapiens
  NM_003938
ttgtccgccatttgcaaggggcccggagcgggatcgcggcacctgccgagcgggtcgccgcctctgccgcggtccttggaccccgccgccgccctggcctgggagcttgccccgccgcagcggccggcagcgcggcgctccgcgggcggcaggcacgggccccgggccccctcacggcgcccagccgcgggcctcccgaggcaaaagcccgtgggccgccgcgatggccctcaagatggtgaagggcagcatcgaccgcatgttcgacaagaatctgcaggacttggtccgcggcatccgtaaccacaaggaggacgaggcaaaatacatatctcagtgcattgatgagatcaagcaggagctgaagcaggacaacatagcggtgaaggcgaacgcggtctgcaagctgacgtatttacagatgttgggatacgacatcagctgggccgccttcaacatcatagaagtgatgagtgcctccaagttcaccttcaagcgaattggctacctcgctgcttcccagagctttcacgaaggcaccgacgtcatcatgctgaccaccaatcagatccgtaaggacttgagcagccccagccagtacgacacaggtgttgcactgacgggtctgtcctgcttcgtcaccccagaccttgccagagacctggcaaatgacatcatgacactgatgtcacacaccaagccctacatcaggaagaaggctgtgctgatcatgtacaaggtgttcctgaagtaccccgagtcgctgcgccctgcctttccccggctgaaggagaagctggaggaccccgaccccggggttcagtcggctgccgtcaatgtcatctgcgagctggccagacgcaaccctaagaactacctgtccctggccccgctctttttcaagctgatgacgtcctccaccaacaactgggtcctcatcaagatcatcaagctgttcggtgctcttactcctttggaaccgcggctgggcaagaagctgatcgagcccctcaccaatctcatccacagcacgtctgccatgtctctcctctatgaatgtgtgaacaccgtgattgcagtgctcatctcgctgtcctccggcatgcccaaccacagcgccagcatccagctttgtgttcagaaattaaggatattgatcgaggactccgatcagaacttgaagtacctggggctgctggcaatgtccaagatcctgaagacccaccccaagtccgtgcagtcccacaaggacctcatcctgcagtgcctggacgacaaggacgagtccatccggctgcgggccctggacctgctctatgggatggtgtccaagaagaacctgatggagatcgtgaagaagctgatgacccacgtagacaaggcagagggtaccacctaccgtgacgagctgctcaccaagatcattgacatctgcagccagtccaactaccagtacatcaccaacttcgagtggtacatcagcatcctggtggagctgacccggctggagggcacacggcacggccacctcatcgccgcccaaatgctggacgtggccatccgcgtgaaggccatccgcaagttcgccgtgtcccagatgtctgcgctgcttgacagtgcacacctgctggccagcagcacccagcggaacgggatctgtgaggtgctgtacgctgccgcctggatctgcggggagttctcagagcatctgcaggaaccacaccacactttggaggccatgctgcggcccagagtcaccacgctgccaggccacatccaggccgtgtatgtgcagaacgtggtcaagctctacgcctccatcctgcagcagaaggagcaggccggggaggcagagggcgctcaggccgtcacccagctcatggtggaccggctgccccagtttgtgcagagcgcagacctggaggtgcaggagcgggcgtcctgcatcctgcagctggtcaagcacatccagaagcttcaggccaaggacgtgcctgtggcagaggaggtcagcgctctctttgctggggagctgaacccagtggcccccaaggcccagaagaaggttccagtccccgaaggcctggacctggacgcctggatcaatgagccactctcggacagcgagtcagaggacgagaggcccagggccgtcttccacgaggaggagcagcggcgtcccaagcaccggccgtcggaggcggacgaggaagagctggctcggcgccgagaggcccggaagcaggagcaggccaacaaccccttctacatcaagagctcgccatcgccacagaagcggtaccaggacaccccgggcgtggagcacattcccgtggtgcagattgacctctccgtccccttgaaggttccagggctgcctatgtcagatcagtatgtgaagctggaggaggagcggcggcaccggcagaagctggagaaggacaagaggaggaaaaagaggaaggagaaggagaagaagggcaagcgccgccacagctcgctgcccacggagagcgacgaggacatcgcccctgcccagcaggtggacatcgtcacagaggagatgcctgagaatgctctgcccagcgacgaggatgacaaagaccccaacgacccctacagggctctggatattgacctggataagcccttagccgacagcgagaaactgcctattcagaaacacagaaacaccgagacctcaaaatcccctgagaaggacgttcccatggtagaaaagaagagcaagaaacccaagaagaaagagaaaaaacacaaagagaaagagagagacaaggagaagaagaaggagaaggagaagaagaaatctcccaagcctaagaagaagaagcacaggaaggagaaggaggagcggaccaaaggcaagaagaagtccaagaagcagcctccaggcagcgaggaggcagcgggggagccggtgcagaatggcgcgccagaggaggagcagctcccgcctgagtccagctactccctcctcgctgaaaattcctatgttaaaatgacctgtgacatccggggcagtctgcaggaggacagccaggtcactgtggccatcgtgctggagaacaggagcagcagcatcctcaagggcatggagctcagcgtgctggactcactcaatgccaggatggcccggccgcagggctcctccgtccacgatggcgtccccgtgcctttccagctgcccccaggcgtctccaacgaagcccagtatgtgttcaccatccagagcatcgtcatggcgcagaagctcaaggggaccctgtccttcattgccaagaatgacgagggtgcgacccacgagaagctggacttcaggctgcacttcagctgcagctcctacttgatcaccactccctgctacagtgacgcctttgctaagttgctggagtctggggacttgagcatgagctcaatcaaagtcgatggcattcggatgtccttccagaatcttctggcgaagatctgttttcaccaccatttttccgttgtggagcgagtggactcctgcgcctccatgtacagccgctccatccagggccaccatgtctgcctcctggtgaaaaagggtgagaactctgtctcagtcgacgggaagtgcagtgactccacgctactgagcaacttgttagaagagatgaaggcgacgctggccaagtgttgagagctgcctgcgagccccgcaccaccccgcggagcacgtacccagggaccgcagccctgacgtgtctcgcctctcctcagtcgtgtgtactgtacccaagcctgagtgttaatttaactctatgttgtccgccgtgtagacatccgaggtcatttgttgcgttgaattatctgaccatccttttttactgtgactcttcccattctctttggcaagaagtccccttctcgcccccaaaccagcaagggactcccccacctgggtctgtgccctgccccgcgctgggggccgagtccttgaatgtggcttcaggggctcctgtcctgggccagggcctgatgggcaccacgtgaggggcacttggtggacagggcggggctgacgtggcctcctctggggtcgcctgcttttgacccaaaggtcctgacggttgcgtccgggggaggggaaggaagggccgctgtcgccaaggttttctctcccagaacccacagtgggaaagcggtcttgccaggcgttgtccattgtcagtgtgctcgtgggctggtgactgggtcttgggatcccaggccacgcgccagccaggctgtgggcagggcggggccagggacgccaaagagaggttgcagtcagaaccgtggacggggtgggttgaggcctctctgccacccgtcttcctggtcagcagaagtgcatctcggcttgggtttggggtggtccgcatcccctgcttgccactatgcgcaccaaggtttccccacatccttcccagcacccttaggaaggcccaggcagggcctggaagcagcggacctgggctgttctgtgttgaaggagtgtgcccagtgcccttgggcaggacctgtgagagccacctcacaggcagagcccccaccaggcagggcaaggagactccgctcactccccacggccagcgtgggcacaggactgacccttcttcagagataatgacattttatcttctccttttgatgaaaactgtcactttagcatgtaatccattacagaatcccatgcagtgattccaggatttgaaattgtatgatgtgttacataagaatttatttgctatcgacattcccgtataaagagagagacatatcacgctgctgtcatgattttgtgtcaagatgatccaataaagttgtaaaacaggc

SEQ ID NO: 2202 - DNA, 7933 bp, Homo Sapiens
  NM_003940
gctcgctggcgccgccgccgccggcagaccccgcgctccggctccggctcggctcgctcggctccggtgcgcgccgaggccatgcagcgccggggcgccctgttcggcatgccgggcggcagcggaggcaggaagatggctgcaggagacatcggcgagctgctagtgccccacatgcccacgatccgcgtgcccaggtccggcgacagggtctacaagaacgagtgcgccttctcctacgactctcccaattctgaaggtggactctatgtatgcatgaatacatttttggcctttggaagggaacatgttgaaagacattttcgaaaaactggacagagtgtatacatgcacctgaaaagacatgtgcgagagaaggtaagaggggcgtctggtggagcgttaccaaaaaggaggaattccaagatttttttagatctagatactgatgacgatttaaatagcgacgattatgaatatgaagatgaagccaaacttgttatattcccagatcactatgaaatagcactaccaaatattgaggagttaccagccctggtaacaattgcttgtgatgcagttctcagctcaaaatctccatacagaaagcaggacccagacacgtgggaaaatgaattgccagtatctaaatatgccaacaacctcacccagctggacaatggagtcaggattcctccaagtggttggaagtgtgccagatgcgacctgcgagaaaacctctggttgaatctgactgacggctctgtcctgtgtggaaagtggttctttgacagctctgggggcaacgggcatgcgctggagcattacagagacatgggctacccactagccgtgaaactgggaaccatcactcctgacggggcagatgtttattcttttcaagaagaagaacctgttttggatcctcatttggccaagcacttagcgcattttggaattgatatgcttcatatgcatgggacagagaatgggctccaggacaatgacatcaagctgagggtcagtgagtgggaagtgatccaggagtcgggcacgaaactgaagccaatgtatggtcctggctacacgggtctgaagaacctgggcaacagctgctatctcagctctgtcatgcaggccatcttcagcatcccagaattccagagagcgtatgtaggaaaccttcccagaatatttgactactcgcctttagatccaacacaagatttcaacacacagatgactaagttaggacatggccttctctcaggccagtattcaaagcctccggtgaaatctgaactcattgaacaggtgatgaaggaggagcacaagccacagcagaacgggatctctccgcgcatgtttaaggcctttgtaagcaagagccacccggaattctcctctaacaggcagcaagatgcccaggaattcttcttgcacctggtgaatctagtagagaggaaccgcatcggctcagaaaacccaagcgatgtttttcgttttttggtggaagaacgcattcagtgctgtcagacccggaaagtccgctacacggagagggtggattacctgatgcagttacctgtggccatggaggcggcaaccaacaaggatgaactgatcgcttatgaactaacgagaagggaagcagaagcaaacagaagaccccttcctgagttggtacgtgccaagataccatttagtgcctgccttcaggccttctctgaaccagaaaatgttgatgatttctggagcagtgccctacaagcaaagtctgcgggtgtgaaaacatctcgctttgcttcattccctgaatacttggtagtgcagataaagaagttcacttttggtcttgactgggttcccaaaaaatttgatgtttctattgatatgccagacctacttgatatcaaccatctccgagccagggggttacagccaggagaggaagaacttccagacatcagcccccccatagtcattcctgatgactcaaaagatcgcctgatgaaccaattgatagacccatcagacatcgatgagtcatcagtgatgcagctggccgagatgggtttcccgctggaagcatgtcgcaaggctgtgtacttcactggaaatatgggcgccgaggtggccttcaactggatcattgttcacatggaagagccagattttgctgagccgctgaccatgcctggttatggaggggcagcttctgctggagcctctgtttttggtgcttctggactggataaccaacctccagaggaaatcgtagctatcatcacctccatgggatttcagcgaaatcaggctattcaggcactacgagcaacgaataataacctggaaagagcactggattggatctttagccaccctgagtttgaagaagacagtgattttgtgattgagatggagaataatgccaatgcaaacattatttctgaggccaagcccgaaggacctagagtcaaggatggatctggaacatatgagctatttgcattcatcagtcacatgggaacatccacaatgagtggtcattacatttgccatatcaaaaaggaaggaagatgggtgatttacaatgaccacaaagtttgtgcctcagaaaggccccctaaagacctgggctacatgtacttttaccgcaggataccaagctaaacctcaaatataaaaattggcgaaaagaagccatacgcctttttaatttgccaaaaaaaaaaagaagaagaagaagttgaaacaactagacatgaaggaatatatggggtatttatcgtttatttaaagagcacgatcagttgacaccttctgaaatagaactgagaagaaatttctattagtgatgatacactattatattgtagatagtttttataaatgttcaaaaagatgatgatatttaaaaacaaaaaaagtattcatattgctggtggaggatctgccatcagcacatcaaaaatggggatgtgcccccagccctctattttgctttgggggtcagtgatagtggcctctggagaaaccaaataatgtggccagtggtgtggccttacccacaacaaatgaaaagcccacttgtgtttcatatagaaaatcagcagttgggtggggctttatttgtgacataatttttttcatgacatacaataatttctgatgtatccatgtagatattatgctctgtccataatagagcctctgcaatgaaagatatttttaatttgtcacattaaaattcataatacgattgtgtgaatgtgtgtgagactgactgagagtgtgagacttttactagaaaagtgagtccactagaaaatctgtgacaagttggtttttaaagtctgaacagttgatattaagcatatctgaaaaaagcaagtaaatattttaacaaaactatgactcaggaaccttcgagaagattagttccccacttagatttttaaggagtaaaaagggctgagttatgcctttaagtgctgtcaagaattcacttgggtttgggacatttgctggtgtaatgctagatgcccacagcagcataatattgtactttgtcaaaggtaggtaaattctctgtttctcagcagccctttccccaaaaggtatggtgtttatttttagtaaaaatagctaatctctttttaccatctcacatgataactctttggagtcatgtcaagtgccccaaatttgtctgtgattttcccatctctgagctctttatctgcctccgtttccttgtttttctggggccagagtctcatctctgcctttttttggtgtatcaccttctgacttgccttcattgcttgtctgatgtgaccaacagtgtgatcttggacacactaaggattttagatgcaaagaaactttatacaacattatgaaagactatcctttccattttggttatttcagcattttagttgcaacctgggattagattagagtttccaacgtgatgaaaagtggaatgatagcattctataatttccataattttcctactggtccgtaccaaattctagagtctctggagttgctatttcagagtatttggtcaaacgaaaaagaatttattgctgtctgtttaacatgtatttgtttggttgaaaggatctttttagaaactgtaggaaaataaacagaaccaaccaggtgaaacaaagcacagacattgggttaggatgtagtgagttgtgaacaatcaggattctgggtgtgatgggggtccctgtctcataggtgatcctttggtgccatgtgaccgagagacatggtgtctaaggcccatggcctggagacctgggtgctgctcctagctgactgtggaccttgggcaagtccttcatccgtcctgtgcctcactgtcctcatctgaacaatggtatgatgacacctgccctctctttcaatcatgctttgaggatacagtgagattggttacagtgaaccttcaatgagtagaatgtggtatgccatggtgggttgtagtagatggtgctccctgccttttctcctctgttttcctcaatttgggaacaaatgagattggcagaaggagggagctcacggtgcagtacttttctaccaaagtgtgcccactggtgtcacctcctaatgttaacttggatttcctaaagcagtcccactctgttatgagagtcactgactcccgtggacatccccacagtaagcagccttacaaaatccagtccccttagggcagagtgagtgtcatagaataatgactccaaacccacgtcaaaaatggcttgttttcagcgatgttataaaacaaaggcctgttttttggaattgggggtgactgggtggtttggattgaaatgtggacaaagatagcatgtgtattttgaataaaataaaaattttgtaataaaacttttaaaaatcagtgatgtaaaatcaatatttaagactataggctataaattgtttgatttcattaactagcccttttgatgcctagacatgttgtaaaaaaattgtgctatggctgccttttcttctgccccacaacacaaagggctatttctacaaggcaaagttttgtatatgtgctattctttacttcagattgagagttgggaaaaactggagtaaataatgggtttcttacttgcttaaaagcatatttatatgtgtatctcaatatatacaaggcaggttcccctataaaagtctggaatgtactgcttaattttacacttgtgtagacacgattatttgtgactgaaaagtggaataacgtgtggattttgtcaactcattatcagtctgttagcagtcctctatgtgaggcatggtggtctaattgtgaaattctccctgtatatgggtgtctgtgtgaaagacagcactttcttcctgtaaatatcttttgatatccatttatgtagaattccaatgaatatgtctttggaaaaggtaatgtatcaaagtttttattttgccaattgatctaaatgcccatataactaatcagaaatccagtttggttcagattgggattttcttttaaagaaaaaaaaagtatgcagaaaagactattggaagaatcatgtgttagtgacactttacatcaacgttgcttcaatattttggaattgaccaggctgctttctcctacctgcaagagaatgtgcctgacatttcccagtgcttactttgggctataggaagtccagcggggatagctcgagcctcttgctccctgagtcatttattccctttacctgaacagagccttacctgcaattcatagtgagagcacctgggtctgtatcctgactccactctaagtgaggtgggactgaatcactgtacctctctgggccttttcatttgaaacaagtgggttagactagattagctccaaagtcctctcttgccctaacattttatttttattttcctgtggttaccactagggtctgacacgtaaaatgtgagggatcacttagaggtttggatgttatatttttgcattgttacagcttatactccccagttgaggacctgtgtcattcttagtggccccacgacccctctgtttgtattcctgctccacttatctatacttttttgggtaatcatcccactttttttttttcttgagatggagtctcgctgtgttgccaaggctggagtacagtggtgcaatctcagctcactgcagcctcctcccgggttcaagtgattctcctgcctcagcttcccaagtagctgggattactggcgcacgccactacgcccagctaatttttgtatttttagtagagacagggttttgccatgttggccaggctggtcttgaactcttgacctcaacctgcctcagcctcccaaagtgctgggattacacgcatgagctaccgcgtccagccccactttttttctactcttgaaaaaaacaactttctagtccatgaggtactttggctccatccccctcaaaaacaaaacaaaaaatccatttaaagtgtcctcctagaaaagcctcagaactgccttcaactacatctgtcacctttatagaatattttgaaattctggaagaggatgggaaacaaaattctaatttagctagagctgtgatccccaaataagtgctgacaaaattgtctaccacagaaaggccgtccttgtcatcttgtaggcatcactgctgctaaatcacatcagtacatgccttctgtggggagatggcagggggcaggggcaggaccaggggatgggattagataaagtgtgataatgtcctttagataaaagaaatcctacgctatagaacaaggttctgtactcttgagttggtgtctgagatcacctgcacagtgttacagagattttccactccataaatcactctaaaagagtttgcataagactcggtagacctgtgctattcaatgtggcagtcaacagccatatgtggcgatgactactcaaagtttggcttgttcaaatcgagactgtgttgtacacatacaatacacaccagattttgaaggcttggtaccaaaaaggaatttaaaatatttcaccaatatttcatattgataacatgctgaaatgacactattttggatgtactaagtaaaatattaacaatttaatatatttatataattgaaattaaaattcttttcacccatttttatttttttaaaaatgtggcccctaaagaacttcaaattagacatgtggataacgttatacttctattggacagccccactctagacttacatggtgtggggtaggcagtgaaatccgtaaataggaaacgcaattctgcaaagtatctaaatagacagaaacaacacaaatatttttgctggagtcaggagcactgtgaggcacagaacatctcccagaaagcagattttttttttctgccgaaaaaccaatatatatatgtatgatcccaattaaaagacaaaagcaaatgagccccaaactgcctgtcttcagctttgcctgggagctgctacctttgctcttctagcatcttctaggtaccaaggatattagccacttgagggtgttgggcatatttgtttcattgtaggcaaaatcctcttgtggtttcccctccccaggtattgttgagtctgttcaaagctgggtgtgttgaaacactgcacaaatcctgccactcttgatgtgccgcttgtctcagccttggcagaggctgagtctgttcctgtgcccacctgtccagcaggttttgatgttggctcctgaaagagtttgtatttattttattttgcactagtcacagttgttgttaaactgtatcaaatgttttgggagattatttgcctgagatggaaagagagatggatgatttattgcttcaattgttttaaattaaaagctattctcacaa

SEQ ID NO: 2203 - DNA, 2468 bp, Homo Sapiens
  NM_003943
gaaagtgtagggacagaagagcgctggagtcttccccgggagggagcccggggctgcagcccaggggcggggagcggggcggggctgggaaagttgagtactggtcgctcagggccgggctccgccggagtgcccggcgcagaaaccgtaaaaggctggagcgggcggggtaggtgtggctctgtgtgcgtgacctgagccccggtcccagtccctgtagtctcctgcggccgcggcctctcagccatgggcgccgtctggtccgccctgctggttggagggggtctggccggagcacttttcgtttggctgctgcggggcggccctggcgacaccgggaaggacggggatgcggagcaggagaaagacgcccctcttgggggagctgcgattccgggaggccatcagagtggcagcagcggactgagccctggaccttccgggcaggagctggtcaccaaaccagagcatcttcaagaaagcaatggacatttgatttctaagaccaaagaccttggtaaactgcaagcagcatcatggagattgcagaatccttccagggaagtctgtgacaattcaagagaacatgttccttctggacagtttccagacacagaagctccagctacctctgagaccagtaactctaggagttactctgaagtttcaagaaatgaaagccttgaatctcctatgggagaatggggattccaaaaaggacaagagatatctgctaaagcagctacatgttttgcagagaagttgccttctagcaacctgctcaagaacagagctaaagaagaaatgagcctctctgatttgaacagtcaggaccgggttgaccacgaggagtgggaaatggtgcctaggcactcatcttggggggatgttggtgtgggtggcagtcttaaggctccagtgttaaacctaaaccagggaatggacaatggaagaagcactttggtggaagcaagaggtcagcaagtgcatgggaaaatggaaagggtagcagtgatgcctgcagggtctcagcaagttagtgtcaggttccaggtccattatgtcacaagcactgatgtgcaattcattgcagtaactggagaccatgagtgtcttgggagatggaacacttacatcccactccactataacaaggatgggttctggtctcattccattttcctgcctgcagatacagtggtggagtggaagtttgtgttggtagagaatgggggagttacccgctgggaagaatgcagcaatagattcctagaaactggccatgaggataaagtggttcacgcatggtgggggattcactgattcagtttgcaaagtaatggagaagctgtagaacaatgtggaagaggctgaggttgtggaacacactgaataaaataaaggcagtgtgactccaaattcagccatctgaattgtttaaatttgctagtggattttgtctaatgtgcagaaatatatatgtctaatgtgcagaaatatatatgtgtgtatgtgtgtatatatatgcacacacacacagataatgcttccagtgaatgtgaacttcttttccctgtggcactgattgacagacttgtgctgatccattattactttagggcttgattctcttggggagtgacttggctaagcttcaggtgtaaactgtggtcacggagcaaaaacattaaccagctgcccagggttcaagcttgagcctttaggtgatctttaaactatggtagtaaaataagcctcactcaaacatagctgacttcctattggtacagcttgaaaagcactttttactacatacacattttatgcttaaaaagttaacatgatacgaaactgtgattagaaaatatctggtctggatgtgattagtaaggatacaagataatgttctaagactgcctaatgctttttgtttgattttcatctgccaggcgttgttatgtgctatgagggtagcaagtacgtctttgtcttaatgatctaaggctggtgtagaaacaaagggcctaatgagaaccaatcatcatggaagtcagttgcgggggcagcccataaggaaagggaaagtgagtggggttgggcataggctgagtgaggtggcctgaatgacacctcttagaggactgtgaagtacaggcacagcccgactgcagggagggatgcacccatcatttacccatgggagcatctgtaggaccatctctctcccacttcttctcccctcccccaccgcatctggccagatggactgtcctacagcaatcgtttccatctgtcaccctcttccctctcctttcataccagtcactatcttgggtaacaaatttatacaggacagtggtacagaaatacatctttgctctgagaatacagcaaatattaacttaaattattataactgaacaaataataaaacctgaattttaatatcttcaaaaaaaaaaaaaaaa

SEQ ID NO: 2204 - DNA, 1721 bp, Homo Sapiens
  NM_003944
caccagcacagcaaacccgccgggatcaaagtgtaccagtcggcagcatggctacgaaatgtgggaattgtggacccggctactccacccctctggaggccatgaaaggacccagggaagagatcgtctacctgccctgcatttaccgaaacacaggcactgaggccccagattatctggccactgtggatgttgaccccaagtctccccagtattgccaggtcatccaccggctgcccatgcccaacctgaaggacgagctgcatcactcaggatggaacacctgcagcagctgcttcggtgatagcaccaagtcgcgcaccaagctggtgctgcccagtctcatctcctctcgcatctatgtggtggacgtgggctctgagccccgggccccaaagctgcacaaggtcattgagcccaaggacatccatgccaagtgcgaactggcctttctccacaccagccactgcctggccagcggggaagtgatgatcagctccctgggagacgtcaagggcaatggcaaagggggttttgtgctgctggatggggagacgttcgaggtgaaggggacatgggagagacctgggggtgctgcaccgttgggctatgacttctggtaccagcctcgacacaatgtcatgatcagcactgagtgggcagctcccaatgtcttacgagatggcttcaaccccgctgatgtggaggctggactgtacgggagccacttatatgtatgggactggcagcgccatgagattgtgcagaccctgtctctaaaagatgggcttattcccttggagatccgcttcctgcacaacccagacgctgcccaaggctttgtgggctgcgcactcagctccaccatccagcgcttctacaagaacgagggaggtacatggtcagtggagaaggtgatccaggtgccccccaagaaagtgaagggctggctgctgcccgaaatgccaggcctgatcaccgacatcctgctctccctggacgaccgcttcctctacttcagcaactggctgcatggggacctgaggcagtatgacatctctgacccacagagaccccgcctcacaggacagctcttcctcggaggcagcattgttaagggaggccctgtgcaagtgctggaggacgaggaactaaagtcccagccagagcccctagtggtcaagggaaaacgggtggctggaggccctcagatgatccagctcagcctggatgggaagcgcctctacatcaccacgtcgctgtacagtgcctgggacaagcagttttaccctgatctcatcagggaaggctctgtgatgctgcaggttgatgtagacacagtaaaaggagggctgaagttgaaccccaacttcctggtggacttcgggaaggagccccttggcccagcccttgcccatgagctccgctaccctgggggcgattgtagctctgacatctggatttgaactccaccctcatcacccacactccctattttgggccctcacttccttggggacctggcttcattctgctctctcttggcacccgacccttggcagcatgtaccacacagccaagctgagactgtggcaatgtgttgagtcatatacatttactgaccactgttgcttgttgctcactgtgctgcttttccatgagctcttggaggcaccaagaaataaactcgtaaccctgtccttcaaaaaaaaaaaaaaaaa

SEQ ID NO: 2205 - DNA, 894 bp, Homo Sapiens
  NM_003945
aggcggggcttgcacacgctggtcacgcggtcagctattgacacttcctggtgggatccgagtgaggcgacggggtaggggttggcgctcaggcggcgaccatggcgtatcacggcctcactgtgcctctcattgtgatgagcgtgttctggggcttcgtcggcttcttggtgccttggttcatccctaagggtcctaaccggggagttatcattaccatgttggtgacctgttcagtttgctgctatctcttttggctgattgcaattctggcccaactcaaccctctctttggaccgcaattgaaaaatgaaaccatctggtatctgaagtatcattggccttgaggaagaagacatgctctacagtgctcagtctttgaggtcacgagaagagaatgccttctagatgcaaaatcacctccaaaccagaccacttttcttgacttgcctgttttggccattagctgccttaaacgttaacagcacatttgaatgccttattctacaatgcagcgtgttttcctttgccttttttgcactttggtgaattacgtgcctccataacctgaactgtgccgactccacaaaacgattatgtactcttctgagatagaagatgctgttcttctgagagatacgttactctctccttggaatctgtggatttgaagatggctcctgccttctcacgtgggaatcagtgaagtgtttagaaactgctgcaagacaaacaagactccagtggggtggtcagtaggagagcacgttcagagggaagagccatctcaacagaatcgcaccaaactatactttcaggatgaatttcttctttctgccatcttttggaataaatattttcctcctttctatggaaatctggaaaaaaaaaaaa

SEQ ID NO: 2206 - DNA, 1515 bp, Homo Sapiens
  NM_003946
ggcattcagagagtagatgccagtcctgggaaaggcaggggaggagaggagagccacggctgacgcttggggacagaaggaggagcctgaggaggagacaggacagagcgtctggagaggcaggaggacaccgagttccccgtgttggcctccaggtcctgtgcttgcggagccgtccggcggctgggatcgagccccgacaatgggcaacgcgcaggagcggccgtcagagactatcgaccgcgagcggaaacgcctggtcgagacgctgcaggcggactcgggactgctgttggacgcgctgctggcgcggggcgtgctcaccgggccagagtacgaggcattggatgcactgcctgatgccgagcgcagggtgcgccgcctactgctgctggtgcagggcaagggcgaggccgcctgccaggagctgctacgctgtgcccagcgtaccgcgggcgcgccggaccccgcttgggactggcagcacgtgggtccgggctaccgggaccgcagctatgaccctccatgcccaggccactggacgccggaggcacccggctcggggaccacatgccccgggttgcccagagcttcagaccctgacgaggccgggggccctgagggctccgaggcggtgcaatccgggaccccggaggagccagagccagagctggaagctgaggcctctaaagaggctgaaccggagccggagccagagccagagctggaacccgaggctgaagcagaaccagagccggaactggagccagaaccggacccagagcccgagcccgacttcgaggaaagggacgagtccgaagattcctgaaggccagagctctgacaggcggtgccccgcccatgctggataggacctgggatgctgctggagctgaatcggatgccaccaaggctcggtccagcccagtaccgctggaagtgaataaactccggagggtcggacgggacctgggctctctccacgattctggctgtttgcccaggaacttagggtgggtacctctgagtcccagggacctgggcaggcccaagcccaccacgagcatcatccagtcctcagccctaatctgcccttaggagtccaggctgcaccctggagatcccaaacctagccccctagtgggacaaggacctgaccctcctgcccgcatacacaacccatttcccctggtgagccacttggcagcatatgtaggtaccagctcaaccccacgcaagttcctgagctgaacatggagcaaggggagggtgacttctctccacatagggagggcttagagctcacagccttgggaagtgagactagaagaggggagcagaaagggaccttgagtagacaaaggccacacacatcattgtcattactgttttaattgtctggcttctctctggactgggagctcagtgaggattctgaccagtgacttacacaaaaggcgctctatacatattataatatattcgcttactaaatgaataaggactttccaactg

SEQ ID NO: 2207 - DNA, 4468 bp, Homo Sapiens
  NM_003954
gggagctcagcggtcggcggccggcggcgggagatcgcgggcgagcggagcgcaacactcgcttggttggggagatcggcgcttggccggatgagcacaagcctgggagatggcagtgatggaaatggcctgcccaggtgcccctggctcagcagtggggcagcagaaggaactccccaaagccaaggagaagacgccgccactggggaagaaacagagctccgtctacaagcttgaggccgtggagaagagccctgtgttctgcggaaagtgggagatcctgaatgacgtgattaccaagggcacagccaaggaaggctccgaggcagggccagctgccatctctatcatcgcccaggctgagtgtgagaatagccaagagttcagccccaccttttcagaacgcattttcatcgctgggtccaaacagtacagccagtccgagagtcttgatcagatccccaacaatgtggcccatgctacagagggcaaaatggcccgtgtgtgttggaagggaaagcgtcgcagcaaagcccggaagaaacggaagaagaagagctcaaagtccctggctcatgcaggagtggccttggccaaacccctccccaggacccctgagcaggagagctgcaccatcccagtgcaggaggatgagtctccactcggcgccccatatgttagaaacaccccgcagttcaccaagcctctgaaggaaccaggccttgggcaactctgttttaagcagcttggcgagggcctacggccggctctgcctcgatcagaactccacaaactgatcagccccttgcaatgtctgaaccacgtgtggaaactgcaccacccccaggacggaggccccctgcccctgcccacgcaccccttcccctatagcagactgcctcatcccttcccattccaccctctccagccctggaaacctcaccctctggagtccttcctgggcaaactggcctgtgtagacagccagaaacccttgcctgacccacacctgagcaaactggcctgtgtagacagtccaaagcccctgcctggcccacacctggagcccagctgcctgtctcgtggtgcccatgagaagttttctgtggaggaatacctagtgcatgctctgcaaggcagcgtgagctcaggccaggcccacagcctgaccagcctggccaagacctgggcagcaaggggctccagatcccgggagcccagccccaaaactgaggacaacgagggtgtcctgctcactgagaaactcaagccagtggattatgagtaccgagaagaagtccactgggccacgcaccagctccgcctgggcagaggctccttcggagaggtgcacaggatggaggacaagcagactggcttccagtgcgctgtcaaaaaggtgcggctggaagtatttcgggcagaggagctgatggcatgtgcaggattgacctcacccagaattgtccctttgtatggagctgtgagagaagggccttgggtcaacatcttcatggagctgctggaaggtggctccctgggccagctggtcaaggagcagggctgtctcccagaggaccgggccctgtactacctgggccaggccctggagggtctggaatacctccactcacgaaggattctgcatggggacgtcaaagctgacaacgtgctcctgtccagcgatgggagccacgcagccctctgtgactttggccatgctgtgtgtcttcaacctgatggcctgggaaagtccttgctcacaggggactacatccctggcacagagacccacatggctccggaggtggtgctgggcaggagctgcgacgccaaggtggatgtctggagcagctgctgtatgatgctgcacatgctcaacggctgccacccctggactcagttcttccgagggccgctctgcctcaagattgccagcgagcctccgcctgtgagggagatcccaccctcctgcgcccctctcacagcccaggccatccaagaggggctgaggaaagagcccatccaccgcgtgtctgcagcggagctgggagggaaggtgaaccgggcactacagcaagtgggaggtctgaagagcccttggaggggagaatataaagaaccaagacatccaccgccaaatcaagccaattaccaccagaccctccatgcccagccgagagagctttcgccaagggccccagggccccggccagctgaggagacaacaggcagagcccctaagctccagcctcctctcccaccagagcccccagagccaaacaagtctcctcccttgactttgagcaaggaggagtctgggatgtgggaacccttacctctgtcctccctggagccagcccctgccagaaaccccagctcaccagagcggaaagcaaccgtcccggagcaggaactgcagcagctggaaatagaattattcctcaacagcctgtcccagccattttctctggaggagcaggagcaaattctctcgtgcctcagcatcgacagcctctccctgtcggatgacagtgagaagaacccatcaaaggcctctcaaagctcgcgggacaccctgagctcaggcgtacactcctggagcagccaggccgaggctcgaagctccagctggaacatggtgctggcccgggggcggcccaccgacaccccaagctatttcaatggtgtgaaagtccaaatacagtctcttaatggtgaacacctgcacatccgggagttccaccgggtcaaagtgggagacatcgccactggcatcagcagccagatcccagctgcagccttcagcttggtcaccaaagacgggcagcctgttcgctacgacatggaggtgccagactcgggcatcgacctgcagtgcacactggcccctgatggcagcttcgcctggagctggagggtcaagcatggccagctggagaacaggccctaaccctgccctccaccgccggctccacactgccggaagcagccttcctgctcggtgcacgatgctgccctgaaacacaggctcagccgttcccagggatctgccagcccccggctcagcagtgggaccagggcctcgcagcagcaaggtgggggcaagcagaatgcctcccaggatttcacacctgagccctgccccaccctgctgagaaaacactccgccacgtgaagagacagaggaggatggcaggagttacctcgggaaacaaacaggatcttctctgccctgctccagtcgagttggcctgacccgcttggatcagtgaccatttgctggcagacaggggagagcagcttccagcctgggtcagaaggggtgggcgagcccctcggcccctcaccctccaggctgctgtgagagtgtcaagtgtgtaagggcccaaactcaggttcagtgcagaaccaggtcagcaggtatgcccgcccgtaggttaagggggccctctaaaccccttgcctggcctcacctggccagctcaccccttttgggtgtaggggaaaagaatgcctgaccctgggaaggctccctggtagaatacaccacacttttcaggttgttgcaacacaggtcctgagttgacctctggttcagccaaggaccaaagaaggtgtgtaagtgaagtggttctcagtccccagacatgtgcccctttgctgctggctaccactcttccccagagcagcaggccccgagccccttcaggcccagcactgccccagactcgctggcactcagttccctcatctgtaaaggtgaagggtgatgcaggatatgcctgacaggaacagtctgtggatggacatgatcagtgctaaggaaagcagcagagagagacgctccggcgccccagccccactatcagtgtccagcgtgctggttccccagagcacagctcagcatcacactgacactcaccctgccctgcccctggccagagggtactgccgacggcactttgcactctgatgacctcaaagcactttcatggctgccctctggcagggcagggcagggcagtgacactgtaggagcatagcaagccaggagatggggtgaagggacacagtcttgagctgtccacatgcatgtgactcctcaaacctcttccagatttctctaagaatagcacccccttccccattgccccagcttagcctcttctcccaggggagctactcaggactcacgtagcattaaatcagctgtgaatcgtcagggggtgtctgctagcctcaacctcctggggcaggggacgccgagactccgtgggagaagctcattcccacatcttgccaagacagcctttgtccagctgtccacattgagtcagactgctcccggggagagagccccggcccccagcacataaagaactgcagccttggtactgcagagtctgggttgtagagaactctttgtaagcaataaagtttggggtgatgacaaatgtttccaggc

SEQ ID NO: 2208 - DNA, 2746 bp, Homo Sapiens
  NM_003955
ggctccgacttggactccctgctccgctgctgccgcttcggccccgcacgcagccagccgccagccgcccgcccggcccagctcccgccgcggccccttgccgcggtccctctcctggtcccctcccggttggtccgggggtgcgcagggggcagggcgggcgcccaggggaagctcgagggacgcgcgcgcgaaggctcctttgtggacttcacggccgccaacatctgggcgcagcgcgggccaccgctggccgtctcgccgccgcgtcgccttggggacccgagggggctcagccccaaggacggagacttcgattcgggaccagccccccgggatgcggtagcggccgctgtgcggaggccgcgaagcagctgcagccgccgccgcgcagatccacgctggctccgtgcgccatggtcacccacagcaagtttcccgccgccgggatgagccgccccctggacaccagcctgcgcctcaagaccttcagctccaagagcgagtaccagctggtggtgaacgcagtgcgcaagctgcaggagagcggcttctactggagcgcagtgaccggcggcgaggcgaacctgctgctcagtgccgagcccgccggcacctttctgatccgcgacagctcggaccagcgccacttcttcacgctcagcgtcaagacccagtctgggaccaagaacctgcgcatccagtgtgaggggggcagcttctctctgcagagcgatccccggagcacgcagcccgtgccccgcttcgactgcgtgctcaagctggtgcaccactacatgccgccccctggagccccctccttcccctcgccacctactgaaccctcctccgaggtgcccgagcagccgtctgcccagccactccctgggagtccccccagaagagcctattacatctactccgggggcgagaagatccccctggtgttgagccggcccctctcctccaacgtggccactcttcagcatctctgtcggaagaccgtcaacggccacctggactcctatgagaaagtcacccagctgccggggcccattcgggagttcctggaccagtacgatgccccgctttaaggggtaaagggcgcaaagggcatgggtcgggagaggggacgcaggcccctctcctccgtggcacatggcacaagcacaagaagccaaccaggagagagtcctgtagctctggggggaaagagggcggacaggcccctccctctgccctctccctgcagaatgtggcaggcggacctggaatgtgttggagggaagggggagtaccacctgagtctccagcttctccggaggagccagctgtcctggtgggacgatagcaaccacaagtggattctccttcaattcctcagcttcccctctgcctccaaacaggggacacttcgggaatgctgaactaatgagaactgccagggaatcttcaaactttccaacggaacttgtttgctctttgatttggtttaaacctgagctggttgtggagcctgggaaaggtggaagagagagaggtcctgagggccccagggctgcgggctggcgaaggaaatggtcacaccccccgcccaccccaggcgaggatcctggtgacatgctcctctccctggctccggggagaagggcttggggtgacctgaagggaaccatcctggtaccccacatcctctcctccgggacagtcaccgaaaacacaggttccaaagtctacctggtgcctgagagcccagggcccttcctccgttttaagggggaagcaacatttggaggggatggatgggctggtcagctggtctccttttcctactcatactataccttcctgtacctgggtggatggagcgggaggatggaggagacgggacatctttcacctcaggctcctggtagagaagacaggggattctactctgtgcctcctgactatgtctggctaagagattcgccttaaatgctccctgtcccatggagagggacccagcataggaaagccacatactcagcctggatgggtggagaggctgagggactcactggagggcaccaagccagcccacagccagggaagtggggagggggggcggaaacccatgcctcccagctgagcactgggaatgtcagcccagtaagtattggccagtcaggcgcctcgtggtcagagcagagccaccaggtcccactgccccgagccctgcacagccctccctcctgcctgggtgggggaggctggaggtcattggagaggctggactgctgccaccccgggtgctcccgctctgccatagcactgatcagtgacaatttacaggaatgtagcagcgatggaattacctggaacagttttttgtttttgtttttgtttttgtttttgtgggggggggcaactaaacaaacacaaagtattctgtgtcaggtattgggctggacagggcagttgtgtgttggggtggtttttttctctatttttttgtttgtttcttgttttttaataatgtttacaatctgcctcaatcactctgtcttttataaagattccacctccagtcctctctcctcccccctactcaggcccttgaggctattaggagatgcttgaagaactcaacaaaatcccaatccaagtcaaactttgcacatatttatatttatattcagaaaagaaacatttcagtaatttataataaagagcactattttttaatgaaaaaaaaaaaaaaaaa

SEQ ID NO: 2209 - DNA, 4473 bp, Homo Sapiens
  NM_003959
gaccgtgaggctgtgagtcgcgcggacggagccggacaaaagcgggcggcggcggcaggatgaacagcatcaagaacgtgccggcgcgggtgctgagccgcaggccgggccacagcctggaggccgagcgcgagcagttcgacaagacccaggccatcagcatcagcaaagccatcaacacccaggaggcccccgtgaaggagaagcacgcccggcgcatcattctgggcacacaccacgagaagggggctttcaccttctggtcctatgccattgggctgccgctgcccagcagctccattctcagctggaagttctgccacgtcctccacaaggtccttcgagacgggcaccccaatgtgctgcatgactgccagcggtaccgcagcaacatccgggagattggagacctgtggggacatttgcatgaccgctacggacagctggtgaatgtctacaccaagctgctgctgaccaagatctccttccacctcaagcatccccagtttcccgcgggcctggaggtgacagatgaggtactggagaaggcagctgggaccgatgtcaacaacatcttccagctcactgtggagatgtttgattacatggattgtgagctgaagctttctgaatcagttttccgacagctcaacacggccatcgccgtatcccagatgtcctcaggccagtgccgcctggcccccctcatccaggtcatccaggactgcagccacctctaccactacacggtcaagctcctgttcaagctacactcttgtctccctgcggacaccctgcaaggccacagggaccggttccacgagcagtttcacagcctcaggaacttcttccgcagagcctccgacatgctgtacttcaagcggctcatccagatcccccggctgcccgagggaccccctaacttcctgcgggcctcagccctggctgagcacatcaagccggtggtggtgatccccgaggaggccccggaagatgaggagccggagaatctcattgagatcagcacagggccccccgcgggggagccagtggtggtggctgacctcttcgatcagacgtttggaccccccaatgggtctgtgaaggacgacagggacctccagattgagagcttgaagagagaggtggaaatgctccgctctgaactggagaagatcaagctggaggcccagcggtacatcgcgcagctgaagagccaggtgaatgcactggagggtgagctggaggagcagcggaagcagaagcagaaggccctggtggataatgagcagctccgccacgagctggcccagctgagggctgcccagctggagggcgagcggagccagggcctgcgtgaggaggctgagaggaaggccagtgccacggaggcgcgctacaacaagctgaaggaaaagcacagtgagctcgtccatgtgcacgcggagctgctcagaaagaacgcggacacagccaagcagctgacggtgacgcagcaaagccaggaggaggtggcgcgggtgaaggagcagctggccttccaggtggagcaggtgaagcgggagtcggagttgaagctagaggagaagagcgaccagctggagaagctcaagagggagctggaggccaaggccggagagctggcccgcgcgcaggaggccctgagccacacagagcagagcaagtcggagctgagctcacggctggacacgctgagtgcggagaaggatgctctgagtggagctgtgcggcagcgggaggcagacctgctggcggcgcagagcctggtgcgcgagacagaggcggcgctgagccgggagcagcagcgcagctcccaggagcagggcgagttgcagggccggctggcagagagggagtctcaggagcaggggctgcggcagaggctgctggacgagcagttcgcagtgttgcggggcgctgctgccgaggccgcgggcatcctgcaggatgccgtgagcaagctggacgaccccctgcacctgcgctgtaccagctccccagactacctggtgagcagggcccaggaggccttggatgccgtgagcaccctggaggagggccacgcccagtacctgacctccttggcagacgcctccgccctggtggcagctctgacccgcttctcccacctggctgcggataccatcatcaatggcggtgccacctcgcacctggctcccaccgaccctgccgaccgcctcatagacacctgcagggagtgcggggcccgggctctggagctcatggggcagctgcaggaccagcaggctctgcggcacatgcaggccagcctggtgcggacacccctgcagggcatccttcagctgggccaggaactgaaacccaagagcctagatgtgcggcaggaggagctgggggccgtggtcgacaaggagatggcggccacatccgcagccattgaagatgctgtgcggaggattgaggacatgatgaaccaggcacgccacgccagctcgggggtgaagctggaggtgaacgagaggatcctcaactcctgcacagacctgatgaaggctatccggctcctggtgacgacatccactagcctgcagaaggagatcgtggagagcggcaggggggcagccacgcagcaggaattttacgccaagaactcgcgctggaccgaaggcctcatctcggcctccaaggctgtgggctggggagccacacagctggtggaggcagctgacaaggtggtgcttcacacgggcaagtatgaggagctcatcgtctgctcccacgagatcgcagccagcacggcccagctggtggcggcctccaaggtgaaggccaacaagcacagcccccacctgagccgcctgcaggaatgttctcgcacagtcaatgagagggctgccaatgtggtggcctccaccaagtcaggccaggagcagattgaggacagagacaccatggatttctccggcctgtccctcatcaagctgaagaagcaggagatggagacgcaggtgcgtgtcctggagctggagaagacgctggaggctgaacgcatgcggctgggggagttgcggaagcaacactacgtgctggctggggcatcaggcagccctggagaggaggtggccatccggcccagcactgccccccgaagtgtaaccaccaagaaaccacccctggcccagaagcccagcgtggcccccagacaggaccaccagcttgacaaaaaggatggcatctacccagctcaactcgtgaactactaggccccccaggggtccagcagggtggctggtgacaggcctgggcctctgcaactgccctgacaggaccgagaggccttgcccctccacctggtgcccaagcctcccgccccaccgtctggatcaatgtcctcaaggcccctggcccttactgagcctgcagggtcctgggccatgtgggtggtgcttctggatgtgagtctcttatttatctgcagaaggaactttggggtgcagccaggacccggtaggcctgagcctcaactcttcagaaaatagtgtttttaatattcctcttcagaaaatagtgtttttaatattccgagctagagctcttcttcctacgtttgtagtcagcacactgggaaaccgggccagcgtggggctccctgccttctggactcctgaaggtcgtggatggatggaaggcacacagcccgtgccggctgatgggacgagggtcaggcatcctgtctgtggccttctggggcaccgattctaccaggccctccagctgcgtggtctccgcagaccaggctctgtgtgggctagaggaatgtcgcccattactcctcaggcctggccctcgggcctccgtgatgggagccccccaggaggggtcagatgctggaaggggccgctttctggggagtgaggtgagacatagcggcccgggcgctgccttcactcctggagtgagtttccatttccagctggaatctgcagccacccccatttcctgttttccattcccccgttctggccgcgccccactgcccacctgaaggggtggtttccagccctccggagagtgggcttggccctaggccctccagctcagccagaaaaagcccagaaacccaggtgctggaccagggccctcagggaggggaccctgcggctagagtgggctaggccctggctttgcccgtcagatttgaacgaatgtgtgtcccttgagcccaaggagagcggcaggaggggtgggaccaggctgggaggacagagccagcagctgccatgccctcctgctccccccaccccagccctagccctttagcctttcaccctgtgctctggaaaggctaccaaatactggccaaggtcaggaggagcaaaaatgagccagcaccagcgccttggctttgtgttagcatttcctcctgaagtgttctgttggcaataaaatgcactttgactgtttgttgtc

SEQ ID NO: 2210 - DNA, 1559 bp, Homo Sapiens
  NM_003961
cttggaccttggccctcgctttccaggatgggtagggtggaagacgggggaacaactgaggagctggaggactgggacccaggcaccagtgccctgccagctcctgggatcaagcagggtcccagggaacagacaggcacggggcccctgtcccaaaagtgctgggagcctgagcctgatgctcccagccagcctggcccagccctttggtccaggggtcgggcccgcactcaggccttggctggcggctcctcactgcagcagctggaccccgagaacacaggcttcatcggtgcggacaccttcactggcctggtgcacagccatgagctgcccctggacccggccaagctggacatgctggtggccctggctcagagcaacgagcagggccaggtctgctaccaggagctggtggacctgatcagcagcaagcgctccagcagtttcaagcgggccattgctaacggacagcgggcactgccccgggacgggccgctggatgagccaggcctaggtgtctacaagcggtttgtgcgttacgtggcctacgagatcctgccttgtgaggtggaccgccgctggtacttctaccgtcaccgcagctgcccaccccccgtgttcatggcctcggtcactcttgcccagatcatcgtgttcctgtgttacggggcccgcctcaacaagtgggtgctgcagacctaccaccccgagtacatgaagagcccccttgtgtaccaccccgggcaccgtgcccgcgcctggcgcttcctcacctacatgttcatgcacgttgggctggagcagctggggttcaacgccctcctgcagctgatgatcggggtgcccctggagatggtgcacggcctgctccgcatcagcctgctctacctggcaggcgtgctggcaggctccctaaccgtctccatcaccgacatgcgggccccggtggtgggaggctccggcggggtctacgccctgtgctcggcacacctggccaacgttgtcatgaactgggctgggatgagatgtccctacaagttgctgaggatggtgctggccttggtgtgcatgagctccgaggtgggccgggccgtgtggctgcgcttctccccgccgctgcccgcctcgggcccacagcccagcttcatggcgcacctggcaggcgcggtggtgggggtgagcatgggcctgaccatcctgcggagctacgaggagcgcctgcgggaccagtgcggctggtgggtggtgctgctggcctacggcaccttcctgctcttcgccgtcttctggaacgtcttcgcctacgacctgctgggcgcccacatccccccaccgccctgaccggctacctgaggctgcacaggccagggctcgggcatgtggtggccgcccaccaggggccttcacgtctgccctttgtgaacggacgtctcagggctgctgtgccccttgggtgtgggtggcctcaaaggaggccctgtcccagccacccaccccccactcccaggacttgcggtctgagcctttttggataattaataaatattttacacagc

SEQ ID NO: 2211 - DNA, 1540 bp, Homo Sapiens
  NM_003969
aggcgcacaacgcaggccgggcgggaagagccaaagcgggcaggcggcggaaatatccgaagcggcggggcgcccgaggccgttgccgacctccgcgctaaagccgctgctgccgcggaagacgatcctccagtacccgcccgccgtcaccgcagctgccgtgtcctcctcccacccctagccgcaccccctcgcggagggatcagctgagcggccaaacggcacggtcgggggagccccgagtccgcagctgcagcggggcctgagaccagagttggcgagggcaaggaaggagcggccccgggcagtgggggcggggccgggcgggcccgagaacagccgaatttggccgagcgctgccgagcgagtccgaggcgctgggccaggccggagccggactacgggagccgaggcgggccgcgcggtgggcgcggagaggagcggagcggcgcggcaggccgggcgggtggcggcagcagcggaggaggccgcagctgcgggtccgaggagcggaggcgacgcgggcggcggcggggggccgggtggccggggtcccgggccccgcggcggcggcagcggcggcggcggcggcaggatgatcaagctgttctcgctgaagcagcagaagaaggaggaggagtcggcgggcggcaccaagggcagcagcaagaaggcgtcggcggcgcagctgcggatccagaaggacataaacgagctgaacctgcccaagacgtgtgatatcagcttctcagatccagacgacctcctcaacttcaagctggtcatctgtcctgatgagggcttctacaagagtgggaagtttgtgttcagttttaaggtgggccagggttacccgcatgatccccccaaggtgaagtgtgagacaatggtctatcaccccaacattgacctcgagggcaacgtctgcctcaacatcctcagagaggactggaagccagtccttacgataaactccataatttatggcctgcagtatctcttcttggagcccaaccccgaggacccactgaacaaggaggccgcagaggtcctgcagaacaaccggcggctgtttgagcagaacgtgcagcgctccatgcggggtggctacatcggctccacctactttgagcgctgcctgaaatagggttggcgcatacccacccccgccacggccacaagccctggcatcccctgcaaatatttattgggggccatgggtaggggtttggggggcggccggtgggggaatcccctgccttggccttgcctccccttcctgccacgtgcccctagttatttttttttttttaacaccatgtgattaaggtcggcgctgcctcccccgacccactcagcgatgggaaatgaattggcttgtctagcccccctgctgggtgcttgttcagcccccactctgggctgtggagtgggtgggcaacgggcctgggtagctgggcccaggcaacccacccctccacctctggaggtcccaccaggctattaaaggggaatgttactgcaaaaaaaaaaaaaaaaa

SEQ ID NO: 2212 - DNA, 1870 bp, Homo Sapiens
  NM_003974
cttcagagaagggaaacacacggctaagaagagagaggcaagggcaggagtgaaggagagagctgaagcctggggctccgagatggtcagaggatgggagacggggcagtgaaacaaggcttcttgtatcttcagcagcagcagacgtttggaaagaaatggcgccgcttcggcgcctcactgtatggagggtcggactgcgccttggcccggctggagctgcaggagggcccggagaagcctcgtcggtgtgaggctgcccggaaggtcatccgcctcagtgactgcctgcgggtggccgaggccggcggagaggccagcagcccccgggacaccagtgccttcttcctggagaccaaggagcgcctgtacctcctggcggcccctgcagcggagcgcggcgactgggtgcaggccatctgcctcctggccttccccgggcagaggaaggagctctcggggccagagggaaagcagagccggccctgcatggaggaaaatgaattgtacagcagcgcagtcacagtcggcccccacaaggaatttgctgtgaccatgagacctacagaagccagtgagaggtgccacctgcgggggtcctataccctccgggctggggagagtgccctggagctgtggggtgggcccgagccagggacccagctgtacgactggccctacaggtttctgcggcgctttgggcgggacaaggtaaccttttcctttgaggcaggccgtcgctgcgtctctggagagggcaactttgagttcgaaacccggcaaggcaatgagatcttcttggccctggaagaggccatctctgcccagaagaatgctgcacccgctacaccccaaccgcagccagccacaatccccgcgtcgctgccccggcctgatagcccctactctcggccgcatgactcactgccgccgccttcacccaccacaccggtgcctgctccacggcctcggggccaggagggggagtatgccgtgcccttcgatgcggtggcccgttccttggggaagaacttcaggggcatcttggcagtccctcctcagctcctggccgaccctctgtacgacagcattgaggagaccctgccccctcgacctgaccacatatacgatgagcccgagggagtggctgccctgtccctctatgacagcccgcaggagccccggggtgaggcatggaggaggcaggcgacagctgacagggaccctgctggcctccagcatgtccagccagccgggcaggatttctctgcttctggctggcagccaggaactgagtatgacaatgttgtactaaagaaaggcccaaagtgacagaggcagcagagggatggtccaccgccccttggcttctgctggtgactcctcctggccactgcatcagaagaacctcctctgccccttctggagcccgaggcctggcctgtcttcgttggggctgataaattgcctctcccagggcctgctgggtgagtcaccatcccaaagcaggaagggtgccctggagagaaccaccctcctcctactctttttccacttcctcctctttctttccccagctgaggaggaacctggggcatttagggcagaggacaaaaggatgtcagcaattgcttgggctgcttggctatgcaagcctcctgcctgctgatggccacttcagggacagcctgggcccaggcacccagggggatggcggcagcttcctgcacctttcagatttcttggtggcattaaagcattttcagaacaaaaaaaaaaaaaaaaaaaaaaaaaaaaaaaaaaaaaaaaaaaaaaaaaaaaaaaaaaaaaaaaaaaaaaaaaaaaaaaaaaaaaaaaaaaaaaaaaaaaa

SEQ ID NO: 2213 - DNA, 1661 bp, Homo Sapiens
  NM_003975
agaactaaggctgtgggtaaggcgacatttcctgcccccggggccagggtgagaggagagatgatgagttgctgagtgtgcacacctttccggaacacatacacacaccctgctctgggatcccttgtgaggctgccctcatggagttccccctggcccagatatgtccccaagggagtcacgaagcccccatcccaaccttcagcaccttccagatcacagacatgacccgcaggagctgccagaacctgggctacactgcggcatctccccaggccccggaggctgcctccaacacagggaatgctgagagggcagaggaggtgcctggagaaggaagcctgttcctgcaggccgagacccgggcttggttccagaagacccaggcccactggctcctgcagcacggggcagcccctgcctggttccatggcttcatcacccggagggaggcagagaggctgctggagcccaagcctcaggggtgctacttggtgcggttcagcgagagcgcggtgaccttcgtgctgacttacaggagccggacttgctgccgccacttcctgctggcccagctcagggacgggcgccacgtggtgctgggcgaggacagcgcccacgcgcggctgcaggacctgctgctgcactacaccgcgcacccgctcagcccctacggggagacgctcaccgagcccctcgcccgacagactcctgagcctgcaggactttccctgaggaccgaagaatcaaactttggaagcaaaagccaggacccaaacccccagtacagcccaatcatcaaacaggggcaagccccagtcccgatgcagaaagagggggccggggagaaggagccctcccagctgctcaggcccaagcctcccatccccgccaaacctcagctgcccccagaagtctacacaatccctgttccacgacaccgcccggccccacgccccaagccctccaatcctatctacaatgagcctgatgaacccatagctttctatgccatgggccggggcagccctggggaagcccccagcaacatctatgtggaagtggaagatgagggcctacccgccacccttgggcaccctgtcctacggaagagctggtccaggcctgtcccaggaggccagaatacaggtggctcccagctgcattctgagaactctgtgattgggcaaggccctcccctgccccaccagcccccacccgcctggagacacaccctcccccacaatctttctagacaggtgcttcaggacagaggacaggcatggcttccccttgggcctcctcagtaggcggtctggcctgacccccaacaaagaagcctggaggtcagagaagcaaatgcggagcctgctccctcctaagaagatcccaagaatccaatggctcagtccttggtgatctaagacagcaaagaagtgtgcaaggagggccctgttagctcccactgtcctggtttctcctcctggagtctaatttccttggccctctgagccttttgagtctgggccctggtccaatgctgctgttgtctgaggaatggtttggtgagaacagatgttagaacttgtttgttgattcttgtctggctaataaatcatcaccaactgccttctcctacagggaaaaaaaaaaaaaaaaaa

SEQ ID NO: 2214 - DNA, 1250 bp, Homo Sapiens
  NM_003977
gcttctgccctcaaccaaaatggcgctagctcggaagctgccgaggtgctaggagttgccgaagcaagtccggaagctaccgagcgagtccggaagttgccgaaagggagcagcggggaaggaggatggcggatatcatcgcaagactccgggaggacgggatccaaaaacgtgtgatacaggaaggccgaggagagctcccggactttcaagatgggaccaaggccacgttccactaccggacgctgcacagtgacgacgagggcaccgtgctggacgacagccgggctcgtggcaagcccatggagctcatcattggcaagaagttcaagctgcctgtgtgggagaccatcgtgtgcaccatgcgagaaggggagattgcccagttcctctgtgacatcaagcatgtggtcctgtacccgctggtggccaagagtctccgcaacatcgcggtgggcaaggaccccctggagggccagcggcactgctgcggtgttgcacagatgcgtgaacacagctccctgggccatgctgacctggacgccctgcagcagaacccccagcccctcatcttccacatggagatgctgaaggtggagagccctggcacgtaccagcaggacccatgggccatgacagacgaagagaaggcaaaggcagtgccacttatccaccaggagggcaaccggttgtaccgcgaggggcatgtgaaggaggctgctgccaagtactacgatgccattgcctgcctcaagaacctgcagatgaaggaacagcctgggtcccctgaatggatccagctggaccagcagatcacgccgctgctgctcaactactgccagtgcaagctggtggtcgaggagtactacgaggtgctggaccactgctcttccatcctcaacaagtacgacgacaacgtcaaggcctacttcaagcggggcaaggcccacgcggccgtgtggaatgcccaggaggcccaggctgactttgccaaagtgctggagctggacccagccctggcgcctgtggtgagccgagagctgcaggccctggaggcacggatccggcagaaggacgaagaggacaaagcccggttccgggggatcttctcccattgacaggagcacttggccctgccttacctgccaagcccactgctgcagctgccagcccccctgcccgtgctgcgtcatgcttctgtgtatataaaggcctttatttatctctctctgaaaaaaaaaaaaaaaaaa

SEQ ID NO: 2215 - DNA, 4608 bp, Homo Sapiens
  NM_003980
gggaaatagcgtctccgtaccctcgccccacctgggctgctcctcggaccgccgctcgtcccagactccaggaggcgccaccaggcctcgctgaccccgctccatatctccgggagccctcagctggtcggccgcggcgaccggaagctccggactgaggtactggttccgcccgccgctcttccagccgagactcggcagcggcggtcggagcggctgccacgccgcacctgcccgcgagggggcgcgccaggcccaggccgcagccgactgccgcgctctctgtccccgccctccgccatccccggactgcgctcacctgtctgggccgctggcctgggaggcgggggccggcgggagccaagccgaggaaagggcggagcggctctccgggcgcgtcatcggagcaccatggcggagctaggagctggcggcgacggccacaggggcggcgacggcgcagtgcgaagcgaaacagcacccgacagctacaaagtgcaagataagaaaaatgcctccagccgccctgcctctgcaatttcaggacaaaataacaaccactcaggaaataaaccagaccctccgcctgtgttacgtgttgatgaccggcagcggctggcccgggagcgacgtgaggaacgggagaaacagctagctgcaagagaaatagtgtggttagaaagagaagagcgagccaggcagcactacgagaagcacctggaagagcggaagaagaggttggaggagcagaggcagaaggaggagcggaggagggctgctgtggaggagaagcggaggcagagacttgaggaggacaaagaacgccacgaagctgttgtacggcgcacaatggaaaggagccagaagccaaaacagaagcataaccgttggtcgtggggaggctctctccatgggagccctagcatccacagtgcagatccagacaggcggtcagtttccaccatgaatctttcgaaatatgttgatcccgtcattagcaagcggctctcctcttcatctgcaactttactaaattctccagatagagctcgccgcctgcagctcagcccatgggagagcagcgttgttaacagactcctgacgcccacacattcgttcctggccagaagtaaaagcacagctgccttgtctggagaagcagcatcttgcagccccatcatcatgccctacaaagctgcacactctagaaattcgatggatcgaccaaaactctttgtaacaccacctgagggctcttctcgcaggaggatcattcatggcacagcgagctataaaaaagaaagagagagagaaaatgtactcttcctcacatctggcacccgaagggctgtatctccatctaatcccaaagcaagacaaccagctcgctcccgactttggcttccgtccaagtctcttcctcatttgcctggcacacccagaccgacatcctccttgccacccggctcagtcaaagctgctcctgctcaggtccggcccccatcccccggcaacatccgccctgtcaagagggaagtcaaagtggagcctgagaagaaagatcctgagaaggaacctcagaaagttgccaatgagccctcactaaagggcagagcacctttagtgaaggtagaagaagccacagttgaagagcggacacctgctgaaccagaagttggccctgctgctccagccatggccccagctccagcctcggccccagctccagcctcggccccagctccagccccggtccccaccccagccatggtctcagccccgtcatccactgtgaatgccagtgcttctgttaagacttctgcaggcaccaccgacccagaggaggccacaaggcttctagctgagaagaggcggctggcccgagagcagagagaaaaggaagaaagggagaggagggagcaggaagagcttgaaagacaaaagagagaggaattggctcaacgtgtggctgaagagaggacgactcgccgtgaggaggagtcgcgcaggctggaagccgagcaggcccgggagaaggaggagcagctgcagcggcaggcggaggagcgggcgctgcgcgagcgggaggaggcagagcgcgcccagaggcagaaagaagaagaagctcgcgttcgtgaagaagcagagagggtccggcaggaacgagagaagcatttccagagagaagagcaagagcgcctggagagaaagaagcgacttgaggagattatgaaaagaaccaggagaacagaagctacagataagaaaaccagtgatcagagaaacggtgatatagccaagggagctctcactggaggaacagaggtgtctgcacttccatgtacaacaaacgctccgggaaatggaaagccagttggcagcccacatgtggttacctcacaccagtcaaaagtgacagtggagagcactcccgatttggaaaaacaaccaaatgaaaatggtgtatctgttcagaatgaaaattttgaagaaattataaacttacccattggatctaaaccatccagattagatgtcaccaacagtgagagcccagaaattcctttgaatccaattttggcctttgatgatgaagggacacttgggcccctgcctcaggtagatggtgttcagacacagcagactgcagaagttatatgagtgtttcttctgaagaaccaaagctgaaatttaatgagaatttctacaattaatggaattcctttcctgctataaaggagcatcccctccacccgttttctagagttcttgaccatcattttgaaaagatttattaaaactagctaaagacaacagactggatagcttttctaataattttcatcaataggaaaaaagaaatacgtctcattcttcaatactttaaaatggctttttccagtgtgctccttcttagcaatcaatatttttctgcattctttaaaagacaagagaatttggttataaaagaaatgggctgactaggcatgatttttttggtcttaaaagcttaacatgtaaaattggcaaaaaaaattttttaccttttataatacttgaaaaataagtacctctttgttctacaagtagaatgaataggagaagagtttaagcctgtttttttaaaatattattgcaaagagctctatttgtagaagcaaattataggcagattaccaggttcttataaatacagcttgtacatggacattctgcaaacccagctgtcacatttttcttgcaactccttttgcaaaagcagactaaaatgttttaaaatgtgaaaaaacattattttttcaaagcaagaaaataatttactgccctcttacataatgtatttataaagtttttccagataaactaatcaaataaattagaataatgtgacaacattacaaatttaatttgttagctgcattccttctgatgttaccacgatagaatgttactgatgattcagggctatttctgaagtctgtatgttgctgctgtccccagtgatggtggacttatctttgccttacctgatcacaaattatgttggggaaaataaagatttaatatttctttaaatagaaaaagaatttggttttgctcgtttaagagcaatgagaaaatgatggaatgttgactgtgtttggcacacaggacacggaccttcatggaagtccttgctctgcgtggcatctgtcagcttttcacctttcattcttattcttcacttttgctgctgagcctagctgtacaaacttgcactttcatttgctaatataaattcagttttattttaccattttagagactactaatgattaaatgtagaaggagagggtgcacatgtttttatgtggagtgtttaaaagataaatttataccactgtaatgtgcagcttttattaaaagagaaattggttgaactgctaggttgaatgagagacttcatctattggactattttttttaatccaggcatatggtctttagtaatggcttgtaatttgtgaaaacattaatttgggggttttccctgttttcagttgtccatgtacacatagtcattatattagaaaagaaatctgttcaacaaacttgtttaatttgtttaaatcaacatagcatgaaacaccaaataaaatgtttgacatagttttacttttagctttctcatatgttataacttcactcagattgattcttgagtcttcagattgtccttcatttaactcagtgacattttcctagcctcctgttgattaagcatataggatagccttatttaaaatttagagcagtaggtgtattttggctgtttttctttttcatgtgtgtttttaaactttagtcatcattagcaaacggaaagccttctaagtaatcaagttttaattagaagtggtgcaaaattcttaattatattgtgttaaagagcagcgctgccagagaatgaccctgacctttacaatggctggcttgctttttggccagcactggaaaaatctatatttacttgcagaccttaaggaggtcttcagtattcaccctacattaaggggagcgctcaggaatcaaatatggccctcagtatgaaatgagagtgaatgggct

SEQ ID NO: 2216 - DNA, 2531 bp, Homo Sapiens
  NM_003982
gtgcaaccttcctccctttcttaaatgcttggggtgagagagaagagaggctagggtggggcatggaggacacagagagagagagtgctgtgtattccttccccgctactgtcctgtcctcagctaacttgctctgggacagcttccccagggctacagatactgcactcagctgactgtcctttcttctgggcccctggtcccagagcagagctgacaaaggagattcctgagagagcaccttcttatcacagaaagtgctgagccaagagctcctagctgccccttttgcagatgtgaagggccagtgaaccttggacccagatggttgcttaatactcctttccccctccctcactccttcctttgcgggctgcctcacctcctccacccttcttgcttaaatccataggcatttgtctggccttcccttttactgctggctgggaaggaggagcatcagaccacagatcctggaaggcacttctctccctgactgctgctcacactgccgtgagaacctgcttatatccaggaccaaggaggcaatgccaggaagctggtgaagggtttcctctcctccaccatggttgacagcactgagtatgaagtggcctcccagcctgaggtggaaacctcccctttgggtgatggggccagcccagggccggagcaggtgaagctgaagaaggagatctcactgcttaacggcgtgtgcctgattgtggggaacatgatcggctcgggcatctttgtttcccccaagggtgtgctcatatacagtgcctcctttggtctctctctggtcatctgggctgtcgggggcctcttctccgtctttggggccctttgttatgcggaactgggcaccaccattaagaaatctggggccagctatgcctatatcctggaggcctttggaggattccttgctttcatcagactctggacctccctgctcatcattgagcccaccagccaggccatcattgccatcacctttgccaactacatggtacagcctctcttcccgagctgcttcgccccttatgctgccagccgcctgctggctgctgcctgcatttgtctcttaaccttcattaactgtgcctatgtcaaatggggaaccctggtacaagatattttcacctatgctaaagtattggcactgatcgcggtcatcgttgcaggcattgttagacttggccagggagcctctactcattttgagaattcctttgagggttcatcatttgcagtgggtgacattgccctggcactgtactcagctctgttctcctactcaggctgggacaccctcaactatgtcactgaagagatcaagaatcctgagaggaacctgcccctctccattggcatctccatgcccattgtcaccatcatctatatcttgaccaatgtggcctattatactgtgctagacatgagagacatcttggccagtgatgctgttgctgtgacttttgcagatcagatatttggaatatttaactggataattccactgtcagttgcattatcctgttttggtggcctcaatgcctccattgtggctgcttctaggcttttctttgtgggctcaagagaaggccatctccctgatgccatctgcatgatccatgttgagcggttcacaccagtgccttctctgctcttcaatggtatcatggcattgatctacttgtgcgtggaagacatcttccagctcattaactactacagcttcagctactggttctttgtggggctttctattgtgggtcagctttatctgcgctggaaggagcctgatcgacctcgtcccctcaagctcagcgttttcttcccgattgtcttctgcctctgcaccatcttcctggtggctgttccactttacagtgatactatcaactccctcatcggcattgccattgccctctcaggcctgcccttttacttcctcatcatcagagtgccagaacataagcgaccgctttacctccgaaggatcgtggggtctgccacaaggtacctccaggtcctgtgtatgtcagttgctgcagaaatggatttggaagatggaggagagatgcccaagcaacgggatcccaaatctaactaaacaccatctggaatcctgatgtggaaagcaggggtttctggtctactggctagagctaaggaagttgaaaaggaaagctcacttctttggaggcacctgtccagaagcctggcctaggcagcttcaacctttgaacttactttttgaaatgaaaagtaatttatttgttttgctacatactgttccagacttttaaaggggacaatgaaggtgactgtggggaggagcatgtcaggtttgggcttggttgttttagaagcacctgggtgtgcctacctactcctcttttcttttaaaagggcccacaatgctccaatttcctgtctcctttagagagacatgaaactatcacaggtgctggatgacaataaaagtttatgttcctaaaaaaaaaaaaaaaaaaaaaaaa

SEQ ID NO: 2217 - DNA, 1863 bp, Homo Sapiens
  NM_003992
ggggcactggtacctccaggacctggagtgtactggaagaaatggtgcagtccagatgcatcactgtaagcgataccgctcccctgaaccagacccgtacctgagctaccgatggaagaggaggaggtcctacagtcgggaacatgaagggagactgcgatacccgtcccgaagggagcctcccccacgaagatctcggtccagaagccatgaccgcctgccctaccagaggaggtaccgggagcgccgtgacagcgatacataccggtgtgaagagcggagcccatcctttggagaggactactatggaccttcacgttctcgtcatcgtcggcgatcgcgggagagggggccataccggacccgcaagcatgcccaccactgccacaaacgccgcaccaggtcttgtagcagcgcctcctcgagaagccaacagagcagtaagcgcagcagccggagtgtggaagatgacaaggagggtcacctggtgtgccggatcggcgattggctccaagagcgatatgagattgtggggaacctgggtgaaggcacctttggcaaggtggtggagtgcttggaccatgccagagggaagtctcaggttgccctgaagatcatccgcaacgtgggcaagtaccgggaggctgcccggctagaaatcaacgtgctcaaaaaaatcaaggagaaggacaaagaaaacaagttcctgtgtgtcttgatgtctgactggttcaacttccacggtcacatgtgcatcgcctttgagctcctgggcaagaacacctttgagttcctgaaggagaataacttccagccttaccccctaccacatgtccggcacatggcctaccagctctgccacgcccttagatttctgcatgagaatcagctgacccatacagacttgaaaccagagaacatcctgtttgtgaattctgagtttgaaaccctctacaatgagcacaagagctgtgaggagaagtcagtgaagaacaccagcatccgagtggctgactttggcagtgccacatttgaccatgagcaccacaccaccattgtggccacccgtcactatcgcccgcctgaggtgatccttgagctgggctgggcacagccctgtgacgtctggagcattggctgcattctctttgagtactaccggggcttcacactcttccagacccacgaaaaccgagagcacctggtgatgatggagaagatcctagggcccatcccatcacacatgatccaccgtaccaggaagcagaaatatttctacaaagggggcctagtttgggatgagaacagctctgacggccggtatgtgaaggagaactgcaaacctctgaagagttacatgctccaagactccctggagcacgtgcagctgtttgacctgatgaggaggatgttagaatttgaccctgcccagcgcatcacactggccgaggccctgctgcaccccttctttgctggcctgacccctgaggagcggtccttccacaccagccgcaacccaagcagatgacaggcacaggccaccgcatgaggagatggagggcgggactgggccgcccagccccttgactccagcctcgaccgccaggccccaggccagagccacccaatgaacagtgcaatgtgaaggaaggcaggagcctgcaggggagcagacttggtgcccagctgccagaaagcacagatttgacccaagctatttatatgttataaagttataataaagtgtttcttactgtttgtaacccctggtaccagtgtgtccatctccaggctccttgccttccccttacctgaccttattaataaagtctttcttagcagttcaaaaaaaaaaaaaaaaaa

SEQ ID NO: 2218 - DNA, 3447 bp, Homo Sapiens
  NM_003995
atggcgctgccatcacttctgctgttggtggcagccctggcaggtggggtgcgtcctcccggggcgcggaacctgacgctggcggtggtgctgccagaacacaacctgagctatgcctgggcctggccacgggtgggacccgctgtggcactagctgtggaggctctgggccgggcactgcccgtggacctgcggtttgtcagctccgaactggaaggcgcctgctctgagtacctggcaccgctgagcgctgtggacctcaagctgtaccatgaccccgacctgctgttaggtcccggttgcgtgtaccctgctgcctctgtggcccgctttgcctcccactggcgccttcccctgctgactgcgggtgctgtggcctctggtttttcggctaagaatgaccattatcgtaccctggttcgcactggcccctctgctcccaagctgggtgagtttgtggtgacactacacgggcacttcaattggactgcccgtgctgccttgctgtacctggatgctcgcacagatgaccggcctcactacttcaccatcgagggcgtctttgaggccctgcagggcagcaacctcagtgtgcagcaccaggtgtatgcccgagagccagggggccccgagcaggccacccacttcatccgggccaacgggcgcattgtgtatatctgcggccctctggagatgctgcatgagatcctgcttcaggcccagagggagaatctgaccaatggggattatgtcttcttttacctggatgtctttggggagagtctccgtgcaggccccacacgtgctacaggccggccctggcaggacaatcgcacccgggaacaggcccaggccctcagagaggcctttcagactgtattggtgatcacgtaccgagaacccccaaatcctgagtatcaggaattccagaatcgtctgctgataagagcccgggaagactttggtgtggagctgggcccttccctgatgaacctcatcgctggctgcttctatgatgggatcctgctatatgctgaagtcctgaatgagacaatacaggaaggaggcacccgggaggatggacttcgaattgtggaaaagatgcagggacgaagatatcacggtgtaactgggctggttgtcatggacaagaacaatgaccgagagactgactttgtcctctgggccatgggagacctggattctggggactttcagcctgcagcccactactcgggagctgagaagcagatttggtggacgggacggcctattccctgggtgaagggggctcctccctcggacaatcccccctgtgcctttgacttggacgacccatcctgtgataaaactccactttcaaccctggcaattgtggctctgggcacaggaatcaccttcatcatgtttggtgtttccagcttcctaattttccgaaagctgatgctggagaaggagctggctagcatgttgtggcgtattcgctgggaagaactgcagtttggcaactcagagcgttatcacaaaggtgcaggcagtcgcctcacactgtcgctgcggggatccagttacggctcgctcatgacagcccatgggaaataccagatctttgccaacaccggtcacttcaagggaaatgttgtcgccatcaaacatgtgaataagaagcgcattgagctgacccggcaggttctgtttgaactcaaacatatgagagatgttcagttcaaccatctcactcgcttcattggcgcctgcatagaccctcccaacatttgcattgtcactgaatactgtcctcgtgggagtttacaggatattctagaaaatgacagcatcaacttggactggatgtttcgttattcactcattaatgaccttgttaagggcatggcctttctccacaacagcattatttcatcgcatgggagtctcaagtcctccaactgtgtggtggatagtcgttttgtgctcaaaatcacagactatggcctggccagcttccgatcaactgctgaacctgatgacagccatgccctctatgccaagaagctgtggactgccccagaactgctcagtgggaaccccttgccaaccacaggcatgcagaaggctgacgtctatagctttgggatcatcctgcaggagatagcacttcgcagtggtcctttctacttggagggcctggacctcagccccaaagagattgtccagaaggtacgaaatggtcagcggccatatttccggccaagcattgaccggacccaactgaatgaagagctagttttgctgatggagcgatgttgggctcaggacccagctgagcggccagactttggacagattaagggcttcattcggcgctttaacaaggagggtggcaccagcatattggacaacctcctgctgcgcatggaacagtatgccaataacttggagaagctggtggaggaacgcacacaggcctatctggaggaaaaacgcaaggctgaagctctgctctaccaaatcctaccccattcagtggcagagcagttaaaacggggagagactgtacaggctgaggcctttgacagtgttaccatctacttcagtgacattgttggcttcacagcattgtcagcagagagcacccccatgcaggtagtgacacttcttaatgacctgtatacctgctttgatgccataattgacaactttgatgtctacaaggtggagacgattggggatgcttacatggtggtatctggcctcccaggccgaaatggtcaacgccatgcaccagaaattgctcgtatggccctagcattactagatgcagtttcttcctttcgcatccgccaccgaccccatgaccagctgaggctacgcataggggtccatactgggccagtctgtgctggggttgttggcctgaagatgccccgttattgtctttttggagacacagtgaacactgcttctcgaatggagtctaatggtcaagcgctgaagatccatgtctcctctaccaccaaggatgccctagatgagctaggatgcttccagctagagcttcggggggatgtggaaatgaagggaaaaggaaagatgcgaacatactggctcttaggagagcggaaaggacctcctggactcctgtaaacccccattctttccaagtcagatagtcttctgctgctggtacctgggtgggcaatggccaccatgtctgcacacaccagaaatggacattttcatatgcaatggaaaacagccacaaaaaaacctaccttatatggaagttgtagccctctgcagctcagccctgtacatatacctgtccctctctggcttggtccccttcctccctactttctgtaaatatctgtatctaaaccagaatattttggtcaaatataaaacaataataaaaaaagttctgatgtcaaaaaaaaaaaaaaaaaa

SEQ ID NO: 2219 - DNA, 1486 bp, Homo Sapiens
  NM_004000
gacaggctgtcgaaacctcagtggataaaagacctagagaatgtgtatcccagaagaagctggccaaggatatgggagcaaccaccatggaccagaagtctctctgggcaggtgtagtggtcttgctgcttctccagggaggatctgcctacaaactggtttgctactttaccaactggtcccaggaccggcaggaaccaggaaaattcacccctgagaatattgaccccttcctatgctctcatctcatctattcattcgccagcatcgaaaacaacaaggttatcatcaaggacaagagtgaagtgatgctctaccagaccatcaacagtctcaaaaccaagaatcccaaactgaaaattctcttgtccattggagggtacctgtttggttccaaagggttccaccctatggtggattcttctacatcacgcttggaattcattaactccataatcctgtttctgaggaaccataactttgatggactggatgtaagctggatctacccagatcagaaagaaaacactcatttcactgtgctgattcatgagttagcagaagcctttcagaaggacttcacaaaatccaccaaggaaaggcttctcttgactgcgggcgtatctgcagggaggcaaatgattgataacagctatcaagttgagaaactggcaaaagatctggatttcatcaacctcctgtcctttgacttccatgggtcttgggaaaagccccttatcactggccacaacagccctctgagcaaggggtggcaggacagagggccaagctcctactacaatgtggaatatgctgtggggtactggatacataagggaatgccatcagagaaggtggtcatgggcatccccacatatgggcactccttcacactggcctctgcagaaaccaccgtgggggcccctgcctctggccctggagctgctggacccatcacagagtcttcaggcttcctggcctattatgagatctgccagttcctgaaaggagccaagatcacgcggctccaggatcagcaggttccctacgcagtcaaggggaaccagtgggtgggctatgatgatgtgaagagtatggagaccaaggttcagttcttaaagaatttaaacctgggaggagccatgatctggtctattgacatggatgacttcactggcaaatcctgcaaccagggcccttaccctcttgtccaagcagtcaagagaagccttggctccctgtgaaggattaacttacagagaagcaggcaagatgaccttgctgcctggggcctgctctctcccaggaattctcatgtgggattccccttgccaggctggcctttggatctctcttccaagcctttcctgacttcctcttagatcatagattggacctggttttgttttcctgcagctgttgacttgttgccctgaagtacaataaaaaaaattcattttgctccagtaaaaaaaaaaaaaaaaaa

SEQ ID NO: 2220 - DNA, 2174 bp, Homo Sapiens
  NM_004001
agaacatttctttttcacttcccctttcagactccagaatttgtttgccctctagggtagaatccgccaagctttgagagaaggctgtgactgctgtgctctgggcgccagctcgctccagggagtgatgggaatcctgtcattcttacctgtccttgccactgagagtgactgggctgactgcaagtccccccagccttggggtcatatgcttctgtggacagctgtgctattcctggctcctgttgctgggacacctgcagctcccccaaaggctgtgctgaaactcgagccccagtggatcaacgtgctccaggaggactctgtgactctgacatgccgggggactcacagccctgagagcgactccattcagtggttccacaatgggaatctcattcccacccacacgcagcccagctacaggttcaaggccaacaacaatgacagcggggagtacacgtgccagactggccagaccagcctcagcgaccctgtgcatctgactgtgctttctgagtggctggtgctccagacccctcacctggagttccaggagggagaaaccatcgtgctgaggtgccacagctggaaggacaagcctctggtcaaggtcacattcttccagaatggaaaatccaagaaattttcccgttcggatcccaacttctccatcccacaagcaaaccacagtcacagtggtgattaccactgcacaggaaacataggctacacgctgtactcatccaagcctgtgaccatcactgtccaagctcccagctcttcaccgatggggatcattgtggctgtggtcactgggattgctgtagcggccattgttgctgctgtagtggccttgatctactgcaggaaaaagcggatttcagctctcccaggataccctgagtgcagggaaatgggagagaccctccctgagaaaccagccaatcccactaatcctgatgaggctgacaaagttggggctgagaacacaatcacctattcacttctcatgcacccggatgctctggaagagcctgatgaccagaaccgtatttagtctccattgtcttgcattgggatttgagaagaaaatcagagagggaagatctggtatttcctggcctaaattccccttggggaggacagggagatgctgcagttccaaaagagaaggtttcttccagagtcatctacctgagtcctgaagctccctgtcctgaaagccacagacaatatggtcccaaataaccgactgcaccttctgtgcttcagctcttcttgacatcaaggctcttccgttccacatccacacagccaatccaattaatcaaaccactgttattaacagataatagcaacttgggaaatgcttatgttacaggttacgtgagaacaatcatgtaaatctatatgatttcagaaatgttaaaatagactaacctctaccagcacattaaaagtgattgtttctgggtgataaaattattgatgatttttattttctttatttttctataaagatcatatattacttttataataaaacattataaaaacaacattctgtttaccttttcaaggctgtattggttggagtgtagactgaactgcctggggtctgtttctcttcagtgatgagactcttaggaaggcaggaatggataggatagggggaggagaggagagatggggatttagaatgtagagtgagtgccccttttcttaaaactgaatacagtcacgcaccacataatgatgtttagttcaacaacagactgcatatatgatggtgatcccataaaattataataccatatttctattgtaccttttctattcctatgtttagatatatgagtacttaccattgtgttacaattgcctaaagtattcagtacagtagcatgctgtacaggtttgtagcctaggggcaataggctatacgctacagcctaggtgtgtagtaggccacaccatttaggtttgtataagtacctgctatgatgttcacacaacaaaattgcctgcatttctcaaaatgtatccccatatttcaacaatgcatgactgtactcttctgccaatgaccttgtattcttgtttccatgtcttcttctctttcctcctatggcaaataaaacactgttttgcaacacaaaaaaaaaaaaaaa

SEQ ID NO: 2221 - DNA, 6635 bp, Homo Sapiens
  NM_004027
gtctagagcggcggcggctggctagggctgcggcgcgcgtggagggttcgctgctggtttgccgccgggtcgggctccgtgggccggggcaggaggaccagcacctgaggccgggcccgcagcccgcgacttcacagccaggcggcggcgctgctgctgctgcggggctctggcgcgcagcccggcgggacagcggggcggctggcgccgggggccggggagcgccagatgatggatttggacatgcttctatgaagaaatgccacatggtccgagagcaaacatgtccaggctactgccactttagtggactagggctcggtgccagcacttcccgggtaatcaggcgtggtctgaccgaggatcaagaagcacatcatcaccaatgacatcatgacagcaagagagcacagccctcgccatggtgccagggcccgtgcaatgcagcgggcttccaccatcgacgtggcggccgacatgctgggcctctctctggcaggaaatatacaagacccagatgagcccattttagaatttagcttagcttgcagtgagctgcatactccatcgctagatcgaaagccaaatagttttgttgcggtgagtgtcaccacccctcctcaggcattctggacgaagcatgcacagacggagatcattgagggaaccaacaatcctatatttctaagcagtattgccttctttcaagactctcttatcaatcagatgacacaagtcaaactctccgtgtatgatgtcaaagatagatctcagggaacaatgtatttactgggctctggaacgttcattgtcaaagatctgctccaggacaggcatcataggttgcatttaacactaaggtctgcagagagtgaccgtgtaggtaacatcaccgtgattggctggcagatggaggagaagtcagaccaacggccccctgtgacccggtctgtggacactgtcaatgggaggatggttcttcctgtcgatgagagcttgacggaggcgttaggaatccgatccaaatacgcttcattgcgaaaggacactttgctgaaatcggtgttcggtggtgccatctgccgcatgtaccggtttccaaccactgatggtaaccatttgcggatcctggagcagatggcagagagcgtgctctccctgcacgtgccccggcagttcgtgaagctcctactagaggaagatgcagccagagtgtgtgagctggaggagctgggagagctgtccccttgctgggagagcctccggcgccaaattgtcacccagtaccagaccatcatcctcacataccaggagaacctgaccgacctccatcagtacagagggccctcgtttaaagcaagcagtttgaaagcagataaaaagttagaatttgttcccacaaacttgcacatacaaaggatgagagttcaagacgatggaggatcagatcagaactacgacatcgtcaccattggggcgccagcagcacactgccaaggttttaagtcaggaggtctccgcaaaaagctgcacaaatttgaagagaccaagaaacattttgaggagtgttgtacatcatctggctgccagtccataatctacataccccaggatgttgtcagagccaaggagatcatcgcccagatcaacaccctgaaaacccaagtgagttactacgcagagcggctgtcaagggcagccaaggacaggtctgccactggccttgagaggacactcgccatcttggcagacaagacacggcagctggtcacggtctgcgactgcaagctcctggccaactccatccatgggctgaacgctgcacggcctgactacattgcctccaaggcctctcccacttcgactgaggaggagcaggtgatgcttagaaatgaccaggacaccctcatggcccggtggacagggagaaacagccgatcttccctgcaggtggactggcacgaggaggagtgggagaaagtgtggctgaacgtggacaagagcctagagtgcatcattcagcgtgtggacaagctgctgcagaaggagcggctgcatggcgagggctgtgaggatgtcttcccctgtgcaggcagctgcaccagcaagaaagattgcagtccccctcctgaagagtccagcccaggtgaatggagtgaggccctttacccgctgctgaccactctcaccgactgcgtggccatgatgagtgacaaggccaagaaggccatggtattcctgctcatgcaggacagcgcgcccaccatagccacctacctgagcctgcagtaccgccgtgacgtggtcttctgccagacgctgaccgccctcatctgcggcttcatcattaagctgaggaactgcctgcatgacgacggcttcctgcgccagctctacaccatcgggctgctggcccagttcgagagcctgctgagcacctacggggaggagctggcaatgctggaggacatgagccttgggatcatggacttgaggaacgtgaccttcaaagtcactcaggccacttccagcgcctccgcagacatgctgcccgtcatcacaggaaatcgcgacgggtttaacgtgcgggtccctctgccgggcccgctgtttgacgccttgccccgggagatccagagtggcatgctgctgcgagtgcagcccgtcctcttcaacgtgggcatcaatgagcagcagacactggccgagaggtttggcgatacgtctttacaagaagtcatcaacgtggagagtttggtgcggttaaattcctactttgagcagtttaaggaagttttgcctgaggattgcctgcctcggtctcgcagtcagacgtgcctgccagagctgctgcggtttctgggtcagaacgtgcatgcccggaagaataagaacgtcgacattctctggcaagctgctgagatctgccgccgccttaatggggtccggttcaccagctgcaagagcgctaaggaccgtacagccatgtcggtgacactggagcagtgcctgatcctgcaacacgagcatggcatggccccgcaggtcttcacccaggccctggagtgcatgcgcagtgagggttgtcgaagagaaaatacaatgaagaatgttggaagtcgcaaatatgcatttaattccctgcagctgaaggctttccccaagcattacaggcctcccgaagggacttacggaaaagttgaaacgtgaacacacggtttcctctaattagctgttacataataaatgtgggtaccctctagtgtcatatatgaattcttcaagaagacctgaaggattggtttttattttttgtggtttttttaaaaaaaacatttcactaaagagtctctggagcatgttttttgttttttgggtttttttccccattggaatcaataggaggtaatgtttggctcaatagtgtggatagtaacaactgcctatttaaattaaatagcctttggctgtaactacacagatctcatcaatagttacctacatgaatcaagctaggtttgtctgaaatgctagaagactttttcaaatgcctgcttgctcacttacttttctacagagtaactcaaaagtaaccattgaattacaatccactttgtaaaaatctgaatgtaaaacagtaaataataaattaaataattggatcctaggcataccaataaatgttatttggggaaagaagctagcactatctcatgcagtgagaataacgggttctagtgaattatcctatctacactaccacctgaagaagttgaaagaaagattgataaatcaacgggagataagactttattagaaggtaacacctgcaaggtaccccacatagttggggccactcttttttctgtcccttatgagttacagaacagggagtctgctggagacacaaagccagcagtaaggtccctttagcctgtctcctgttctctgaagctccctgccgaggctccctcacgcccagaggacacatctccccttcttctctagatgttaatgtagggcctcagatgtggcatgtcaacactcccatggggaatttatgaccatagagatagtagaaacctaaatattttcagaaaaaaaattttttttgcaggatttccaatttatctttgaaaagacagtacaatcatgtttgaatgtctgatgaaagtgtcttatttttaggtttgcaataattgttactttcttattctcattcttatgtaagatgactattgagaaacagttgaaatttattctcctcaaatgagattttgaaagggatttatgggccataaaacttaggaatttcatagaaaattttgtctggtcatcttttataagatgatgatgagtcttatctgcacatagcagagtttgtttcttaggagtttatatgttttattgattctgtttacgatgtttacatgttcttgaaaaggttgtaaaagaaatacatatggcacatattaatgatgctgatcctaatgatttgtgaacctcttagaaattcttttgtctaaaagcctagagattcttctggttcctttagaaacatgtaacaaacttgggccaggggtgctgaggcatggggaggactgcttattggcaggaacacagagggggtgggcatcaggtagggtggaactggatgaccttccagaccccctcctactcagaagtcagcatgcaagcagcgcctgctgtctcccgatgcctgcagggaggaaaatgtctgtgaaggacactttaatgaaggacgaagctctctgctgctccctcaaagctgagttcactgtggcaggcaggaagcagagaagctcctgcccgccaaacccactgcacaggtggctgctgctggtatcagattctcctttttaagtgtcaatttctgttcacagacagtttgttttcaatatggctgatttaccctttcacctctccaccatctcatttaatttgtaaatttttagttctgtcttttctcattttaacttttaaaaaatctccttgctttttaaaaataaatattacccacatagttttcagatcttttttgtctggagagcattaaatatctgcactcatcaaagggaatatagcaaatgttgatcatctgtcagcagttttgcatgtgacacctttatatgaattattttcccaatttttgctctatgtaatgggtcaccataaaactgtaagacttggcaaatgctatagaaaaggttcaggtttcagtattctctctgaaggcatcattcctgggcttccggcagcatcacacgcttccagtgcctgcagggtgagggtgtgtggcacagaggcaagcagctcctctcttctgtaggagctttgggttttcagaggtgcagggaaggcagttttacaggttaccgtaaaacagaggttccgtccagtgttccttatgatgcctccccatttaaaaagaaaagagatctatggaaaactgggaatgtaatgtggattctgtcagagctcctacagagcacagttgcctttagtttcctttaaagatgtaaaaatattgtataatacagttttgtccctacacaattgtatttgccaagcttagtgcattatgatacctttatttatttgttttgggcagtattactatatatatataaacatacagttactgttttatatattcttaggtcattcaaagccatgtatgctgtaaatgtgctagtctttagaatgacacataataaataactgacaagatattaaatgtggtcttgcctgattcatcctattaggaggactagttctatgtgaccagcctgtgactggaccattgttcttgggcattgcattgagtgctcgggtgctgaatacatgtttgtaaacatgggaccatgggagacttccattttataagcttgtttctgcctaatttgaagcagaggggcaacagcgttgaggttaagagcacggactttgggagcacacagaccaggtcccaatcctggttctgcccctgactggctggtgactctgagcaagttgcttgacctctccaagcctccgtttcctcatgtgcaaagtgtggacaacaacagtaccttcctcataaggaacgtgcgacgcgcctcagaagtacgtgttcataaatggtagccattgttgttaccttcccgtctgtgaacatggatcacatcatctctgtgggtaacccagtcctcgttgtatgacttgtcaaaatgcagttccacttgtattaatattgaccctgttcatcgtcaccaggactgcatcttgcaccactgtgccgtcttctaggcacacacgacccgttatctcccttggaaaaattcctctcactggaaatgtacaattaaaggatgattgaaatgtttaactcttggagtttttagtattaccaaactcctagaaatttaagctaccaccaaaaataacatgtgccttttccctttattctcattgatggtagcagtgcacctcgtttcagtgtcctgattccttgattactgtgaacactgaacatcttttatacctttatgatatttctatgtttgtgacttcattggaatgttgatctatttcatatagattgtttttaatatacaatgtattagcccctgtca

SEQ ID NO: 2222 - DNA, 2897 bp, Homo Sapiens
  NM_004033
ggctgtcctcccggtccgccccgcgctgcggttgctgctgggctaacgggctccgatccagcgagcgctgcgtcctcgagtccctgcgcccgtgcgtccgtctgcgacccgaggcctccgctgcgcgtggattctgctgcgaaccggagaccatggccaaaccagcacagggtgccaagtaccggggctccatccatgacttcccaggctttgaccccaaccaggatgccgaggctctgtacactgccatgaagggctttggcagtgacaaggaggccatactggacataatcacctcacggagcaacaggcagaggcaggaggtctgccagagctacaagtccctctacggcaaggacctcattgctgatttaaagtatgaattgacgggcaagtttgaacggttgattgtgggcctgatgaggccacctgcctattgtgatgccaaagaaattaaagatgccatctcgggcattggcactgatgagaagtgcctcattgagatcttggcttcccggaccaatgagcagatgcaccagctggtggcagcatacaaagatgcctacgagcgggacctggaggctgacatcatcggcgacacctctggccacttccagaagatgcttgtggtcctgctccagggaaccagggaggaggatgacgtagtgagcgaggacctggtacaacaggatgtccaggacctatacgaggcaggggaactgaaatggggaacagatgaagcccagttcatttacatcttgggaaatcgcagcaagcagcatcttcggttggtgttcgatgagtatctgaagaccacagggaagccgattgaagccagcatccgaggggagctgtctggggactttgagaagctaatgctggccgtagtgaagtgtatccggagcaccccggaatattttgctgaaaggctcttcaaggctatgaagggcctggggactcgggacaacaccctgatccgcatcatggtctcccgtagtgagttggacatgctcgacattcgggagatcttccggaccaagtatgagaagtccctctacagcatgatcaagaatgacacctctggcgagtacaagaagactctgctgaagctgtctgggggagatgatgatgctgctggccagttcttcccggaggcagcgcaggtggcctatcagatgtgggaacttagtgcagtggcccgagtagagctgaagggaactgtgcgcccagccaatgacttcaaccctgacgcagatgccaaagcgctgcggaaagccatgaagggactcgggactgacgaagacacaatcatcgatatcatcacgcaccgcagcaatgtccagcggcagcagatccggcagaccttcaagtctcactttggccgggacttaatgactgacctgaagtctgagatctctggagacctggcaaggctgattctggggctcatgatgccaccggcccattacgatgccaagcagttgaagaaggccatggagggagccggcacagatgaaaaggctcttattgaaatcctggccactcggaccaatgctgaaatccgggccatcaatgaggcctataaggaggactatcacaagtccctggaggatgctctgagctcagacacatctggccacttcaggaggatcctcatttctctggccacggggcatcgtgaggagggaggagaaaacctggaccaggcacgggaagatgcccaggaaatagcagacacacctagtggagacaaaacttccttggagacacgtttcatgacgatcctgtgtacccggagctatccgcacctccggagagtcttccaggagttcatcaagatgaccaactatgacgtggagcacaccatcaagaaggagatgtctggggatgtcagggatgcatttgtggccattgttcaaagtgtcaagaacaagcctctcttctttgccgacaaactttacaaatccatgaagggtgctggcacagatgagaagactctgaccaggatcatggtatcccgcagtgagattgacctgctcaacatccggagggaattcattgagaaatatgacaagtctctccaccaagccattgagggtgacacctccggagacttcctgaaggccttgctggctctctgtggtggtgaggactagggccacagctttggcgggcacttctgccaagaaatggttatcagcaccagccgccatggccaagcctgattgttccagctccagagactaaggaaggggcaggggtggggggaggggttgggttgggctcttatcttcagtggagcttaggaaacgctcccactcccacgggccatcgagggcccagcacggctgagcggctgaaaaaccgtagccatagatcctgtccacctccactcccctctgaccctcaggctttcccagcttcctccccttgctacagcctctgccctggtttgggctatgtcagatccaaaaacatcctgaacctctgtctgtaaaatgagtagtgtctgtactttgaatgagggggttggtggcaggggccagttgaatgtgctgggcggggtggtgggaaggatagtaaatgtgctggggcaaactgacaaatcttcccatccatttcaccacccatctccatccaggccgcgctagagtactggaccaggaatttggatgcctgggttcaaatctgcatctgccatgcacttgtttctgaccttaggccagcccctttccctccctgagtctctattttcttatctacaatgagacagttggacaaaaaaatcttggcttcccttctaacattaacttcctaaagtatgcctccgattcattcccttgacactttttatttctaaggaagaaataaaaagagatacacaaacacataaacac

SEQ ID NO: 2223 - DNA, 2212 bp, Homo Sapiens
  NM_004034
ccaccctgggcccgcccccggctccatcttgcgggagaccgggttgggctgtgacgctgctgctggggtcagaatgtcatacccaggctatcccccaacaggctacccacctttccctggatatcctcctgcaggtcaggagtcatcttttcccccttctggtcagtatccttatcctagtggctttcctccaatgggaggaggtgcctacccacaagtgccaagtagtggctacccaggagctggaggctaccctgcgcctggaggttatccagcccctggaggctatcctggtgccccacagccagggggagctccatcctatcccggagttcctccaggccaaggatttggagtcccaccaggtggagcaggcttttctgggtatccacagccaccttcacagtcttatggaggtggtccagcacaggttccactacctggtggctttcctggaggacagatgccttctcagtatcctggaggacaacctacttaccctagtcagatcaatacagattctttttcttcctatcctgttttctctcctgtttctttggattatagcagtgaacctgccacagtgactcaggtcactcaaggaactatccgaccagctgccaacttcgatgctataagagatgcagaaattcttcgtaaggcaatgaagggttttgggacagatgagcaggcaattgtggatgtggtggccaaccgttccaatgatcagaggcaaaaaattaaagcagcatttaagacctcctatggcaaggatttaatcaaagatctcaaatcagagttaagtggaaatatggaagaactgatcctggccctcttcatgcctcctacgtattacgatgcctggagcttacggaaagcaatgcagggagcaggaactcaggaacgtgtattgattgagattttgtgcacaagaacaaatcaggaaatccgagaaattgtcagatgttatcagtcagaatttggacgagaccttgaaaaggacattaggtcagatacatcaggacattttgaacgtttacttgtgtccatgtgccagggaaatcgtgatgagaaccagagtataaaccaccaaatggctcaggaagatgctcagcgtctctatcaagctggtgaggggagactagggaccgatgaatcttgctttaacatgatccttgccacaagaagctttcctcagctgagagctaccatggaggcttattctaggatggctaatcgagacttgttaagcagtgtgagccgtgagttttccggatatgtagaaagtggtttgaagaccatcttgcagtgtgccctgaaccgccctgccttctttgctgagaggctctactatgctatgaaaggtgctggcacagatgactccaccctggtccggattgtggtcactcgaagtgagattgaccttgtacaaataaaacagatgttcgctcagatgtatcagaagactctgggcacaatgattgcaggtgacacgagtggagattaccgaagacttcttctggctattgtgggccagtaggagggatttttttttttttaatgaaaaaaaatttctattcatagcttatccttcagagcaatgacctgcatgcagcaatatcaaacatcagctaaccgaaagagctttctgtcaaggaccgtatcagggtaatgtgcttggtttgcacatgttgttattgccttaattctaattttattttgttctctacatacaatcaatgtaaagccatatcacaatgatacagtaatattgcaatgtttgtaaaccttcattcttactagtttcattctaatcaagatgtcaaattgaataaaaatcacagcaatctctgattctgtgtaataatattgaataattttttagaaggttactgaaagctctgccttccggaatccctctaagtctgcttgatagagtggatagtgtgttaaaactgtgtactttaaaaaaaaattcaacctttacatctagaataatttgcatctcattttgcctaaattggttctgtattcataaacactttccacatagaaaatagattagtattacctgtggcaccttttaagaaagggtcaaatgtttatatgcttaagatacatagcctacttttttttcgcagttgttttctttttttaaattgagttatgacaaataaaaaattgcatatatttaaggtgtacaaaaaaaaaa

SEQ ID NO: 2224 - DNA, 4410 bp, Homo Sapiens
  NM_004036
agttctagctgatcagtgctacctgtgctctggaaacccgctctgcgttcctgctggaggtggcctcccctccgccccagacaagaagaggccctcagccctcccccggtctcagagagccctgagaggaggcccagtccagagctcttcctccgttcccagtccacttctctagggccagtagcagacaccagccagtatgccgaggaaccagggcttctccgagcccgaatactcggccgagtactcagccgagtactccgtcagcctgccctccgaccctgaccgcggggtgggccggacccatgaaatctcggtccggaactcgggctcctgcctgtgcctgcctcgcttcatgcggctgactttcgtgccggagtccttggagaacctctaccagacctacttcaaaaggcagcgccacgagaccctgctggtgctggtggtctttgcagccctctttgactgctacgtggtggtcatgtgtgctgtggtcttctccagcgacaagctggcttccctcgccgtggctggaattggactggtgttggacatcatcctcttcgtgctctgcaaaaaggggctgctcccggaccgggtcacccgcagagtgctgccctacgtgctgtggctgctcataaccgcccagatcttctcctacctgggcctgaacttcgcgcgtgcccacgcggctagtgacacggtgggctggcaggtcttctttgtcttctccttcttcatcacgctgcccctcagcctcagccccatcgtgatcatctccgtggtctcctgtgtggtgcacacgttggtcctgggggtcaccgtggcccagcagcagcaggaggagctcaaggggatgcagctgctgcgggagatcctggccaacgtcttcctctacctgtgcgccatcgctgtgggcatcatgtcctactacatggctgaccgcaagcaccgcaaggccttcctggaggcccgccagtcgctggaggtgaagatgaacctggaagagcagagccagcagcaggagaacctcatgctttccatcctgcccaagcacgtggctgacgagatgctgaaagacatgaagaaagacgagagccagaaggaccagcagcagttcaacaccatgtacatgtaccgtcacgagaacgtcagcatcctctttgccgacatcgtgggctttacccagctgtcttctgcctgcagtgcccaggagcttgtgaagctgctcaacgagctctttgcccgctttgacaagctggcagctaaataccaccagctgcggattaagatcctgggcgactgctactactgcatctgcggcttgcccgactaccgggaggaccacgccgtctgctccatcctcatggggctggccatggtggaggccatctcgtatgtgcgggagaagaccaagactggggtggacatgcgtgtgggggtgcacacgggcaccgtgctggggggcgtcctgggccagaagcgctggcagtacgacgtgtggtcgactgatgtcactgtagccaacaagatggaggccggcggcatccctgggcgcgtgcacatctcccagagcaccatggactgcctgaaaggggagtttgatgtggagccaggcgatgggggcagccgctgtgattacctagaagagaagggtattgaaacctacctcatcattgcctccaagccagaggtgaagaaaacagccacccagaatggcctcaatggctcggccctgcccaatggagcaccagcttcctcaaagtccagctcccctgccctcattgagaccaaggagcccaacgggagtgcccacagcagtgggtccacgtcggagaagcccgaggagcaggatgcccaggccgacaacccctcattccccaacccacgccggaggctgcgcctgcaggacctggctgaccgagtggtggatgcctctgaagatgagcacgagctcaaccagctgctcaacgaggccctgcttgagcgagagtccgcccaagtagtaaagaagagaaacaccttcctcttgtccatgcggttcatggaccccgagatggaaacccgctactcggtggagaaggagaagcagagtggggctgccttcagctgctcctgcgtcgtcctgctctgcacggccctggtcgagatactcatcgacccctggctaatgacaaactatgtgaccttcatggtgggggagattctgctcctcatcctgaccatctgctccctggctgccatctttccccgggcctttcctaagaagcttgtggccttctcaacttggattgaccggacccgctgggccaggaacacctgggccatgctcgccatcttcatcctggtgatggcaaatgtcgtggacatgctcagctgtctccagtactacacgggacccagcaatgcaacggcagggatggaaacggagggcagctgcctggagaaccccaagtattacaactatgtggccgtgctgtccctcatcgccaccatcatgctggtgcaggtcagccacatggtgaagctcacgctcatgctgctcgtcgcaggcgccgtggccaccatcaacctctatgcctggcgtcccgtctttgatgaatacgaccacaagcgttttcgggagcacgacttacctatggtggccttagagcagatgcaaggattcaaccctgggctcaatggcactgacaggctgcccctggtgccttccaagtactctatgacggtgatggtgttcctcatgatgctcagcttctactacttctcccgccacgtagaaaaactggcacggacacttttcttgtggaagattgaggtccacgaccagaaggaacgtgtctatgagatgcgacgctggaacgaggccttggtcaccaacatgttgcctgagcacgtggcacgccatttcctggggtccaagaagagagatgaggagctgtatagccagacgtatgatgagattggagtcatgtttgcctccctgcccaactttgctgacttctacacagaggagagcatcaacaatggtggtattgagtgtctgcgtttcctcaatgaaatcatctcagattttgactctctcctggacaatcccaagttccgggtgatcaccaagatcaaaaccattggcagcacgtatatggcggcttcaggagtcacccccgatgtcaacaccaatggctttgccagctccaacaaggaagacaagtccgagagagagcgctggcagcacctggctgacctggccgacttcgcgctggccatgaaggatacgctcaccaacatcaacaaccagtccttcaataacttcatgctgcgcataggcatgaacaaaggcggggttctggctggggtcatcggagcccggaaaccacactacgacatctggggcaatacagtcaatgtagccagcaggatggagtccacgggggtcatgggcaacattcaggtggtagaagaaacccaagtcatcctccgagagtacggcttccgctttgtgaggcgaggccccatctttgtgaaggggaagggggagctgctgaccttcttcttgaaggggcgggataagctagccaccttccccaatggcccctctgtcacactgccccaccaggtggtggacaactcctgaatggcctcgagcctgcaacagtccaaaccggaagggagaatttattttttgaaactgaaggaagtcccgaccttcctggattgaagtgcacactcatggactttaggtttagaaacctcctcagccttcatttgttcgtggatgtgtgagctctgagggtggccctgctattcctgtgtgtgcctgtagtgtccccagcataggggtcttaggcatagggctgaacagtccttccagagccctcgttccaatccctgccgtccttgcccctgaggggccctgaccactgtgagcaggagggtggcagagctgggacaaagctgcctttgccgctgggctttccgggactgtggagggagcacaggcggggaagctccacttcagacagggcttggtggggcaggacatggctcccattttgaagggaggtctccatgtggtccgagtgaggtgagacggccctcgtcctggtgttcctgatcatcttgaaaggttcttctggaactcctgtccccttagtcatgagaacagaaagtgcaatatttcctttcacctggcaggggaggggggatttatttctgaaagaaaaatatataaacagatcttctacatttatatttttaatcttctgttaaatacactttccgatattgccttgccttttgagctcttgctacagtcgcctttgctactgctttaagagaatttacaggtattgataaagaacaagactgttttattaaaagctttattcaacttgaaaaaaaaaaaaaaaa

SEQ ID NO: 2225 - DNA, 7539 bp, Homo Sapiens
  NM_004041
acaccccgcgcggttccacgcccctggccgcggcccgggcgctgcgctgctcgacgcggcgggcggcgggcggggaccgggggcgggggcggcggcggcggccgggagagcggaggaggcggagcagggagccgggagcgggctggcccgcgctcctcctgctggctggggattttccagcctgggcgctgacgccgcggacctccctgcgaccgtcgcggaccatgggcgacaaagggacccgagtgttcaagaaggccagtccaaatggaaagctcaccgtctacctgggaaagcgggactttgtggaccacatcgacctcgtggaccctgtggatggtgtggtcctggtggatcctgagtatctcaaagagcggagagtctatgtgacgctgacctgcgccttccgctatggccgggaggacctggatgtcctgggcctgacctttcgcaaggacctgtttgtggccaacgtacagtcgttcccaccggcccccgaggacaagaagcccctgacgcggctgcaggaacgcctcatcaagaagctgggcgagcacgcttaccctttcacctttgagatccctccaaaccttccatgttctgtgacactgcagccggggcccgaagacacggggaaggcttgcggtgtggactatgaagtcaaagccttctgcgcggagaatttggaggagaagatccacaagcggaattctgtgcgtctggtcatccggaaggttcagtatgccccagagaggcctggcccccagcccacagccgagaccaccaggcagttcctcatgtcggacaagcccttgcacctagaagcctctctggataaggagatctattaccatggagaacccatcagcgtcaacgtccacgtcaccaacaacaccaacaagacggtgaagaagatcaagatctcagtgcgccagtatgcagacatctgccttttcaacacagctcagtacaagtgccctgttgccatggaagaggctgatgacactgtggcacccagctcgacgttctgcaaggtctacacactgacccccttcctagccaataaccgagagaagcggggcctcgccttggacgggaagctcaagcacgaagacacgaacttggcctctagcaccctgttgagggaaggtgccaaccgtgagatcctggggatcattgtttcctacaaagtgaaagtgaagctggtggtgtctcggggcggcctgttgggagatcttgcatccagcgacgtggccgtggaactgcccttcaccctaatgcaccccaagcccaaagaggaacccccgcatcgggaagttccagagaacgagacgccagtagataccaatctcatagaacttgacacaaatgatgacgacattgtatttgaggactttgctcgccagagactgaaaggcatgaaggatgacaaggaggaagaggaggatggtaccggctctccacagctcaacaacagatagacgggccggccctgcctccacgtggctccggctccactctcgtgcactcggatgcttactcgtcttcttcctgttctggtttcttttcccctttgttcttccagtttctaccagggggccccgtgggcttccagatcacggtgatgaacctctggcctcaggattggccccacatcaccacgccaacaggaccacagcgcactggctccaccccatctctgccatctccactcccctccttttcatgctgtctcccagaaaagctgccagggctctggccttggaattggacttgagatggggagcagacaggggaggatggggaatgtgggacacggtgtggtgggcatgagggcttggaggggtggggatgagggctcaagacacgagagaagatgtccacggtcccaggtggttaacaaagttctggcagctaaaagatgaccgcgttgaaggccacctccttctggctgggaggggcagaactgtggacagattctcaatgcctttttgaagttctgacccaccaaagaccttctgccttcaccctcctccccacctgatgtccctctgtgtctgatagtgatgttggtgaaagttcgtagaccccaggagtagagaaaagcaactggactgactttcttaccagcagttacctagactgaggcaagctgtgtggactcacccaagtatatttcagtactgtcaggctgtgacatcttagctaccttgtatttcaagtgcatggccctgtctagagatatgcacagagagaaaagcagagggagggagggagggggtcttcagcaagcaccagcccccagcagagtgagctgaagctcctgaggagggttcccgaaggggggcgctcagagatgggggcagggggcggggagaggagagtctgccttatgtcccttccttgtggacttcacatggtcatgcaggaagtgaggatgggtgtccagcgggggccgaggccactagtatcctcctgcttccccctgccattctccagggctggactgaccctatggactgggagagagtgcctgaggccaccatgccacagtcaaagggggtcctatctcagaaggtggcagcatccactgagatatcctcacccgaagggaaggaggctgctgggtagcaaataagccccttcttttcttggtgagttgatgacctccaatagctcccagtgtcatgggtacccagtacgcattagctggtgttgggttgattgagacctggggcagttcctggggcaagaagccagatgggagatgagatagaaagtgttaggagttatcctctttgcctggcctttgagaataacttactgtgtgactttgggcaagttccttccccactctgggcctcagtttctcacttgggaaagcaaggagtttgaccagatgatcacaatgggccttcctagctctggccaccaagaatttgtgaacattagagctcctggtctggtgggtagagccagagctgctgactggtctctctgcctccagaggggatttattggacctcagaggtggcagggccctatggagcaccaactgccctcaaccccaccctgtgcccaagactgggaagggattgatgtcaggctgtggccataggtagcatgagttgcccaaggagggacagagcatatctttgctgaggcttggctgaggggcttatgatagggcttgcagtacctcacagccccctgtgggcacagacaccctgaggtttacccaggcaaatatattgattagcaggacaagggctctctcctcagtttctgctcccttccatctctctcccatacttgtctgaaaagggagacaaaaaatcttatacaagtggcatctcaatcctttccagtccagcacctcctggggcaggcagtgtgacttatttcctgtggtgaaatcacctgtttcacaagcctggcagcgcgacttctgagtctcatgaccactcaacccaagggacccctccccagaccagaaccaagtcagctgggggctgtcgtactaccctgtccagtcttgagggcctagttgcaggtcccccaggcatccagcccctcctagagcttgctgggcaggctgcacctcatctgggcaggcgcagagctgatgaaatgctggagcaatgcatggcaaacatatgccctccagtgtcttctgaaacctttggggctgacacaagatcctttagtgtttgggatgacctctttcctgcagacttcttcccctatccctaactcatgcatggaaaacgtttgtcaggctggtttcccgagcctcctgcacctcaacatcacgctcacccttttgggtttagcccagtgttatttagcaaatttctccagctgcagggaaggatcagagcactatcttttttttttttttttctcctggagccaggactgcacaaggcaatggccaaatttagttgaattcagcctaccatcctttgctgatgactcagctctatgccaagtactggagccacagagatgggtcagtcccagcccctgtcctcaggaagcccatggtcagggaaacgttgtagggataagtaatagagggcagttgccttcagggctcctggtggctgctggtccctatggtgccttgatgtgaattagaagacggtgccctttccaggtggattcagacctacactagaacgcacagctttgggagtgacacacaggttggattttagcaccccttgccccttggccagaggtgccctgctgcacggccatacgctgcagcctcgagggacacacaggccaaagtgtttccttcagcctcttcctggagaggaagccgcaggtcatgtttccaagcttctggtcaactccaggcaccacctcccagcccccaaacatggccgagccagtgcttctctgcagggcccctttcctttctggagtcagcctgcccaggtgataccttgaagtgaaactaggggtgggggagcctcactaggccccaggcaccatcccacagtactggcggtttctctgccaagtgtttggggcctgcactggccaagccatccgtcactgggactttgcagtgtgccctgtgggtggcgtgtggacaccggtccgggcaggaaggaaaagcatgccccggtgaaaacccaccgagcagagagccagcgggacctcctcagcattccacccaggggaagagttcagtccccatgaagataaggactgagttatttggctgcacctctcctcagcctcaaagctcagacctgctagagtgggttcacctggctgttggttctgtgggagagttcctgacaagctggttcctacatggtgcagtgaaaggaactctgtcctggaagtccccaatgccgcctctcagtcctgcctgtcaccaaccacctggggggcttgggcaagctactcaacctctggggctcaatttccctaactgtaaaatgggattgtaatcccttccctgcctgacgcaggaattgttatgaggcccagatgagatgaaagtcagcggtcagggctctgtaagttgaaaatggctggatgtgtgtggccctgccactgcagggatggcccaaggtcacacagaaagtttgctgcaggaggagccctccccaccagtcttcatcgcttgccctgcttctcacttaggcagatgtcaaccagaatgagatacagccaatttggctttgatgacccagctgagagggaaatttagatacaattcaggaatatcatgcccaaaaatagtggtcccagcaaccaggacacagagggaagacctggatattgtcagtgattggtggagggggacatcttggaccctcctaggcctggtgtcacatctcccatctctcagaccccacagaggccaaggggccttggctctgacccaggttaaagagagccaccagcccccaggctcagggagctgaaaccacccatccgcagaaatctaagggcaaggagaaatagaaattgtctgttccttcccttcaaagtgtaaggcctcttccaggagcaactggagccaccacagcttctcagtgacattgggagggcttcgggcccaggaaaaacccaagccttttgtcctgagagccgagccacagcggatgcagtggcgtcagcatcccagagcggcagcttctctcctgcctgtcactggggactggttgctctccacccatccaggaggaaggggttaggtcccagtcttacactcttatagggtctcatggacataggcctatgcctgttctgatatctataattttttaaactcaaaaggaccaaaacactcctgaaccctcatctatacggcctgcactgggcttggtgtttcctcctggcccaggcagctccatctcttctgccattcctcctggacgaaagtggcaggaccccacctctaccacttccccacagggtcactgcacagcggcttcaaagacacgccctgttgaaggggaaacatcctccccccatcacactccaactcgtcaccccaaaagggaagtcaaagcacaggtccgtggggcctatggtttgtagacactgacacagtggttttcaaaccaggtgctgcggaacccctgatattccacagagctttgtcaggggatgctaaagtgggaagatgggagtggaggcaaaggataggtttccagccctcctcccatttccgccgccaccagaataactctgcttttatctgtcttgcctactgagatttcattttcaagctttctttgaagaagaacttcaaaccaccatctcgaggtttgatcttagaccagccagcacaggttctattcttgctgttcatgttggaatggctccagcgttccagtacaaagtgtctttgtgttggaacttgggtcacagacccaggcacaagcatttatacacacacacacacacacacacacacacacacacacacacgtacatagttgatggtttttctagccaacccaccctgaagctctggccaaggtttgatttggacagggacctggtgctcagtggggatgggtcgtgaccctgatattggcccatgaagcatggggagctctggagcaaggaaacaggctcaatcccccactgaggacttgtgtctgcacccctatctggcaccccactttcctggcctaggcccaagggacacagcaggagaagcagtgtgataggagagaggctagggttaaattcatctttacacagcgccggatggatggaaatcttggctcacataaaagacagactcagggaggattttatgacaaaagtccctcctttgagggcaggattcccccaggaatcctggacactttagtgagaactggaccagcccttggcacaaaaccctgcctgccctgtcccccactcccaccccccagggaattctaggtgaaaatgtgaagctcagggcacagcaagcgcatgacacgggtgtattacattcggtccgagtgtgtccttagtttccctgtgtgcaaaatggggctagtccaggctcttcccacctcactgggacaattgcaagggtcataggagaggtgggtatgataggtggtcatatgaggtggtgagtatgagaggtgggtgcctcacaaactcggggtatggtcctgacctgcatggcagatgagcagagcacttgggaacgagcataggaagtgccatcttcccgggcatctctgctcagtgttaaggtctagccacagacactgtgggacctgcctcttcctatggaatgggggcctgcatgggttgtgtcctggggcaggagtgagggatggctgggaagaatctccaggtctgtggcccttgtgttgagtgattattttgtgacactctcattcctggaccacctgccaggtttatctgttatacctgtggcattcttattatgtcagacaagttattatagttcattcaactctaacaaatgaacaaaagaacaataaataggaggccattaaaggtcttttgtggcagaggaaaaaaaaaaaaaaaaaa

SEQ ID NO: 2226 - DNA, 2094 bp, Homo Sapiens
  NM_004044
gcgcggatcttgcatctgaaactgagcagagcagggcgccgggcagggccggcgggccacgtgataagcccggaaacagctccgccccctcgcttcctgagccgccacatcccggcagccctcctacctgcgcacgtggtgccgccgctgctgcctcccgctcgccctgaacccagtgcctgcagccatggctcccggccagctcgccttatttagtgtctctgacaaaaccggccttgtggaatttgcaagaaacctgaccgctcttggtttgaatctggtcgcttccggagggactgcaaaagctctcagggatgctggtctggcagtcagagatgtctctgagttgacgggatttcctgaaatgttggggggacgtgtgaaaactttgcatcctgcagtccatgctggaatcctagctcgtaatattccagaagataatgctgacatggccagacttgatttcaatcttataagagttgttgcctgcaatctctatccctttgtaaagacagtggcttctccaggtgtaactgttgaggaggctgtggagcaaattgacattggtggagtaaccttactgagagctgcagccaaaaaccacgctcgagtgacagtggtgtgtgaaccagaggactatgtggtggtgtccacggagatgcagagctccgagagtaaggacacctccttggagactagacgccagttagccttgaaggcattcactcatacggcacaatatgatgaagcaatttcagattatttcaggaaacagtacagcaaaggcgtatctcagatgcccttgagatatggaatgaacccacatcagacccctgcccagctgtacacactgcagcccaagcttcccatcacagttctaaatggagcccctggatttataaacttgtgcgatgctttgaacgcctggcagctggtgaaggaactcaaggaggctttaggtattccagccgctgcctctttcaaacatgtcagcccagcaggtgctgctgttggaattccactcagtgaagatgaggccaaagtctgcatggtttatgatctctataaaaccctcacacccatctcagcggcatatgcaagagcaagaggggctgataggatgtcttcatttggtgattttgttgcattgtccgatgtttgtgatgtaccaactgcaaaaattatttccagagaagtatctgatggtataattgccccaggatatgaagaagaagccttgacaatactttccaaaaagaaaaatggaaactattgtgtccttcagatggaccaatcttacaaaccagatgaaaatgaagttcgaactctctttggtcttcatttaagccagaagagaaataatggtgtcgtcgacaagtcattatttagcaatgttgttaccaaaaataaagatttgccagagtctgccctccgagacctcatcgtagccaccattgctgtcaagtacactcagtctaactctgtgtgctacgccaagaacgggcaggttatcggcattggagcaggacagcagtctcgtatacactgcactcgccttgcaggagataaggcaaactattggtggcttagacaccatccacaagtgctttcgatgaagtttaaaacaggagtgaagagagcagaaatctccaatgccatcgatcaatatgtgactggaaccattggcgaggatgaagatttgataaagtggaaggcactgtttgaggaagtccctgagttactcactgaggcagagaagaaggaatgggttgagaaactgactgaagtttctatcagctctgatgccttcttccctttccgagataacgtagacagagctaaaaggagtggtgtggcgtacattgcggctccctccggttctgctgctgacaaagttgtgattgaggcctgcgacgaactgggaatcatcctcgctcatacgaaccttcggctcttccaccactgattttaccacacactgttttttggcttgcttatgtgtaggtgaacagtcacgcctgaaactttgaggataactttttaaaaaaataaaacagtatctcttaatcactggatccatagttaaaaaaaaaa

SEQ ID NO: 2227 - DNA, 1895 bp, Homo Sapiens
  NM_004046
gtcttgaccttctttgcggctcggccattttgtcccagtcagtccggaggctgcggctgcagaagtaccgcctgcggagtaactgcaaagatgctgtccgtgcgcgttgctgcggccgtggtccgcgcccttcctcggcgggccggactggtctccagaaatgctttgggttcatctttcattgctgcaaggaacttccatgcctctaacactcatcttcaaaagactgggactgctgagatgtcctctattcttgaagagcgtattcttggagctgatacctctgttgatcttgaagaaactgggcgtgtcttaagtattggtgatggtattgcccgcgtacatgggctgaggaatgttcaagcagaagaaatggtagagttttcttcaggcttaaagggtatgtccttgaacttggaacctgacaatgttggtgttgtcgtgtttggaaatgataaactaattaaggaaggagatatagtgaagaggacaggagccattgtggacgttccagttggtgaggagctgttgggtcgtgtagttgatgcccttggtaatgctattgatggaaagggtccaattggttccaagacgcgtaggcgagttggtctgaaagcccccggtatcattcctcgaatttcagtgcgggaaccaatgcagactggcattaaggctgtggatagcttggtgccaattggtcgtggtcagcgtgaactgattattggtgaccgacagactgggaaaacctcaattgctattgacacaatcattaaccagaaacgtttcaatgatggatctgatgaaaagaagaagctgtactgtatttatgttgctattggtcaaaagagatccactgttgcccagttggtgaagagacttacagatgcagatgccatgaagtacaccattgtggtgtcggctacggcctcggatgctgccccacttcagtacctggctccttactctggctgttccatgggagagtattttagagacaatggcaaacatgctttgatcatctatgacgacttatccaaacaggctgttgcttaccgtcagatgtctctgttgctccgccgaccccctggtcgtgaggcctatcctggtgatgtgttctacctacactcccggttgctggagagagcagccaaaatgaacgatgcttttggtggtggctccttgactgctttgccagtcatagaaacacaggctggtgatgtgtctgcttacattccaacaaatgtcatttccatcactgacggacagatcttcttggaaacagaattgttctacaaaggtatccgccctgcaattaacgttggtctgtctgtatctcgtgtcggatccgctgcccaaaccagggctatgaagcaggtagcaggtaccatgaagctggaattggctcagtatcgtgaggttgctgcttttgcccagttcggttctgacctcgatgctgccactcaacaacttttgagtcgtggcgtgcgtctaactgagttgctgaagcaaggacagtattctcccatggctattgaagaacaagtggctgttatctatgcgggtgtaaggggatatcttgataaactggagcccagcaagattacaaagtttgagaatgctttcttgtctcatgtcgtcagccagcaccaagccttgttgggcactatcagggctgatggaaagatctcagaacaatcagatgcaaagctgaaagagattgtaacaaatttcttggctggatttgaagcttaaactcctgtggattcacatcaaataccagttcagttttgtcattgttctagtaaattagttccatttgtaaaagggttactctcatactccttatgtacagaaatcacatgaaaaataaaggttccataatgcatagttaaaaa

SEQ ID NO: 2228 - DNA, 1028 bp, Homo Sapiens
  NM_004047
gagttaggtgacgctgcggggcgggcggacagactgcgggacggacggtggacgctgggacgcgtttgtagctccggccccgccgttccgacccccgccgccgtcgccgccatgacggggctagcactgctctactccggggtcttcgtggccttctgggcctgcgcgctggccgtgggagtctgctacaccatttttgatttgggcttccgctttgatgtggcatggttcctgacggagacttcgcccttcatgtggtccaacctgggcattggcctagctatctccctgtctgtggttggggcagcctggggcatctatattaccggctcctccatcattggtggaggagtgaaggcccccaggatcaagaccaagaacctggtcagcatcatcttctgtgaggctgtggccatctacggcatcatcatggcaattgtcattagcaacatggctgagcctttcagtgccacagaccccaaggccatcggccatcggaactaccatgcaggctactccatgtttggggctggcctcaccgtaggcctgtctaacctcttctgtggagtctgcgtgggcatcgtgggcagtggggctgccctggccgatgctcagaaccccagcctctttgtaaagattctcatcgtggagatctttggcagcgccattggcctctttggggtcatcgtcgcaattcttcagacctccagagtgaagatgggtgactagatgatatgtgtgggtggggccgtgcctcacttttatttattgctggttttcctgggacagctggagctgtgtcccttagcctttcagaggcttggtgttcagggccctccctgcactcccctcttgctgcgtgttgatttggaggcactgcagtccaggccgagtcctcagtgcggggagcaggctgctgctgctgactctgtgcagctgcgcacctgtgtcccccacctccaccctcaacccatcttcctagtgtttgtgaaataaacttggtatttgtctgggtcagtgcaaaaaaa

SEQ ID NO: 2229 - DNA, 899 bp, Homo Sapiens
  NM_004049
agcctacgcacgaaagtgactaggaggaaggatattataaagtgatgcaaacagaaattccaccagcctccatgtatcatcatgtgtcataactcagtcaagctcagtgagcattctcagcacattgcctcaacagcttcaaggtgagccagctcaagactttgctctccaccaggcagaagatgacagactgtgaatttggatatatttacaggctggctcaggactatctgcagtgcgtcctacagataccacaacctggatcaggtccaagcaaaacgtccagagtgctacaaaatgttgcgttctcagtccaaaaagaagtggaaaagaatctgaagtcatgcttggacaatgttaatgttgtgtccgtagacactgccagaacactattcaaccaagtgatggaaaaggagtttgaagacggcatcattaactggggaagaattgtaaccatatttgcatttgaaggtattctcatcaagaaacttctacgacagcaaattgccccggatgtggatacctataaggagatttcatattttgttgcggagttcataatgaataacacaggagaatggataaggcaaaacggaggctgggaaaatggctttgtaaagaagtttgaacctaaatctggctggatgacttttctagaagttacaggaaagatctgtgaaatgctatctctcctgaagcaatactgttgaccagaaaggacactccatattgtgaaaccggcctaatttttctgactgatatggaaacgattgccaacacatacttctacttttaaataaacaactttgatgatgtaacttgaccttccagagttatggaaattttgtccccatgtaatgaataaattgtatgtatttttctctataaaaaaaaaaaaa

SEQ ID NO: 2230 - DNA, 1535 bp, Homo Sapiens
  NM_004052
cctccgctcagtccgggagcgcacgtgggccgcggcgctccgacctccgctttcccaccgcccgcagctgaagcacatcccgcagcccggcgcggactccgatcgccgcagttgccctctggcgccatgtcgcagaacggagcgcccgggatgcaggaggagagcctgcagggctcctgggtagaactgcacttcagcaataatgggaacgggggcagcgttccagcctcggtttctatttataatggagacatggaaaaaatactgctggacgcacagcatgagtctggacggagtagctccaagagctctcactgtgacagcccacctcgctcgcagacaccacaagataccaacagggcttctgaaacagatacccatagcattggagagaaaaacagctcacagtctgaggaagatgatattgaaagaaggaaagaagttgaaagcatcttgaagaaaaactcagattggatatgggattggtcaagtcggccggaaaatattccccccaaggagttcctctttaaacacccgaagcgcacggccaccctcagcatgaggaacacgagcgtcatgaagaaagggggcatattctctgcagaatttctgaaagttttccttccatctctgctgctctctcatttgctggccatcggattggggatctatattggaaggcgtctgacaacctccaccagcaccttttgatgaagaactggagtctgacttggttcgttagtggattacttctgagcttgcaacatagctcactgaagagctgttagatcctggggtggccacgtcacttgtgtttatttgttctgtaaatgctgcgttcctaatttagtaaaataaaagaatagacactaaaatcatgttgatctataattacacctatgggatcaataagcatgtcagactgattaatgtctactgtgaaaatttggtagtaaattttcatttgatattagatataaatatctgaatataaataattttaatatactagtcatgatgtgtgttgtattttaaaaattatctgcaaccttaattcagctgaagtactttatatttcaaaagaatgaataacattgataataaaatcgctactttaaggggtttgtccaaaataaatattgtggccttatatatcacactattgtagaaagtattatttaatttaaatggatgcaggttgtctactaaagaaagattatatataactatgctaattgttcataatcaacagaaaccaagatagagctacaaactcagctgtacagttcgtacactaaactcttcttgcttttgcattataaggaattaagtctccgattattaggtgatcaccctggatgatcagttttctgctgaaggcacctactcagtatcttttcctctttatcactctgcattggtgaatttaatcctctcctttgtgttcaacttttgtgtgcttttaaaatcagctttattctaagcaaatctgtgtctactttaaaaaactggaaatggaaaaaaaaataaatctt

SEQ ID NO: 2231 - DNA, 2005 bp, Homo Sapiens
  NM_004053
gcggattcccgccccgaggtttctaaatccagacattcccgtttggctgagcactctaggcctacatccatgaagctaggagagcgacactcaaagactgcactattgagagaagctaacgttaaaggcagtgaatatattcgggagtccagctccggaacccgggagctcttttagtgggaggggcggcgctgatggcgcttctggcctccgaatgctagggggcgctgtgatcgccgggcggcctcttgggcgctgggagtccaccgcgcaagcgcatcctggcctttcttcagtccccacgtgcgatccttcccggcaactttttcgagaaaaatgcccaaattcaaggcggcccgtggggtggggggtcaggaaaaacatgcgcccctggccgatcagatcctggctgggaatgcggtgcgggcgggggtccgggagaagcggcggggtcgcgggacaggagaagcggaggaagagtatgtggggccccggctgagccgacggattttgcagcaagcacggcagcaacaggaggaactcgaggccgagcatgggactggggacaagcccgcggcgccgcgggaacgcaccacgcggctgggtccaagaatgcctcaggatggatcagatgacgaggacgaggagtggcccaccctggagaaggctgccacaatgacagcagcgggccatcatgcagaggtggttgtggaccctgaggatgagcgtgccatagagatgttcatgaacaagaaccctcctgccaggcgcaccctggctgacatcatcatggagaagctgactgagaagcagacagaggttgagacagtcatgtcagaggtgtcgggcttccctatgccccagctggacccccgggtcctagaagtgtacaggggggtccgggaggtattatctaagtaccgcagtggaaaactgcccaaggcatttaagatcatccctgcactctccaactgggagcaaatcctctacgtcacagagccggaggcctggactgcagctgccatgtaccaggccaccaggatttttgcctctaacctgaaggaacgcatggcccagcgcttctacaaccttgtcctgctccctcgagtacgagatgacgttgctgaatacaaacgactcaacttccatctctacatggctctcaagaaggcccttttcaaacctggagcctggttcaaagggatcctgattccactgtgcgagtctggcacttgtaccctccgggaagccatcattgtgggtagcatcatcaccaagtgctccatccctgtgttgcactccagtgcggccatgctgaaaattgctgagatggaatacagcggtgccaacagcatcttcctgcgactgctgctggataagaagtatgcactgccttaccgggtgctggatgccctagtcttccacttcctggggttccggacagagaagcgtgaactgcctgtgctgtggcaccagtgcctcctgactttggtccagcgctacaaggccgacttggccacagaccagaaagaggccctcttagaactgctccggctgcagccccatccacagctatcgcccgaaatcaggcgtgagcttcagagtgcagtcccccgcgatgtggaagatgttcccatcaccgtggagtgaggaaaacagtcagctgtcctggccaaaggggtttggaaggacaccaagacccccgttggtgactgaagatgacactgagctttaatggctgaagacccagatcagggcagtgacagatcacagggacatctgtggctcccagtccaggacaggaaggactgagggtctggctggttccctcttccattctaggcccttatccctgtttagttctgagagccaacttgagataccatatgctagcattcccagtccccagctggggcttggtgtgagtactttttctatggctattgtgtcaggtcactgtggataaaggcaaagacagatatttattgaaaaaaaaaaaaaaaaa

SEQ ID NO: 2232 - DNA, 1985 bp, Homo Sapiens
  NM_004054
actgtggctaagtgtggggaccagacaggactcgtggagacatccaggtgctgaagccttcagctactgtctcagttttttgaagtttagcaatggcgtctttctctgctgagaccaattcaactgacctactctcacagccatggaatgagcccccagtaattctctccatggtcattctcagccttacttttttactgggattgccaggcaatgggctggtgctgtgggtggctggcctgaagatgcagcggacagtgaacacaatttggttcctccacctcaccttggcggacctcctctgctgcctctccttgcccttctcgctggctcacttggctctccagggacagtggccctacggcaggttcctatgcaagctcatcccctccatcattgtcctcaacatgtttgccagtgtcttcctgcttactgccattagcctggatcgctgtcttgtggtattcaagccaatctggtgtcagaatcatcgcaatgtagggatggcctgctctatctgtggatgtatctgggtggtggcttttgtgatgtgcattcctgtgttcgtgtaccgggaaatcttcactacagacaaccataatagatgtggctacaaatttggtctctccagctcattagattatccagacttttatggagatccactagaaaacaggtctcttgaaaacattgttcagccgcctggagaaatgaatgataggttagatccttcctctttccaaacaaatgatcatccttggacagtccccactgtcttccaacctcaaacatttcaaagaccttctgcagattcactccctaggggttctgctaggttaacaagtcaaaatctgtattctaatgtatttaaacctgctgatgtggtctcacctaaaatccccagtgggtttcctattgaagatcacgaaaccagcccactggataactctgatgcttttctctctactcatttaaagctgttccctagcgcttctagcaattccttctacgagtctgagctaccacaaggtttccaggattattacaatttaggccaattcacagatgacgatcaagtgccaacacccctcgtggcaataacgatcactaggctagtggtgggtttcctgctgccctctgttatcatgatagcctgttacagcttcattgtcttccgaatgcaaaggggccgcttcgccaagtctcagagcaaaacctttcgagtggccgtggtggtggtggctgtctttcttgtctgctggactccataccacatttttggagtcctgtcattgcttactgacccagaaactcccttggggaaaactctgatgtcctgggatcatgtatgcattgctctagcatctgccaatagttgctttaatcccttcctttatgccctcttggggaaagattttaggaagaaagcaaggcagtccattcagggaattctggaggcagccttcagtgaggagctcacacgttccacccactgtccctcaaacaatgtcatttcagaaagaaatagtacaactgtgtgaaaatgtggagcagccaacaagcaggggctcttaggcaatcacatagtgaaagtttataagaggatgaagtgatatggtgagcagcggacttcaaaaactgtcaaagaatcaatccagcggttctcaaacggtacacagactattgacatcagcatcacctagaaacttgttagaaatgcaaattctcaagccgcatcccagacttgctgaatcggaatctctgggggttgggacccagcaagggcacttaacaaaccctcgtttctgattaatgctaaatgtaagaatcattgtaaacattagttctatttctatcccaaactaagctatgtgaaataagagaagctactttgtttttaaatgatgttgaatatttgtcgatatttccatcattaaatttttccttagcattgtaaaaaaaaaaaaaaaaaaaaaaaaaaaaaa

SEQ ID NO: 2233 - DNA, 1613 bp, Homo Sapiens
  NM_004058
acagtgcattcatgcagctgggccccaccccatctccagaggcaccttccactagcaacagtctccccaggcacaacacagctaacacaaggccccgcaggcaggactctgggacagacgcaggccagctgcccagagcccagaccaagcatggacgccgtggatgccaccatggagaaactccgggcacagtgcctgtcccgcggggcctcgggcatccagggcctggccaggtttttccgccaactagaccgggacgggagcagatccctggacgctgatgagttccggcagggtctggccaaactcgggctggtgctggaccaggcggaggcagagggtgtgtgcaggaagtgggaccgcaatggcagcgggacgctggatctggaggagttccttcgggcgctgcggccccccatgtcccaggcccgggaggctgtcatcgcagctgcatttgccaagctggaccgcagtggggacggcgtcgtgacggtggacgacctccgcggggtgtacagtggccgtgcccaccccaaggtgcgcagtggggagtggaccgaggacgaggtgctgcgccgcttcctggacaacttcgactcctctgagaaggacgggcaggtcacactggcggaattccaggactactacagcggcgtgagtgcctccatgaacacggatgaggagttcgtggccatgatgaccagtgcctggcagctgtgagcagctccggctcagccctgctgccctggcctgtcactccccacccctgccggagacctcccttccctgggccccttctctcctgggcagccacaccacagagcggggaggggcaggtgggggaatggaggctgcaggactggctagaccaggtccctgccggtccaccaggcggaggtgggacaaaggtcctaacaggagtcactggctcaggaccccagggagaaacgctctccccacccacgccatgctgaccagagatcttgcagcccctgtggatgcccccgccgaggtcccccgatccccgcacccggactgctgctccctgcccctcccttgcgggtcccccaggaagccaggtgaccccaggtgggaggctgtgtgtggaggccatcctggaaggaagtttagacctgcccaggtgtggagcgaggggcacaggggcatcctaacctcagaaactgaaataaagcctttgaaaaaaaaatctgtaaaacatcaacccccaatcagaagatggcaaatggggaataaaaatagcaggtaacatgtccagcgggcccagtatctacattctggtgagcggcccgaggctgggagctctgggcgggggcagaccggcggggccttgcagcaggggtgggggtaaagtgcgggtggtggtggagagaacagggctgtggctggaccccagcactggtgacacgctgggtgggagcatgaggccccaggctgctggaggtcctcgcccggggaggtggaggccgttcctggtcaggggcttcctgaggcccctggggcatgcagaggccagggttttagttaaaagtttaatgtagttcccaaatacatttcatatgacaatcttacataaatgttccaaaacacaaaaa

SEQ ID NO: 2234 - DNA, 1925 bp, Homo Sapiens
  NM_004059
gtcgccatctttatgaggagaattctagcggcgctttctcccgctctcgcctccgcgctagcgccctgctgcttcggggcggaagtagcggagccgggctcggcccccttaaagggacagggactgctgcaacctacggggtgtacttgggaacgaggggtgaagcggcccaggtgaggctcgccatggccaaacagctgcaggcccgaaggctagacgggatcgactacaacccctgggtggagtttgtgaaactggccagtgagcatgacgtcgtgaacttgggccagggcttcccggatttcccaccaccagactttgccgtggaagcctttcagcacgctgtcagtggagacttcatgcttaaccagtacaccaagacatttggttacccaccactgacgaagatcctggcaagtttctttggggagctgctgggtcaggagatagacccgctcaggaatgtgctggtgactgttggtggctatggggccctgttcacagccttccaggccctggtggacgaaggagacgaggtcatcatcatcgaacccttttttgactgctacgagcccatgacaatgatggcagggggtcgtcctgtgtttgtgtccctgaagccgggtcccatccagaatggagaactgggttccagcagcaactggcagctggaccccatggagctggccggcaaattcacatcacgcaccaaagccctggtcctcaacacccccaacaaccccctgggcaaggtgttctccagggaagagctggagctggtggccagcctttgccagcagcatgacgtggtgtgtatcactgatgaagtctaccagtggatggtctacgacgggcaccagcacatcagcattgccagcctccctggcatgtgggaacggaccctgaccatcggcagcgccggcaagaccttcagcgccactggctggaaggtgggctgggtcctgggtccagatcacatcatgaagcacctgcggaccgtgcaccagaactccgtcttccactgccccacgcagagccaggctgcagtagccgagagctttgaacgggagcagctgctcttccgccaacccagcagctactttgtgcagttcccgcaggccatgcagcgctgccgtgaccacatgatacgtagcctacagtcagtgggcctgaagcccatcatccctcagggcagctacttcctcatcacagacatctcagacttcaagaggaagatgcctgacttgcctggagctgtggatgagccctatgacagacgcttcgtcaagtggatgatcaagaacaagggcttggtggccatccctgtctccatcttctatagtgtgccacatcagaagcactttgaccactatatccgcttctgttttgtgaaggatgaagccacgctccaggccatggacgagaagctgcggaagtggaaggtggaactctagccctgaagtcacgccttggccctgacatccccacatgcccgcagagatcctctttgagtgtctgtctttgtccaggtttcagacatttctaggttggggaagatgctattgggaaacctcttctccgtgacacagaatgttctgggtgggagccgcccttcttcatcttagagaaccaagtgcctcctgtctgaaaggtgagggtggcctgacctgggcctctccctgcccctccataggtgggtttgtagggtcttgtgttgcttctggtctctccaggcttggctgagacggacggtagacttccaccatgtaccgatcacatcccagctctgcatggcccctgctaaggctcaggtataacctcaccttccctggctcatcttggccttggggagttgcctttaggcttgagtcctcaagcctctccttttcgtccataataaaatgtttaagttattaagatcctta

SEQ ID NO: 2235 - DNA, 3447 bp, Homo Sapiens
  NM_004067
actcgaagtgcggcgggagaggcgggagcccaggagagggtgcgggagctggcggggcggctcggagctgccaggacgccctggtcccagccgcgcacaggggagcgtggacggcagaggggctcggcgggagccgagatccgcccgtcccggctgcccctcggcctccctctgctcccacctaccccctgacacccatagaaaagcgtgcaaaggcgcggagcgggacggaaaccacaaataaatagcggcggcggcagcgcgtcatctggtggagcaggaagtgcaggcagagtccggaggctggtgctttctgcgcgtccccaggactttgccatgggctgggggccgcggaggctgcgagcggccgggcgagggcagcggcggcggcgtccgcaccggggctgagcgagcagcgacgcgaggggcgcgcggagatggcagcgtccagcaactccagcctgtccggctcgtcggtgtcctccgatgctgaagaataccagcctcctatatggaaatcatacttatatcagttacagcaagaggcacctcgtcccaagagaatcatttgtcctcgggaggtggaaaacagaccaaaatattatggaagagagtttcatgggatcatctctcgggagcaggcggatgagcttcttggaggcgtggagggtgcctacatccttagagaaagccagcggcaaccaggatgctacacgctggctctcaggtttggaaaccagaccttaaactacaggctcttccacgacgggaaacactttgtgggtgagaagaggtttgagtcgattcatgatctggtgacagatggcttgataacactgtacatagaaacaaaagctgccgagtacatttcaaaaatgacaactaaccccatctatgaacacattggatatgccaccctactcagagaaaaagtatccagaaggctgagcaggtctaaaaatgaaccaagaaaaacaaacgtcacacatgaagaacacacagcggtggaaaagatctcctccctggttcgaagggctgccctcacacacaacgacaaccacttcaattatgagaagacacacaactttaaggtccacacgttccgaggcccacactggtgtgaatattgtgccaatttcatgtgggggctcatcgcccaaggggtccggtgctcagactgtggattgaacgtacacaaacagtgttccaagcacgttcccaatgactgccaacctgatctcaagaggatcaagaaagtgtactgttgtgacctcacaacacttgtgaaggctcacaacactcagagacccatggtggtagacatatgcattcgggaaattgaagcaagaggattaaaatcggaaggcctttacagagtctctgggttcactgaacacattgaagatgtcaaaatggcatttgacagagatggtgaaaaggccgatatatctgccaatgtctatccagacataaacatcatcactggagcccttaaactgtatttcagagacttacccatccctgtcatcacatatgatacctattccaaatttatagatgcagcaaaaatctccaatgcagatgagaggctggaagccgtccatgaagtgctgatgctgctgcctcctgcccactatgaaaccctccggtacctaatgatccacctcaaaaaggttactatgaatgaaaaagacaatttcatgaatgcagaaaatctggggatcgtgtttgggcccactctgatgaggccccctgaggacagcaccctgaccaccctgcatgatatgcggtaccaaaagctgattgtgcagattttaatagaaaacgaagacgttttattctaatccatcagggaaatgagctgaatggccccagcaccatccaagttgacacagctaaaggaataaaaacatttcttaccacttgatttgttttccaagcaagtgctagaatttgctggactgcagaggatcgctgagtggggtactgtgtctcatagacatgcgccacctccacgtgagaacaagggtgaaggtgagggaagcccctcaccttgggtcttttgctgtgcctcctatgtatgtctggtttgctggaagagtgattaatacatctttaatttattaaaaaacaatgtagacctttaaacttcagtcttattggtaataaaagggaacttaattcatacaggtacttgatacagttatacattttccacttacaaaaagaagacaattctgttaaatgaaacgtgtatcgtaaaatgtatttttattttacccacgagaatgttgttatttttagcaaatagaactcaatgcagtgcattggttattaccctgtgtaccttgtccctcattttgctgtgacaccctgaaaaagctgaccacaaatgcagtattatcttgacatacctctgtcctcctcagtgctttttaatgaaatttcacctgccccttgtgttcctgctttggatagtttttgctcttaagcattggcattcttctattgtatggtatgtatttatagcaattgtaggatggtctgaaatgtccacacactttctatgcatacaaattttgtgaattcccaaagtatgctttggaattggtcatagtcttttcgtatcatgagtgtgtatcccagaagatacagaatgcggtcattttacctgaaattatttgagaacactggatgtatctggtctgtgtaaaaagttagcacttaccctcttttcttcctggccaagccctctgaattcatctgttaatatcaaattgtatttttgccacatttctgtattggtgaaaagcgaatctgcagaataactgtcaacgtttttcattcttgttttacaaacctattttttaaagtgagaataaggttggtttttaccaaatatttgttcctccttgacaaaagtagctctgtgtggataatatgattttattactacagttccagtcacttggttatatttatcttagcatgagcctttcacaccaagatttctatattttgtaacataggtgaaatatttaaaacatcaaaaactgtaaatctagatttttaaaaaatccaactgcaatgtcttttcctttgattgagatgatttgtgtaaactcaccagtcttgctttggagtgagcagaagagaatgactattttacgtggagcatcattgtgtgactgttgacctggacagtcccaagggctatgcagatggactccattggcacagggaggtttgacctcttccctgctattatccctcctcccaactgtacagatttgtttgttgtagtttatgtacttcttgatactgtcaaaaaattatctggaaatggttttattttgtgaagtgaacaatactttgtaatttatgatagtgtaaatggaaggcaaagcatcacatgtattaaattcttctgtctattaaaaaaaaaaa

SEQ ID NO: 2236 - DNA, 1958 bp, Homo Sapiens
  NM_004068
ggcggcggcactgcggtgaaagccgaggcagcgggcagacgagcagggggcgggcggacatcttgggatccggagagtggccgggccggcagagcagggggccgaggacaccaggtctgttctcagagcgatgggccgcggagactgatctgccgccatgattggaggcttattcatctataatcacaagggggaggtgctcatctcccgagtctaccgagatgacatcgggaggaacgcagtggatgcctttcgggtcaatgttatccatgcccggcagcaggtgcgcagccccgtcaccaacattgctcgcaccagcttcttccacgttaagcggtccaacatttggctggcagcagtcaccaagcagaatgtcaacgctgccatggtcttcgaattcctctataagatgtgtgacgtgatggctgcctactttggcaagatcagcgaggaaaacatcaagaacaattttgtgctcatatatgagctgctggatgagattctagactttggctacccacagaattccgagacaggcgcgctgaaaaccttcatcacgcagcagggcatcaagagtcagcatcagacaaaagaagagcagtcacagatcaccagccaggtaactgggcagattggctggcggcgagagggtatcaagtatcgtcggaatgagctcttcctggatgtgctggagagtgtgaacctgctcatgtccccacaagggcaggtgctgagtgcccatgtgtcgggccgggtggtgatgaagagctacctgagtggcatgcctgaatgcaagtttgggatgaatgacaagattgttattgaaaagcagggcaaaggcacagctgatgaaacaagcaagagcgggaagcaatcaattgccattgatgactgcaccttccaccagtgtgtgcgactcagcaagtttgactctgaacgcagcatcagctttatcccgccagatggagagtttgagcttatgaggtatcgcacaaccaaggacatcatccttcccttccgggtgatcccgctagtgcgagaagtgggacgcaccaaactggaggtcaaggtggtcatcaagtccaactttaaaccctcactgctggctcagaagatcgaggtgaggatcccaaccccactgaacacaagcggggtgcaggtgatctgcatgaaggggaaggccaagtacaaggccagcgagaatgccatcgtgtggaagatcaagcgcatggcaggcatgaaggaatcgcagatcagcgcagagattgagcttctgcctaccaacgacaagaagaaatgggctcgaccccccatttccatgaactttgaggtgccattcgcgccctctggcctcaaggtgcgctacttgaaggtgtttgaaccgaagctgaactacagcgaccatgatgtcatcaaatgggtgcgctacattggccgcagtggcatttatgaaactcgctgctagctgccactaggcagctagcccacctccccagccaccctcctccacaggtccaggtgccgctccctcccccaccacacatcagtgtctcctccctcctgctttgctgccttccctttgcaccagcccgagtctaggtctgggccaagcacattacaagtgggaccggtggagcagcccctgggctccctgggcaggggagttctgaggctcctgctctcccatccacctgtctgtcctggcctaatgccaggctctgagttctgtgaccaaagccaggtgggttccctttccttcccacccctgtggccacagctctggagtgggagggttggttgcccctcacctcagagctcccccaaaggccagtaatggatccccggcctcagtccctactctgctttgggatagtgtgagcttcattttgtacacgtgtgacttcgtccagttacaaacccaataaactctgtagagtggaaaaaaaaaaaaaaaaaaa

SEQ ID NO: 2237 - DNA, 5420 bp, Homo Sapiens
  NM_004072
agtcccattcagggaagcagccccggcggccagcagggagctcaggacagagcaggctccctgggaagcctccgggtgataggggtgttccagctgcggcgctctgggggttcagagggggatcttgaatgaacaaatgaatgaactgctttctgggcaaacagccacagccagaggagcctgtgattggcagaaagaagccagggtgtgcaagtctccccaacagcctcgagtggcctgcagtcacagggaaccctcaggaagaccttccgggcagagaccagagggaagcccatctctccagcagaactgcttggatttttctaccaggaggctcagggctctgcaacaatgatagcagaagctgatggcatctagagatctaggctgggactagcacagcatcacttctaccactttctgttggtcacagcaactcaccatgccagtgcagattcaaggggaggagaaatagagtccacttcttgatgggaggcgtgacatagaatggaggatgaagattacaacacttccatcagttacggtgatgaataccctgattatttagactccattgtggttttggaggacttatcccccttggaagccagggtgaccaggatcttcctggtggtggtctacagcatcgtctgcttcctcgggattctgggcaatggtctggtgatcatcattgccaccttcaagatgaagaagacagtgaacatggtctggttcctcaacctggcagtggcagatttcctgttcaacgtcttcctcccaatccatatcacctatgccgccatggactaccactgggttttcgggacagccatgtgcaagatcagcaacttccttctcatccacaacatgttcaccagcgtcttcctgctgaccatcatcagctctgaccgctgcatctctgtgctcctccctgtctggtcccagaaccaccgcagcgttcgcctggcttacatggcctgcatggtcatctgggtcctggctttcttcttgagttccccatctctcgtcttccgggacacagccaacctgcatgggaaaatatcctgcttcaacaacttcagcctgtccacacctgggtcttcctcgtggcccactcactcccaaatggaccctgtggggtatagccggcacatggtggtgactgtcacccgcttcctctgtggcttcctggtcccagtcctcatcatcacagcttgctacctcaccatcgtgtgcaaactgcagcgcaaccgcctggccaagaccaagaagcccttcaagattattgtgaccatcatcattaccttcttcctctgctggtgcccctaccacacactcaacctcctagagctccaccacactgccatgcctggctctgtcttcagcctgggtttgcccctggccactgcccttgccattgccaacagctgcatgaaccccattctgtatgttttcatgggtcaggacttcaagaagttcaaggtggccctcttctctcgcctggtcaatgctctaagtgaagatacaggccactcttcctaccccagccatagaagctttaccaagatgtcatcaatgaatgagaggacttctatgaatgagagggagaccggcatgctttgatcctcactgtggaacccctcaatggactctctcaacccagggacacccaaggatatgtcttctgaagatcaaggcaagaacctctttagcatccaccaattttcactgcattttgcatgggatgaacagtgttttatgctgggaatctagggcctggaacccctttcttctagtggacagaacatgctgtgttccatacagccttggactagcaatttatgcttcttgggaggccagccttgactgactcaaagcaaaaaaggaagaattctcaaaagcattgccatgaactgggattggcatagggcggtgggattaagctgcctattgtgtgtgccccagaaatgacactctccaaggtccattcctggtgtgagcagtgagggggtcagagcaaacccagtgtgatgcagatcacacttggcccttgtatatatattatcagtagctggccagaaaaccctaccttcaagtcactgctctgtgttaaagtatgtggaaatgcataggtgatctgggagaggaaggtgacatatcagcccatgaactccataggccatgaatttggctttcggatcagctaggaagacagagaactggtcctgagaggtcctgtgggctctttgcaagggcaagacaagtgagggatgcaacgaggacttgagatttggcaaagaaatgagaaaggagaaaagaacctttaaaggatgcaggcatggagcagctcaccctagaacatcgcaggctgatggtgctttaggctggagctatttggggcgtcagggtggtgccagcccctgatctcaccttgcccctcttacctgggggtggggttgtggcaggcatcttcaccagcagccctcaccccatcacagggatttttttctgcctttcctaatccactcagctctggctggaggtgcttagaataaaacactggtggtggggcttctcattctggttaatttcctcaacgcctttggagacaggtccaaaatgcagctttgggaagcaactccggagagtcccctgggaagaagagtatgtccgaggactcagtcacttgagacagagtctggagctggactccttgaactgtgtttctgagctgcagacaccaaatacctcctggatacaggtgcctggcatggcttttctcatctaatactgacacgtccctgtggccacagagtgtcatagccccatttacaaatgacatagctgaggcccagatggggaaagtaacttgcccagcatcacacagctaatcagtggcagagttaagatctgaacctggctccgtctggctccagaaactctgttcttctatttggaatttatctgtggagattattctagtatattgatagcctacatttatttagcactttttatattatgcactttacatatgttttctcatttaatcattacagcaaccctgagttaggtatggttataacttcccttttacataggaggaatctgaggcttagagaggttaagtaacttgcccaaaggtacccagctagtctctgccggagcttggatttgaacttcagtttgcctggctcaaatgaggctgcagagttgggaaggacttaaaaagtttggagatttttgccataaatattgatttttctgcaaatgaggatgaacatcttaatggcctttaagaaactttgcaaatagttttcaaaaatgatgcaacatggcagagaaaatgcacttggcttccagctccctcaacagccattaacagcctcctaccgtggctcccacctcctatgtctccagagatcaaggcaatggggagggaaagctggcaggaggcagtcccttgtgggcctgaggccctttggctcctaagtgtccacattctgttctcttccaagtcccttcattgttaagctgattctccaacaagatgcaatgaacagatgcaatgtctaccccgcgctgggcgagttcccgaggccatgggctgtttggaatcacacttcattaagagacaaactgttccttcccttattgtgccttaatgcttatgacaaggcagctctgaattgatcccaagctggagcctctgaatgctttaaagagtttgaatatagacggtttgagagcaaaaagggagctttaaatattgctcagtggcccccatctcccctcttcccacatttactgaggcacgagatgggatgggacctgtcccgggtcacagcagcagtcgtcagcgccttggccctcctggcttgtaggatgctgcttttcctgggcttctggcagtccaggccaggatgggggagccaggaattcatgttgtcattggaaaagctgataaacaggagcacaattcaaaccggctgttttcctccttagagtctggcctccctctttctggctgctctgtgggtcttcctgttctgacttaggttcctgtcaagtacttaaatgcagccttaacatcccatacagtcttgtccccacagcttcatgtgaacatctccatgggtcatgcatatatcgtccctgcagtgtgcaaagtgtgctcacctgcactgctgcacaggcaaccaacatacttagtgcccagagccttctctctgggcccaggactcagtgatggggccttacttagccctgcctcctgggtggggtgggggagctgagggatcgtgaggacaagaggtagagggaaaagaaaagaagatggtgtttgaggataggggagggacaggagaggggacagaaaggtcccagagcatgatgatgaaggaaagggatctggcattcatgaagcacctacgatggttcaggcacaaacactgaaacctcaaattggccctggcagaaggggaccatcatagcaaggtggggggggggtgcagaaagtgagtttctgtttcaagaacagacttcactagttcagagttgcacagctagtgaggtatggagctgggctttgaatcaggtcagctgcctgaatgcccaacttcttcagcccttggaaggagagggtggggagaagaagaaggaaaagacaaggaagaaagaaagaagagagaaggggagaggaatggaagtccaaagagtgggaggaatttgatttcagaaccatctccagctgacccttgagccagcaaggacagggagaagggaagagcaagaacacgaagggcctcaagcaccgggatgcctttgccagccttagataattcccagagcgcacagagccctgcaggttcctgggtccttctccagagaagaggcacagagattctggcagcaaggttcagaaggggtgaggaaactgggcactgacaaagggaggggattggctcaaattcgaccccagagtcagctctggtggggttgggagcctggatgggtgggagaagatagaatccaatcgtgaaaaccataagggaccttcaaactcatcttgcccagatgtctcccatttcacagatgagggaactgaggttttgagagcttcccctgaggactctgcaaaacgaggtggtgtctggtttggatgaaagtggtcggtgattcctcaactcctgccctgcctccctctctcgttcctccctaacatgttatgctcttgttggggctgggatgccctaggcccaaggttaccaaatcctgggtttggaaaattgctgctgggggtggtatctaggaccagagaggaatctactatttctactgtgaaataattcagcagggggtcttcttacttcttccctttgaggacaaagtttctctcgaataaagagactgaagcaaga

SEQ ID NO: 2238 - DNA, 3273 bp, Homo Sapiens
  NM_004075
ggtcaacgcgatttgcttccaagggacggccaccagtcggcacaggaaaggggcagaggcagtgagttcagcgtgtggacgagggtcaacaagtttgggatcaagcggctgccgctcctccaaaagcgaccgaagcgcgagcagattacccctccgagccagtgtagtaaacacacttcagaaacgtgaggtgccggtggtcacgaggggagcgcgccctccaatgaggagccgggggcggggccgaggccgctgacgcggcggcggcggcagagtcacccgggcagcctcgggaccggtcaccggccggcaaccgtccagcggcctcgaccaccgcctctagcctccgttcccggtcctttctcccgggccgagagacagcgtcgccgacaggggctcattcccctccggttctcctcggtgactcacctcgggcgggccgttttgtctttaggggccgccttggtggggcgaggtttccgtgacgaatctcctggggccgtccgtgccggctcgggccgtcgtggcggctcgagctcctggaacttgctcaggctccggaggtccgaggccctcgaagttatgcgtcgcctccaggcggttgcggcgggcgcgggctcctaaagggcgtcacacccggactccgccgactaggcaacctccattcatctttccactgcgcctccggcgcccccgccttctccggtcccctcctcggagtcattttttcctgttccccctctgccgccctttcctcacgccccgggtgaggcaattctcttggaagcgaaggtgtcggctatgagccggagcctccttccttgaatttctccgtggaggacccgccgcgccccccggcatgggggtgaacgccgtgcactggttccgaaaggggctccggctccacgacaaccccgccctgaaggagtgcattcagggcgccgacaccatccgctgcgtctacatcctggacccctggttcgccggctcctccaatgtgggcatcaacaggtggcgatttttgcttcagtgtcttgaggatcttgatgccaatctacgaaaattaaactcccgtctgtttgtgattcgtggacaaccagcagatgtgtttcccaggcttttcaaggaatggaacattactaaactttcaattgagtatgattctgagccctttggaaaggaacgagacgcagctattaagaaactggcaactgaagctggagtagaagtcattgtaagaatttcacatacattatatgacctagacaagatcatagaactcaatggtggacaaccgcctctaacttataaaagattccagactctcatcagcaaaatggaaccactagagataccagtagagacaattacttcagaagtgatagaaaagtgcacaactcctctgtctgatgaccatgatgagaaatatggagtcccttcactggaagagctaggttttgatacagatggcttatcctctgcagtgtggccaggtggagaaactgaagcacttactcgtttggaaaggcatttggaaagaaaagcttgggtggcaaattttgaaagacctcgaatgaatgcgaattctctgcttgcaagccctactggacttagtccttatctccgatttggttgtttgtcatgtcgactgttttacttcaaactaacagatctctacaaaaaggtaaagaagaacagttcccctcccctttccctttatgggcaactgttatggcgtgaatttttctatacagcagcaacaaataatccacgctttgataaaatggaaggaaaccctatctgtgttcagattccttgggataaaaatcctgaggctttagccaaatgggcggaaggccggacaggctttccatggattgatgccatcatgacacagcttcgtcaggagggttggattcatcatctagccaggcatgcagttgcttgcttcctgacacgaggggacctgtggattagttgggaagaaggaatgaaggtatttgaagaattattgcttgatgcagattggagcataaatgctggaagttggatgtggctgtcttgtagttccttttttcaacagttttttcactgctattgccctgttggttttggtaggagaacagatcccaatggagactatatcaggcgttatttgcctgtcctaagaggcttccctgcaaaatatatctatgatccctggaatgcaccagaaggtatccaaaaggtagccaaatgtttgataggagttaattatcctaaaccaatggtgaaccatgctgaggcaagccgtttgaatatcgaaaggatgaaacagatctatcagcagctttcacgatatagaggactaggtcttctggcatcagtaccttctaatcctaatgggaatggaggcttcatgggatattctgcagaaaatatcccaggttgtagcagcagtggaagttgctctcaagggagtggtattttacactatgctcatggcgacagtcagcaaactcacctgttgaagcaaggaagaagctccatgggcactggtctcagtggtgggaaacgtcctagtcaggaagaggacacacagagtattggtcctaaagtccagagacagagcactaattagaaaacattcaggaggaatactgttgcagctgaaattggtggggagttcaatacttttcaattaagttatttaaaaatattcttcattgatggaaagcagttacatattgaaatatgttgtttctaatgacatttctgtggtttttaactttttaatgaatttcacagaggacaattggtaatttgtatataaagaacttggcaagagaatttgcttaatgtaaatataaacagtcacaattagtatagacccatcgatatatttttgataatttttcatgtatggtaaagttaaaatgacaaattgatattctgatataaaactcaaagttttgaagtcagtgggaaaaaaggaggtttttagactttcttaaaagacgttaaaattttaggacagaattttcttgatgttgtttgatctaactttgcactctttgataataatgttttagataatgtgcgtaatccaaattggtattgtagcctctgttaacacagacagtatatgttttaaactttgatgtaaacctttttagacccaaacttgtggaagtatcatgtgttaagttctctgtctctgtttctttgttcatttattactaaaatgaacttgttattaaagtatatgcaaatatgaaaaaaaaaaaaaaaaaa

SEQ ID NO: 2239 - DNA, 2997 bp, Homo Sapiens
  NM_004077
agtgggcggggcctccttgaggaccccgggctgggcgccgccgccggttcgtctactctttccttcagccgcctcctttcaaccttgtcaacccgtcggcgcggcctctggtgcagcggcggcggctcctgttcctgccgcagctctctccctttcttacctccccaccagatcccggagatcgcccgccatggctttacttactgcggccgcccggctcttgggaaccaagaatgcatcttgtcttgttcttgcagcccggcatgccagtgcttcctccacgaatttgaaagacatattggctgacctgatacctaaggagcaggccagaattaagactttcaggcagcaacatggcaagacggtggtgggccaaatcactgtggacatgatgtatggtggcatgagaggcatgaagggattggtctatgaaacatcagttcttgatcctgatgagggcatccgtttccgaggctttagtatccctgaatgccagaaactgctacccaaggctaagggtggggaagaacccctgcctgagggcttattttggctgctggtaactggacatatcccaacagaggaacaggtatcttggctctcaaaagagtgggcaaagagggcagctctgccttcccatgtggtcaccatgctggacaactttcccaccaatctacaccccatgtctcagctcagtgcagctgttacagccctcaacagtgaaagtaactttgcccgagcatatgcacagggtatcagccgaaccaagtactgggagttgatttatgaagactctatggatctaatcgcaaagctaccttgtgttgcagcaaagatctaccgaaatctctacagagaaggcagcggtattggggccattgactctaacctggactggtctcacaatttcaccaacatgttaggctatactgatcatcagttcactgagctcacgcgcctgtacctcaccatccacagtgaccatgagggtggcaatgtaagtgcccataccagccatttggtgggcagtgccctttccgacccttacctgtcctttgcagcagccatgaacgggctggcagggcctctccatggactggcaaatcaggaagtgcttgtctggctaacacagctgcagaaggaagttggcaaagatgtgtcagatgagaagttacgagactacatctggaacacactcaactcaggacgggttgttccaggctatggccatgcagtactaaggaagactgatccgcgatatacctgtcagcgagagtttgctctgaaacacctgcctaatgaccccatgtttaagttggttgctcagctgtacaagattgtgcccaatgtcctcttagagcagggtaaagccaagaatccttggcccaatgtagatgctcacagtggggtgctgctccagtattatggcatgacggagatgaattactacacggtcctgtttggggtgtcacgagcattgggtgtactggcacagctcatctggagccgagccttaggcttccctctagaaaggcccaagtccatgagcacagagggtctgatgaagtttgtggactctaagtcagggtaaaactggagactgggtgaaagtgactaccagaaagtgaggaagcctaaataaaaagtatacttttgtttcagggggcctttaaagacttaagattaaattatatctgaggcactgataatatgtttgaggttaaaatataaattaagactttaaaagatgaaaaatggtcccttcttccctaatcagctcccttcccctgcctggtatgagttgcccatcatacgcatggtcctggaggatgaccaggactaatgcatgtggtatgagtaggtttggccccctcactatctctagagtgagaatctggctcctgtttccatgggtcaaagccggttgcagagaatctgtagtcactttggagctttagcttctctgccaagccctcaataagccagcaaaccaggactctgccccttctgtttccataggaatcatgttggatagtcagctgtaccaagccccttggccctctcccatgcacacaaacacctcctagcaagacctgttggttagctggacatgctttggcaatttttttatactaccaagtgaccataaaggcatggcatttgttgtgactggcacccaatgtttgattttttttttaaaactatccaattaaaattaaggtctgggagtgttctgtttcccattactttaatactcacctcctcccagactttctacacctgttgcacctcaggcagaggatgttctggacctccccctcttggtccctactagagacctctcaacagatctgtgggcccagtcattgggttttatcagtgcttaatgtgaactaagttttttacttccacagaatacaagccactaccttctgacctccccaccccccaccaacccccatcttttaatatgctgtggggcatagaactccggaatgaccagcatgatattttcagagtcttgtccccggggtattagcacctctttttgaacagggaattgattcaagattggacatggtctcctctgattatcaggtactggggctgagggcattaaaaatagtaagcctccctcctcgtcccctgcctcaagaaattgcctccttatttatcaacatctttttcctccctttccctgagagctcacagtacaatgtttcagaagccccatttgcacaggttttcagcaactcagaatgctctacttctttttctttgagaaaggattaagatacactcctgctgtgcccccatctttcctccaaactcctgcctgtgtttgtgtggatacccagtcccagaaccacactgttgagttggacacactgtaaacccctgggtaactgtcaagtcatgatggagacttcaggttgttctgtataaaatgcaaaataaatgtttttattaacaatgaaaaaaaaaaaaaaaaaaaaa

SEQ ID NO: 2240 - DNA, 4107 bp, Homo Sapiens
  NM_004079
gacaagggctcttcttgatggcttactgtatccactttgtccccaagaccatagggaaatgactagaggtgactgtactagctagattttaaatgaaactgaaatgaaagttcacttcctcattttgagtacctcatgtgacaagttccaatttcttttcaagtcaattgaactgaaatctccttgttgctttgaaatcttagaagagagcccactaattcaaggactcttactgtgggagcaactgctggttctatcacaatgaaacggctggtttgtgtgctcttggtgtgctcctctgcagtggcacagttgcataaagatcctaccctggatcaccactggcatctctggaagaaaacctatggcaaacaatacaaggaaaagaatgaagaagcagtacgacgtctcatctgggaaaagaatctaaagtttgtgatgcttcacaacctggagcattcaatgggaatgcactcatacgatctgggcatgaaccacctgggagacatgaccagtgaagaagtgatgtctttgatgagttccctgagagttcccagccagtggcagagaaatatcacatataagtcaaaccctaatcggatattgcctgattctgtggactggagagagaaagggtgtgttactgaagtgaaatatcaaggttcttgtggtgcttgctgggctttcagtgctgtgggggccctggaagcacagctgaagctgaaaacaggaaagctggtgtctctcagtgcccagaacctggtggattgctcaactgaaaaatatggaaacaaaggctgcaatggtggcttcatgacaacggctttccagtacatcattgataacaagggcatcgactcagacgcttcctatccctacaaagccatggatcagaaatgtcaatatgactcaaaatatcgtgctgccacatgttcaaagtacactgaacttccttatggcagagaagatgtcctgaaagaagctgtggccaataaaggcccagtgtctgttggtgtagatgcgcgtcatccttctttcttcctctacagaagtggtgtctactatgaaccatcctgtactcagaatgtgaatcatggtgtacttgtggttggctatggtgatcttaatgggaaagaatactggcttgtgaaaaacagctggggccacaactttggtgaagaaggatatattcggatggcaagaaataaaggaaatcattgtgggattgctagctttccctcttacccagaaatctagaggatctctcctttttataacaaatcaagaaatatgaagcactttctcttaacttaatttttcctgctgtatccagaagaaataattgtgtcatgattaatgtgtatttactgtactaattagaaaatatagtttgaggccgggcacggtggctcacgcctgtaatcccagtacttgggaggccaaggcaggcatatcaacttgaggccaggagttaaagagcagcctggctaacatggtgaaaccccatctctactaaaaatacaaaaaattagccgagcacggtggtgcatgcctgtaatcccagctacttgggaggctgaggcacgagattccttgaacccaagaggttgaggctatgttgagctgagatcacaccactgtactccagcctggatgacagagtggagactctgtttcaaaaaaacagaaaagaaaatatagtttgattcttcatttttttaaatttgcaaatctcaggataaagtttgctaagtaaattagtaatgtactatagatataactgtacaaaaattgttcaacctaaaacaatctgtaattgcttattgttttattgtatactctttgtctttttaagacccctaatagccttttgtaacttgatggcttaaaaatacttaataaatctgccatttcaaatttctatcattgccacataccattcttattcctaggcaactattaataatctatcctgagaatattaattgtggtattctggtgatggggtttagcaactttgatggaagaaaatattaggctataaatgtcctaaggactcagattgtatctttgtacagaagaggattcaaaacgccacgtgtagtggctcatgcctgtaatcccaacactttgggaggctgaagtaggaggatcgtcttgagcccaggagttcaagaccagcctggacaacatagtgagaccttgtctccacaaaaataaaaaagaaactatccaggagtggtggtgtgtgcctgtggtccctgctatgcagatgtctaagacaggaggatcacaagagcccaggaggttgagaatgcagtgagcttgtaattgcaccactgcactccagcctgggtgacagagcaagaccctgtcttaaaaaaagaggattcaacacatatttttatattatgttaaagtaaagaaatgcataaaagacaagcactttggaagaattattttaatgatcaacaatttaatgtattagtccaaattatttttacgtagtcatcaacaatttgaccagggcctttatttggcaaataactgagccaaccagaataaaataaccaatactccactgctcatatttttatctaattcagatggatcttccttacaactgctctagattagtagatgcatctaagcaggcagcaggaactttaaattttttaagttcatgtctatgacatgaacaatgtgtgggataatgtcattaatatatcctaaattaacctaaacgtatttcactaactctggctccttctccataaagcacattttaaggaacaagaattgctaaatataaaaacataaataataccataatacatggctatcatcaaaagtgtatagaatattatagtttaaaagtatttagttgattacttttcagttttgttttgttttttgagacggagtctcactctgttgcccaggctggagtgcagtggcaccatctcagttcactgcaacttctgcctcccgagttcaagcgattctcctgcctcagcctcccgagtagctggaattataggcgtgcaccaccacgcccagctaatttttgtatttttagtaaagacagggttttgccacattagccaggctggtctcaaactcctgacctcaggtgatccacccaccccagcctcccaaagtgctaagattacaggcgtgagccactgagcccagcctacttttcagtttttaacataatttttgttttatccacaacttttcaagtattgaaagtagaataaaaacatgggttcttagtctttagctatctgttaaagcctatgaatgccttcttaaaatcatgtttttaaatgcataaaatatataggattacaaaggaatctaattatatcgaaatacagttattaaaatgttaaaagataagtttgttatatattaatatgcatgcttctttataaatgcattaaataagagttaatagctatcctaaatttgaaatagtgataagcataatgaaaatagatgcaaaaaactaatgtgatatgaaaatatctgggtttttcttttgatgatgaagtattgctaatattaccgtggtttatgaactatgttcagaattgaagaaaatcctaactttcagttagaggttagtgacggggttcaggacaccctacacaaaatacagcactttgacatattgaatattttaagctgaaggcatttgaggaaattgcagaagcaggaaggtgactctgaccttctgcctgctgttctccccagaagcagccataaaacctgggaaggattttctgaccttcccctgaagtagatcataagactgtcatgtaagaggtgctctcctggcacccagagaaaaggagcatccttacctccaaaagcacagggacacaaagaggaatctaaacaaacaggcctctcagtttcccccagtttattacatttagcttgttcacactttgccctatgacatttctacatcactggctgctcttcatcaaacctactataaaaaacattcaagttcaactgtttctttgggcctttatttccttatggagcccctcgtgtcgtgtaaaacttatattaaataaatgtgcatgcttt

SEQ ID NO: 2241 - DNA, 924 bp, Homo Sapiens
  NM_004083
gaggtcagagacttaagtctaaggcactgagcgtatcatgttaaagatgagcgggtggcagcgacagagccaaaatcagagctggaacctgaggagagagtgttcaagaaggaagtgtatcttcatacatcaccacacctgaaagcagatgtgcttttccagactgatccaactgcagagatggcagctgagtcattgcctttctccttcgggacactgtccagctgggagctggaagcctggtatgaggacctgcaagaggtcctgtcttcagatgaaaatgggggtacctatgtttcacctcctggaaatgaagaggaagaatcaaaaatcttcaccactcttgaccctgcttctctggcttggctgactgaggaggagccagaaccagcagaggtcacaagcacctcccagagccctcactctccagattccagtcagagctccctggctcaggaggaagaggaggaagaccaagggagaaccaggaaacggaaacagagtggtcattccccagcccgggctggaaagcagcgcatgaaggagaaagaacaggagaatgaaaggaaagtggcacagctagctgaagagaatgaacggctcaagcaggaaatcgagcgcctgaccagggaagtagaggcgactcgccgagctctgattgaccgaatggtgaatctgcaccaagcatgaacaattgggagcatcagtcccccacttgggccacactacccacctttcccagaagtggctactgactaccctctcactagtgccaatgatgtgaccctcaatcccacatacgcagggggaaggcttggagtagacaaaaggaaaggtctcagcttgtatatagagattgtacatttatttattactgtccctatctattaaagtgactttctatgagccaaaaaaaaaaaaaaa

SEQ ID NO: 2242 - DNA, 514 bp, Homo Sapiens
  NM_004084
ggctgctccttgctatagaagacctgggacagaggactgctgtctgccctctctggtcaccctgcctagctagaggatctgtgaccccagccatgaggaccctcgccatccttgctgccattctcctggtggccctgcaggcccaggctgagccactccaggcaagagctgatgaggttgctgcagccccggagcagattgcagcggacatcccagaagtggttgtttcccttgcatgggacgaaagcttggctccaaagcatccaggctcaaggaaaaacatggcctgctattgcagaataccagcgtgcattgcaggagaacgtcgctatggaacctgcatctaccagggaagactctgggcattctgctgctgagcttgcagaaaaagaaaaatgagctcaaaatttgctttgagagctacagggaattgctattactcctgtaccttctgctcaatttcctttcctcatcccaaataaatgccttgttacaagaaaaaaaaaaaaaaaaa

SEQ ID NO: 2243 - DNA, 4139 bp, Homo Sapiens
  NM_004090
gcgagcccccgcccagctgatccgccgctctccgcctcgcttgctcctgccgggcgtgcagggccccgccgccgccatgtcgggctcgttcgagctctcggtgcaggatctcaacgacctgctctcggacggcagcggctgctacagcctcccgagccagccctgcaacgaggtcaccccgcggatctacgtgggcaacgcgtctgtggctcaggacatccccaagctgcagaaactaggcatcacccatgtgctgaacgcggctgagggcaggtccttcatgcacgtcaacaccaatgccaacttctacaaggactccggcatcacatacctgggcatcaaggccaacgacacacaggagttcaacctcagcgcttactttgaaagggctgccgacttcattgaccaggctttggctcaaaagaatggccgggtgctcgtccactgccgggaaggttatagccgctccccaacgctagttatcgcctacctcatgatgcggcagaagatggacgtcaagtctgccctgagcatcgtgaggcagaaccgtgagatcggccccaacgatggcttcctggcccagctctgccagctcaatgacagactagccaaggaggggaagttgaaaccctagggcacccccaccacctctgctcgagaggtccgtgggggaggccgtgggcaaaggtgtcccgagctgccatgtttaggaaacacactgtaccctgctcccagcatcacaaggcacttgtctacaagtgtgtcccaacacagtcctgggccactttccccaccctggggagcacataaagaagcttgccaaggggggcgtccttgctccccagttgtcctgtttctgtaacttatgatgtcttttccctgagatgggggctcagagggggaaggcctgtggcctgcatgcttcccgatggcccacggcaggaggtgtgtggaagtgtaaggcctaagatgctcacagaggtccctcatgacctcccttccccaactcccgaatcctctcttgagtgtggacctcaacaccttgagccctagtaaaggaactatgcaaatgcaggccactctccccaccacgtctgtgccctgcactgtccccacagccttccacaccctgtgcataggcagccctctcacgtcttgaggtccgaagctggggtgggggtgtccgtcagttattagtggatggagattcccacagcaaggctgcatttgaatgatttccttaggatgaatggtccctacacaaagaggccttgtgggcaaacctggagaaccctcctaaatccatagagttttcaaaatgtgaatctttggaagccttgagttcagaatctgctgctctggaatatttcccttcgatcttatctcagtcacttcgtttttgagaagagtgatgccttgggcatgcttttttttttttcttttttagaaaacagggagttgaagtccaacctatttaaaaaccccaccatttggagaattacaagggttttgtcctgaattgtagtgttggcaagcccaagccactcgtgctaactgctttttgtctcggttgctattccaagaacagaaggaggaagttggccaattacagcgtgtgtgcatggatgtgtgtggggggcgtgcctctcagaaacgcggccagaagacaagcagggaagtgaaaggtcccaggcacacaccctgcccattgcaggtggctcttacagctctctggtgccagcacgggatccctgaagtgactcagccaggcagacatgagacatggcggagtgtccaaatggatcctttattggtggtagagcaaaaaaacccaaacacgataaacctttcaaaagactttctaaggatgatattggaatgcaccagccctcacatgtgtatgcacatttgccagaatataagagttttgttttaaatacagtcttgttaggattttacgttattgttattatggaaagtgattgtgatgctatttatcttcagggtcactctgggcaaagagaaggtcctcagccatgcccccagcaccttgcacataggtgtctgataaaagtttaagaaagtaaacactttttgagcaccaaatatatatagggcattgttctggtgggtgtgtcacgctcccagaagactgaattcatggtaggatcactcgcaaggccttgtgaaggagtcttacctaaaacgaaagaaatatcagggacttttgttgactatttacaactcagttttacatttaaattcaggcagtgttaatatgccaaggtagggaatgtgcctttttcagagttggccaggagctcctggctgggacacggagaggcaggtgtggcgtaaggcctcactcccggctgggaaggtctctgatcacacagaagcagccctgcccagcctggtcatttgctgtccgcttttctctgtgaccacagcagccctgaacaaccagtatgtgtcttcttctccagatagtgaaaaaggtgtccagataaacccacctaagtgaaatggccatcctctaaactgggtacctcactgcacagcttctaggtagccttccaacttaatctaacttgagcctcacagtaaccctgtaaagttagtagagcttgttcttgtattgtgaccttttttaaaaaaaaggaactgaggttcagaatgattaagggcctggcccccagggttgtccagctccataaggtggagctgggcaagattttgggtttgctgctccctgaagctggattctttcatacgatactctttctcaagaagggggctccctgggatctccaggtgtactgcacttaccctcaatccagccccggagaagcaagtgaaaagggtgggtccctcataggctagaatgtgcagctctttctccaggtgggatgtagcaccccgaagtagagctttctgctctgctcctggaaaaggctagggagctggggctggggctcccctcccatgaccaggcagtggtcaccccatgggacaggcacagctacttacgcgaacacagcaggttggtgtggctggctaactaggacctctcgaaagtctctgtgggggcatgagggagaaaaggccattgggagaattactgcctttactttgggactacttttatgctgataacttgggatttcttgatagtccttcacccctgaaaccccgtatttacttaacaagatttagctcttagttcttcaagtaaaattaaagtctcttgtgtaagagccaacacatgcccagctgcggatgggagctgttcctggacagccttctactgcctgggaagtgatggaacaggaactcagggtgcccttaccccctccccagacctgttccctttctttgactgacagagcaccatccaggcaaaattagagcgccaaatggttttcttctcaatcttaaagcagtatacctttccacaggctcgtctgtgtccctgccactctgagttatccagaaaccaccacctacaaatgaggggactcatctagaagacctctaaggtccccttttggctctgaggggtctctaataatccccacttggaattcagcaccgcaaggaaattatgggtatgtgagccataatatgatgggcagcaggtggcgctgccttccacccatggtgatggatggtttggaaagggaatgttggtgccttttgtgccacaagttaagatgctactgttttaaaggaaaaaaaaaaaaaaaagtactgatcttcaatatgaagacatgagcttttctcgcaggaaattttctttttcacagaactggtgtcaggaatcactgaagggctaaccgtgatagtccttgcaagtaagtcaaggttttatcctgattggaaatagaagacatttccggttgagagaacagattcgttggaagcttaacttttgttgcctcttaacgccaccaaattttagggtaatttgattatgaaagagtgaatttttctggacagaaaagggagagctaccaaattgtttttttctttttaaaaggaagtttaatgtccgttgtatcacaaatcagtgttaaaacaccagaactttagccaaaataaatgtcttacattacaaaggtaaaaaaaaaaaaaaaaaa

SEQ ID NO: 2244 - DNA, 5201 bp, Homo Sapiens
  NM_004091
aggactagagagcgagccgcaaggaagtcggtgcagtcgagacccccctccccatcccagcgcatcgcgtctccgccgagcttgagggcacgccggggacccctccccagagccggccggaccccaggtgccgaggccttggggagcgcggggcgtcccgggtcgcggtgccctcgggacgagacagcccctggcagtgccaccaccgcagccgccgggcgatctccaagcggcgatctctaagcgctgctctctgctcggccgcgggccaggaggggagggtccggccttgccccgcaggcgtccattggcggcttcccccggcctccgcgccatgccgcgggccgtgtgaaaggcggcagcaccggaacccgcaggtgtccgcgggcgcgccaagcccttttgggtagggggcgccttactcgctatgctgcaagggccccgggccttggcttcggccgctgggcagaccccgaaggtggtgcccgcgatgagccccacagagctgtggccatccggcctcagcagcccccagctctgcccagctactgctacctactacacaccgctgtacccgcagacggcgcctcccgcagcggcgccaggcacctgcctcgacgccactccccacggacccgagggccaagttgtgcgatgcctgccggcaggccggctgccggccaaaaggaagctggatctggaggggattgggaggcccgtcgtccctgagttcccaacccccaaggggaagtgcatcagagtggatggcctccccagccccaaaacccccaaatcccccggggagaagactcggtatgacacttcgctggggctgctcaccaagaagttcatttacctcctgagcgagtcagaggatggggtcctggacctgaactgggccgctgaggtgctggacgtgcagaagcggcgcatctatgacatcaccaacgtgctggaaggcatccagctcatccgcaagaaggccaagaacaacatccagtgggtaggcaggggaatgtttgaagaccccaccagacctgggaagcagcaacagctggggcaggagctgaaggagctgatgaacacggagcaggccttggaccagctcatccagagctgctctctgagcttcaagcacctgactgaggacaaggccaacaagaggctggcctatgtgacttaccaggatatccgtgctgttggcaactttaaggagcagacagtgattgccgtcaaggcccctccgcagacgagactggaagtgcccgacaggactgaggacaacctgcagatatatctcaagagcacccaagggcccatcgaagtctacctgtgcccagaggaggtgcaggagccggacagtccttccgaggagcctctcccctctacctccaccctctgccccagccctgactctgcccagcccagcagcagcaccgaccctagcatcatggagcccacagcatcctcagtgccagcaccagcgccaaccccccagcaggccccaccgcctccatccctggtccccttggaggctactgacagcctgctggagctgccgcacccactcctgcagcagactgaggaccagttcctgtccccgaccctggcgtgcagctcccctctgatcagcttctccccatccttggaccaggacgactacctgtggggcttggaggcgggtgagggcatcagcgatctcttcgactcctacgaccttggggacctgttgattaattgagtggccctgcctgcccccagcagcctgcccccgactctacctcctcacagacaggctgacagcccctctgcctgcacagggacattggacactaggtgctgccctcagggcatggggtctcctcgcctttcctgccccagccggcagaagctgtgtggggagatatgaatggtacgggtgaggagtggataaggggtggtcctcaccttcctaatggaagctgggcctagggaggcccatccagtcttctgacttctgacctctcacaagaaggctgcaggtgaggtggccaagtccagggaaaggccctgctacctccttttgaggggtaattaggaccctcgacgtaccaagaagcacataatgcctttgtatttatttcaggttgagttgtttgtttgtcctccctgagttttagcagggaggttgttctagtttttagtgagacctctgcagacaggcccatcactgtccatgttccagggcaggtctgggtttccaagggaggggcccaggctacatccttggtttccccactgtggtgggggctgggactctgaggggctgtccagtctgctagaatgctaattgcacttaggcctcatggttctagtaaacggcagctgtgggcccttttgcctcttcccctgttcttggcctcacatctccagctgagctgccggtcttggcttcctggtcgcctctgtcccagagatggtcccagggagccatcctagggcaggtagcactgaggctcctgtggaaacaggagccacctgctcaggagacccctttcctgaggaagtccttacctctccccttgagatgtaaaaatggtccagcagagacaagctcccgtggaaaacagacaggagcatgggggcagctgtcatggctgtggcgggcacttttcctcagagtttctgccttgcgctggtccaggagccattttgcaccaaggacttggtaggcagaggcagccccactgtaaagaagggtcagattaaaacaaaaaactgccaaaagcatcccctctgccccccatgtggcactggcatcattctctgcttccctgggaggaattttttcaccatgttattgaaggggatggttcattaaggactccacccctcagagctcactcagaccccaaggacagaggtgactggggcttggtgacttgttcactccttttttcccaggtatactgaaggggtgacagagagaggtcttcatggcagaccaggccttcacagctaatggggagaggaactcatgttacctctgcaggcctggggtcctgagggggtcttttggcttcagcctgttcccccagaggcttgatcatcccacattgtcccttcagctcagctgctcttctcccccacccaccctgggatgtgggtgctctgggctgaaccaaggctatgacttctggagagaggctcaggggttggtctgagaggcctgccatccacccctcagggagctaggttttctcagaggctcagctggacagcactttttagaaaagtttgtagcattaagctggtttaaaatatgaagttggttttgttggatggctcctgagctgactgactgatgtctgaagtttgagacgagggattatttcagggtggggcccaatgtgatctaatgcccagctggggacaattgtgcctcatcatttgctcaaattcctgggcccccaagttagccccctcccaggagtggtcagcgggtcacagctgcccccactctataagcagggctaattgtgtaccctttgcagaaatgcttttggtctcctacccaaatactcacaagggtcttatcagacgcccgtcttaaagtccagcatgctcagggaccctgtgtaggatctcgtttgtggtgagtgggctgctctgaggtctccactgggctgccatttagccatgtgccatctctgaagtcagaggtgtttgactcccattccttgggctctggagctttccccaagaattacatcagagaaaaggaagaaggggcctgcaggacccattgggaatgagtttaatactgaagtctggaatgtaagctcatgccctagaggcctctccatatggctggtcaggggagctgccttcaggcttgtgccccgtgtgctcagcagctgcctctgtccccctctactgtccctttcacaccttgcctggccaaggggctagacctcccaggctaagcctcagattcagtgcaggacacaagctcatgcccccgtcttgccagtgacacttgaagcctcccgacttccacagagtgcttcaggacacattttgagtggtattttcttttctttttttcttctttttttttttttttgagatggagtctcgctctgttgcccaggctggagtgcagtggcctgatctcggctcactgcaacctctgcctcccaggttcaagcgattcttctgcctcagcctccagagtagctgggactatagacatgcaccaccacgcccggctaattttgtatttttggtcgagacggggttttgccatgttagtcaggctggtcttgaactcctgacctcaagtgatccaccacctcggcctcccaaagtgttgagatgacaggcacgagccaccaggcccagcctgagtggtattttctttagggaccaggtagactttaaaacgagggtaagagaaaagccagtgtctttctgaggtaaataatttctgccaggaaacttcccagccccaccagcagcccccctaaaaaaatcactcgtgtccccagggacttctaaagcttggggctccaggaaatcatccagtagagttggagattcagagatttcttgaagccagggacatgctcctaactcctttcccattaaaggtgttagaatagaccagagggtgtcccttttccacagtaatgggatcggctggtgtgccttcagggaggaagagggaggtggtcaagcttgaaaaactggctttaggatggttctgactttgttctccctccccaagtgttctcaacctccattctgcagtgttcagagttttagggaaagggtttgggtgccccagcatccaggtgttgtgtggcttagcgcatgtgaagtgaaaaccttctggggttgtttggaagcagctttctggttcttgtgattgtatcctgaggtcccagaaccctattctcccacgaggatcctcagtgaccatggtggccacacgcctggccagcctgctggctcctgggtgagctgaagaaccttgcctgtggcacttttcgagggtgagctggaaccgagagaacatggtccccgtgctgggactcatgcgggtcatttcctgccggcctggtttcgcctggtcgtgtctttatgagcaccatgtaagcctccttgtattgagataattgggcattaaacattaaactgcagctctgggcaaaaaaaaa

SEQ ID NO: 2245 - DNA, 1350 bp, Homo Sapiens
  NM_004092
gcggagcgagccctgaaaggctataggcgagggggcggctccgcggggccgggcgaggagtccagagagccatggccgccctgcgtgtcctgctgtcctgcgtccgcggcccgctgaggcccccggttcgctgtcccgcctggcgtcccttcgcctcgggtgctaactttgagtacatcatcgcagaaaaaagagggaagaataacaccgtggggttgatccaactgaaccgccccaaggccctcaatgcactttgcgatggcctgattgacgagctcaaccaggccctgaagaccttcgaggaggacccggccgtgggggccattgtcctcaccggcggggataaggcctttgcagctggagctgatatcaaggaaatgcagaacctgagtttccaggactgttactccagcaagttcttgaagcactgggaccacctcacccaggtcaagaagccagtcatcgctgctgtcaatggctatgcctttggcgggggctgtgagcttgccatgatgtgtgatatcatctatgccggtgagaaggcccagtttgcacagccggagatcttaataggaaccatcccaggtgcgggcggcacccagagactcacccgtgctgttgggaagtcgctggcgatggagatggtcctcactggtgaccggatctcagcccaggacgccaagcaagcaggtcttgtcagcaagatttgtcctgttgagacactggtggaagaagccatccagtgtgcagaaaaaattgccagcaattctaaaattgtagtagcgatggccaaagaatcagtgaatgcagcttttgaaatgacattaacagaaggaagtaagttggagaagaaactcttttattcaacctttgccactgatgaccggaaagaagggatgaccgcgtttgtggaaaagagaaaggccaacttcaaagaccagtgagaaccagctgcccctgcttcacacctctgcttggagaggacaagtgcagcctgtcagttttagaagcaagtaaatcatcctcttttcaagagcagtgtccgtggtgtgcagttcctctccaattgctgcgtggtcgtggcccgacctctcacggcatgacagccttcgtcacccagcctgtgagggtcctgactggagcaccttctaaatctaagattctgctgaggagcccccgctggtccctctgggcatgctgtgctcggacggaaagcggggcctgcgggtccttgtgtccctgccgctgaagaatggggctgctctgagggaaacgctgtctgctgccttcatacagatgctgattaaagtgatagcgattcagattacaaaaaaaaaaaaaaaaaaaaaa

SEQ ID NO: 2246 - DNA, 4165 bp, Homo Sapiens
  NM_004094
ggaggttccgcatgcgcggtggagtgagcgaagcgcacgctgaggaggatcggcggccggtgagggggaagcaagtctggtctctgtgattgaagaagtcggctctgggctccagtgcgggaatcacacacatacctcagaatgccgggtctaagttgtagattttatcaacacaaatttcctgaggtggaagatgtagtgatggtgaatgtcagatccattgctgaaatgggggcttatgtcagcttgctggaatacaacaacattgaaggcatgattcttcttagtgaattatccagaaggcgtatccgttctatcaacaaactcatccgaattggcaggaatgagtgtgtggttgtcattagggtggacaaagaaaaaggatatattgatttgtcaaaaagaagagtttctccagaggaagcaatcaaatgtgaagacaaattcacaaaatccaaaactgtttatagcattcttcgtcatgttgctgaggtgttagaatacaccaaggatgagcagctggaaagcctattccagaggactgcctgggtctttgatgacaagtacaagagacctggatatggtgcctatgatgcatttaagcatgcagtctcagacccatctattttggatagtttagatttgaatgaagatgaacgggaagtactcattaataatattaataggcgcttgaccccacaggctgtcaaaattcgagcagatattgaagtggcttgttatggttatgaaggcattgatgctgtaaaagaagccctaagagcaggtttgaattgttctacagaaaacatgcccattaagattaatctaatagctcctcctcggtatgtaatgactacgacaaccctggagagaacagaaggcctttctgtcctcagtcaagctatggctgttatcaaagagaagattgaggaaaagaggggtgtgttcaatgttcaaatggagcccaaagtggtcacagatacagatgagactgaacttgcgaggcagatggagaggcttgaaagagaaaatgccgaagtggatggagatgatgatgcagaagaaatggaagccaaagctgaagattaactttgtgggaaacagagtccaatttaaggaacacagagcagcgcttcctggctgtaaatcctagacttgaaagttttccagtattgaaaacttcaaagctgaatattttttatttctaagtatttaaatgttctaacagatcagaacatgaaatgccctcctaaatgtcagctgttgtcacacagtagctccaacactttgagcatttttaagggagtggcctcatttcactagagacaaatctttaagaatagttctaaaattgggcttgtgatttccatttctgatgtctccagattggcacccctttctagttcaatgcctcacgagatttgccaggggcatccaaggcaaacaatcccaatctttctatataaaatgtattcaagcaaacatcaaataaatttctgggatatttaactataggcttcttccttcttgtcaccagttaaaagcattttaatactaagaccctaattcttttatctttattttagtcttgatgtggaactgtaggagcaggtgaataaaggatctctataacagatcctttcaaaagaagagttttagagaaaataaatttaactttaaccacagtgaaagttgacccttagcgggacaaagccttaaaatgcattgaaagaattagatcggttctgtgccttttatctatttgagattgatgacaacctgtgtgagagaatttatcacaccacgtccttattggaataataagctacttgccttgagtttataattcagggtggtaaagtatgtttttaaattttaaaaagcagctgcattttttatttagttggaatatcacccaattttttatttttattgctattaaaatatccactagatgccacctagagctccagttctttataacaaaacagggatctgtttgaacacttactgttgtttttttttttttacatgtttccatcatttctgtctttaagaactaattcgtacataataagtttcataggtaacacattatttgaagttacagctacagtagtcaggtgtagaaaatcttgagttgctttggtctgcttgtcttcataaatttattctcttatgatacttgaggtaccagttgtatttaattttattcattatccctagatagctattaagatacttagattagacctaacccaccatagtcaatccaagactagactactcaatattaaagggtctggaaaatagaagagtgtgttgggcaggtagtttgtaccatttatgaaggtttgttcctttgttaaatttagcagcctgtactagcttttgaaatccagaagttttaacttccagtggctggtttctgagagagtgccatgattgctagccagcattccatattgggaatatgtagaggagaacctggatgtacttaagagtggcatataattttcacttctgtctgttgaggcatcaaaaaaacaagtttagaaagctggcaacatgaagaatgcattcaaaatataacaggtgcttctttgttgtacgcagaggaattttttcttttgattttgtttactgaaatttgttatacttcaaaagccataacttgaaaaatactggtggcgtcgatggtgagtgatttttatcccacgtgggccttttgctcagttccatggcaattttgtaaattgaccctagccagagaatagatcagtatttcactgataccacgaggaaaagaacaaacaaaacttaaaagtattcatacaccttgctaacctaaaagacagcagggacaagatacatatgaggacaaggtatacacccagttctgaataacttgaagaacaggcttggcaaagaagtaagtttatccaaatcttgaatttctgccaggcatggtagctcatgcctgtaaccctggcacttaaggggccaaggcaggaggatcacttgaggccagtgagctgtgatcactccagtgcactcgagcctgggtgacagggcaagaccctgtctcaaaaaaaaaaaaaaaaaccaaaaatcttgaatctcccatcaaagccttttcattaaaaatacaatttcatctactccctactgtacctttcactgatgtcaagtggctatcaattcatatagctgaaaattagtgatagtttgggtctcatttatgcataaattaattgaaaatcagtaatggccaggaagaaatatgaatattcaaaccacttttttctttttttttttttttttttggcaaatggtgttatattgcctgggcaggtctcgaaatcctgggctcaagctatcctcctgcctctgcctctgtaagagtgtgagccaccatgccccacccaaaccatttttcatatcagttatagcaaaacaagacaaaccagttcttaataatgttcaaagttggacccatagagacatgctaagcactacatcatgctaagaagaacagttattactcagctgccatacttcagccattctacttttacaccaagaacaaaatggctagagatttttttaaaaatacaaatgccagtaccttgccgagacttgttcactgatttgccccaaccccaaggtaatggtcatctactttgcaacctatggagatcctgatagctcccatacaaagtgaggtacactgttgccaatttggaggcaggaagccatcaaactaaacgtagtttaattcagatgaacacctatcgatattcaaaaggcaaaacaaaaaaactaattccagggacattagaccttggtgaaatgccaaatggaaaatggtgctttaaaaggtagtctcttaccatataaggaataagtaaaacattagcttgtgatttctcattattcaggtcaatgttttagacacgactaacaagggacagttcaaactattaaagagaacaaatttttacttaagcactttgaggtatccactccccttaaatgtaagttatgtattttatctgttgattaaggggaggtccaagcatttgtacttggcaggaatgctggcaatagcttgtgccagattactgtataaacttgaaagtaataaaaatgttctttaaaagta

SEQ ID NO: 2247 - DNA, 877 bp, Homo Sapiens
  NM_004095
ggggcgaggcggagcgaggctggaggcgcgggagggcagcgagaggttcgcgggtgcagcgcacaggagaccatgtccgggggcagcagctgcagccagaccccaagccgggccatccccgccactcgccgggtggtgctcggcgacggcgtgcagctcccgcccggggactacagcacgacccccggcggcacgctcttcagcaccaccccgggaggtaccaggatcatctatgaccggaaattcctgatggagtgtcggaactcacctgtgaccaaaacacccccaagggatctgcccaccattccgggggtcaccagcccttccagtgatgagccccccatggaagccagccagagccacctgcgcaatagcccagaagataagcgggcgggcggtgaagagtcacagtttgagatggacatttaaagcaccagccatcgtgtggagcactaccaaggggcccctcagggccttcctgggaggagtcccaccagccaggccttatgaaagtgatcatactgggcaggcgttggcgtggggtcggacaccccagccctttctccctcactcagggcacctgccccctcctcttcgtgaacaccagcagatacctccttgtgcctccactgatgcaggagctgccaccccaaggggagtgacccctgccagcacaccctgcagccaagggccaggaagtggacaagaacgaacccttccttccgaatgatcagcagttccagcccctcgctgctgggggcgcaaccaccccttccttaggttgatgtgcttgggaaagctccctccccctccttccccaagagaggaaataaaagccaccttcgccctagggccaagaaaaaaaaaaaaaaaaaaa

SEQ ID NO: 2248 - DNA, 3108 bp, Homo Sapiens
  NM_004099
gcctctggctcctcagggcattcccggcggctccgggtttggcaacgaggacgggggagtgcgactgcgtctcgggcagcatggccgagaagcggcacacacgggactccgaagcccagcggctccccgactccttcaaggacagccccagtaagggccttggaccttgcggatggattttggtggcgttctcattcttattcaccgttataactttcccaatctcaatatggatgtgcataaagattataaaagagtatgaaagagccatcatctttagattgggtcgcattttacaaggaggagccaaaggacctggtttgttttttattctgccatgcactgacagcttcatcaaagtggacatgagaactatttcatttgatattcctcctcaggagatcctcacaaaggattcagtgacaattagcgtggatggtgtggtctattaccgcgttcagaatgcaaccctggctgtggcaaatatcaccaacgctgactcagcaacccgtcttttggcacaaactactctgaggaatgttctgggcaccaagaatctttctcagatcctctctgacagagaagaaattgcacacaacatgcagtctactctggatgatgccactgatgcctggggaataaaggtggagcgtgtggaaattaaggatgtgaaactacctgtgcagctccagagagctatggctgcagaagcagaagcgtcccgcgaggcccgcgccaaggttattgcagccgaaggagaaatgaatgcatccagggctctgaaagaagcctccatggtcatcactgaatctcctgcagcccttcagctccgatacctgcagacactgaccaccattgctgctgagaaaaactcaacaattgtcttccctctgcccatagatatgctgcaaggaatcataggggcaaaacacagccatctaggctagtgtagagatgagcgctagccttccaagcatgaagtcggggaccaaattagcctttaactcataaagagagggtagggcttttctttttccatatgtcaattgtggtgttcccagaatgtatagcagttataaaaataggtgaaagaattgttagcttgtaaatactgagagattggtgatttatataaggtaatctgttagtcttaaaatagttaaaagtttgtatttttagattattatgtagtaggttagatccctcttgttttgacttccactgactcattctgaaccccctaagcacccaggccagaggcaagaacctgggctgtaactgccacctgacaccgctgactggctaaatgctttgcagaaagtgatgaccttacaccacaaccagcttctccaggtcatatgtgccttacctccagagagtctttttttttttttttctgagatggagtttcactcttgttgcccaggctggagtgcaatagcatgatctcggctcactgcaacctccgcctcctgggttcaagagattctcctgcctcagcctccccagtagctgggattacaggctcatgccaccatgcccagctaatttttgtattattattattgttttttagtagagacggggtttcaccatgttggccaggctagtcacgaactcctaacctcaggtgatccacccacctctgcctcccaaagtgctgggattacaggcatgagctaccacacctggtttggagagtcttaattaaggaaatttccctaatgttcatttattttctaaatccagaccgtgtttcagaataatccttacttgagagtagccattttcttgcctgtacttgtcagaactagaggaaatagccaagactaatgaaaaagattactctaacccttaaaagacttttaaattcactactagagtggtcattttaaaaatacatccatgttttaacttatttgagccttctttatgagtaaatgattcctccttgttctgtctttcaaaccagctaaatatttgtcacaaaagtgcttttttctcactgttgcctattttcatatatcaggttttaaatagttttaattttttaataaaattttctctacgttctatatgcaattgttatatatctatttgaatagctgaaggactaaaatacttttttaagagataacttcaggaaaccattatattttactatctgcatgctgttaactgtggtacactgtgaaatatgttgattacaaacccattcattacatagtataaggaattcacagtatattgactatatagtgtctaatgatcttgggcagatactgtcaaacttacaatatctatatagatgtaggtctttttaaatttacctagtcattcttctatcatgtatattgatgctgaaagaggaactggtcagctcctctggacaacaaattcttagtctataatattaggagacatcttctgttttgcaaatgtctgtgaatctgagcaacctggcattctgcttactggccagaaagctggcgggtgacatttgtaacatttcctctttgagactctgagttcacctagagaagtctaagcataacagctttctttcccagcacgagcctttatagctctctttagctcaaccactctgtccatccagccaatggatgtcccttcccctgtaccccaatttcaagcttattttaggaagccttgaactaccatgtatcctggctcctagctgagtttattagaggtatggagcagtgcaacttaaactcaagttgcacttacattttgaattttaaaatgatggttttatctgttgtgtgaagtggttcacccttgaggaccaggagcctccatatcctgactgaaaaccttttctgagacttagagtaacagtgcttttggttccttgagttctcctgtctccagataccaaatgaccttgacttttctgccttgtgaattcgtagtccaatcagctgaaattaaatcacttgggagggacgcatagaaggagctctaggaacacagtgccagtgcagaagtttctccaggtggcctccctttccaacaatgtacataataaagtgtatgcactttcactaataaaaaaaaaaaaaaaaaaaaaaaaaaaaaaaaaaa

SEQ ID NO: 2249 - DNA, 8481 bp, Homo Sapiens
  NM_004104
gagagacggcagcggccccggcctccctctccgccgcgcttcagcctcccgctccgccgcgctccagcctcgctctccgccgcccgcaccgccgcccgcgccctcaccagagcagccatggaggaggtggtgattgccggcatgtccgggaagctgccagagtcggagaacttgcaggagttctgggacaacctcatcggcggtgtggacatggtcacggacgatgaccgtcgctggaaggcggggctctacggcctgccccggcggtccggcaagctgaaggacctgtctaggtttgatgcctccttcttcggagtccaccccaagcaggcacacacgatggaccctcagctgcggctgctgctggaagtcacctatgaagccatcgtggacggaggcatcaacccagattcactccgaggaacacacactggcgtctgggtgggcgtgagcggctctgagacctcggaggccctgagccgagaccccgagacactcgtgggctacagcatggtgggctgccagcgagcgatgatggccaaccggctctccttcttcttcgacttcagagggcccagcatcgcactggacacagcctgctcctccagcctgatggccctgcagaacgcctaccaggccatccacagcgggcagtgccctgccgccatcgtggggggcatcaatgtcctgctgaagcccaacacctccgtgcagttcttgaggctggggatgctcagccccgagggcacctgcaaggccttcgacacagcggggaatgggtactgccgctcggagggtgtggtggccgtcctgctgaccaagaagtccctggcccggcgggtgtacgccaccatcctgaacgccggcaccaatacagatggcttcaaggagcaaggcgtgaccttcccctcaggggatatccaggagcagctcatccgctcgttgtaccagtcggccggagtggcccctgagtcatttgaatacatcgaagcccacggcacaggcaccaaggtgggcgacccccaggagctgaatggcatcacccgagccctgtgcgccacccgccaggagccgctgctcatcggctccaccaagtccaacatggggcacccggagccagcctcggggctggcagccctggccaaggtgctgctgtccctggagcacgggctctgggcccccaacctgcacttccatagccccaaccctgagatcccagcgctgttggatgggcggctgcaggtggtggaccagcccctgcccgtccgtggcggcaacgtgggcatcaactcctttggcttcgggggctccaacgtgcacatcatcctgaggcccaacacgcagccgccccccgcacccgccccacatgccaccctgccccgtctgctgcgggccagcggacgcacccctgaggccgtgcagaagctgctggagcagggcctccggcacagccaggacctggctttcctgagcatgctgaacgacatcgcggctgtccccgccaccgccatgcccttccgtggctacgctgtgctgggtggtgagcgcggtggcccagaggtgcagcaggtgcccgctggcgagcgcccgctctggttcatctgctctgggatgggcacacagtggcgcgggatggggctgagcctcatgcgcctggaccgcttccgagattccatcctacgctccgatgaggctgtgaagccattcggcctgaaggtgtcacagctgctgctgagcacagacgagagcacctttgatgacatcgtccattcgtttgtgagcctgactgccatccagataggcctcatagacctgctgagctgcatggggctgaggccagatggcatcgtcggccactccctgggggaggtggcctgtggctacgccgacggctgcctgtcccaggaggaggccgtcctcgctgcctactggaggggacagtgcatcaaagaagcccatctcccgccgggcgccatggcagccgtgggcttgtcctgggaggagtgtaaacagcgctgccccccgggcgtggtgcccgcctgccacaactccaaggacacagtcaccatctcgggacctcaggccccggtgtttgagttcgtggagcagctgaggaaggagggtgtgtttgccaaggaggtgcggaccggcggtatggccttccactcctacttcatggaggccatcgcacccccactgctgcaggagctcaagaaggtgatccgggagccgaagccacgttcagcccgctggctcagcacctctatccccgaggcccagtggcacagcagcctggcacgcacgtcctccgccgagtacaatgtcaacaacctggtgagccctgtgctgttccaggaggccctgtggcacgtgcctgagcacgcggtggtgctggagatcgcgccccacgccctgctgcaggctgtcctgaagcgtggcctgaagccgagctgcaccatcatccccctgatgaagaaggatcacagggacaacctggagttcttcctggccggcatcggcaggctgcacctctcaggcatcgacgccaaccccaatgccttgttcccacctgtggagttcccagctccccgaggaactcccctcatctccccactcatcaagtgggaccacagcctggcctgggacgtgccggccgccgaggacttccccaacggttcaggttccccctcagccgccatctacaacatcgacaccagctccgagtctcctgaccactacctggtggaccacaccctcgacggtcgcgtcctcttccccgccactggctacctgagcatagtgtggaagacgctggcccgcgccctgggcctgggcgtcgagcagctgcctgtggtgtttgaggatgtggtgctgcaccaggccaccatcctgcccaagactgggacagtgtccctggaggtacggctcctggaggcctcccgtgccttcgaggtgtcagagaacggcaacctggtagtgagtgggaaggtgtaccagtgggatgaccctgaccccaggctcttcgaccacccggaaagccccacccccaaccccacggagcccctcttcctggcccaggctgaagtttacaaggagctgcgtctgcgtggctacgactacggccctcatttccagggcatcctggaggccagcctggaaggtgactcggggaggctgctgtggaaggataactgggtgagcttcatggacaccatgctgcagatgtccatcctgggctcggccaagcacggcctgtacctgcccacccgtgtcaccgccatccacatcgaccctgccacccacaggcagaagctgtacacactgcaggacaaggcccaagtggctgacgtggtggtgagcaggtggctgagggtcacagtggccggaggcgtccacatctccgggctccacactgagtcggccccgcggcggcagcaggagcagcaggtgcccatcctggagaagttttgcttcactccccacacggaggaggggtgcctgtctgagcgcgctgccctgcaggaggagctgcaactgtgcaaggggctggtgcaggcactgcagaccaaggtgacccagcaggggctgaagatggtggtgcccggactggatggggcccagatcccccgggacccctcacagcaggaactgccccggctgttgtcggctgcctgcaggcttcagctcaacgggaacctgcagctggagctggcgcaggtgctggcccaggagaggcccaagctgccagaggaccctctgctcagcggcctcctggactccccggcactcaaggcctgcctggacactgccgtggagaacatgcccagcctgaagatgaaggtggtggaggtgctggctggccacggtcacctgtattcccgcatcccaggcctgctcagcccccatcccctgctgcagctgagctacacggccaccgaccgccacccccaggccctggaggctgcccaggccgagctgcagcagcacgacgttgcccagggccagtgggatcccgcagaccctgcccccagcgccctgggcagcgccgacctcctggtgtgcaactgtgctgtggctgccctcggggacccggcctcagctctcagcaacatggtggctgccctgagagaagggggctttctgctcctgcacacactgctccgggggcaccccctcggggacatcgtggccttcctcacctccactgagccgcagtatggccagggcatcctgagccaggacgcgtgggagagcctcttctccagggtgtcgctgcgcctggtgggcctgaagaagtccttctacggctccacgctcttcctgtgccgccggcccaccccgcaggacagccccatcttcctgccggtggacgataccagcttccgctgggtggagtctctgaagggcatcctggctgacgaagactcttcccggcctgtgtggctgaaggccatcaactgtgccacctcgggcgtggtgggcttggtgaactgtctccgccgagagcccggcgggaaccgcctccggtgtgtgctgctctccaacctcagcagcacctcccacgtcccggaggtggacccgggctccgcagaactgcagaaggtgttgcagggagacctggtgatgaacgtctaccgcgacggggcctggggggctttccgccacttcctgctggaggaggacaagcctgaggagccgacggcacatgcctttgtgagcaccctcacccggggggacctgtcctccatccgctgggtctgctcctcgctgcgccatgcccagcccacctgccctggcgcccagctctgcacggtctactacgcctccctcaacttccgcgacatcatgctggccactggcaagctgtcccctgatgccatcccagggaagtggacctcccaggacagcctgctaggtatggagttctcgggccgagacgccagcggcaagcgtgtgatgggactggtgcctgccaagggcctggccacctctgtcctgctgtcaccggacttcctctgggatgtgccttccaactggacgctggaggaggcggcctcggtgcctgtcgtctacagcacggcctactacgcgctggtggtgcgtgggcgggtgcgccccggggagacgctgctcatccactcgggctcgggcggcgtgggccaggccgccatcgccatcgccctcagtctgggctgccgcgtcttcaccaccgtggggtcggctgagaagcgggcgtacctccaggccaggttcccccagctcgacagcaccagcttcgccaactcccgggacacatccttcgagcagcatgtgctgtggcacacgggcgggaagggcgttgacctggtcttgaactccttggcggaagagaagctgcaggccagcgtgaggtgcttggctacgcacggtcgcttcctggaaattggcaaattcgacctttctcagaaccacccgctcggcatggctatcttcctgaagaacgtgacattccacggggtcctactggatgcgttcttcaacgagagcagtgctgactggcgggaggtgtgggcgcttgtgcaggccggcatccgggatggggtggtacggcccctcaagtgcacggtgttccatggggcccaggtggaggacgccttccgctacatggcccaagggaagcacattggcaaagtcgtcgtgcaggtgcttgcggaggagccggaggcagtgctgaagggggccaaacccaagctgatgtcggccatctccaagaccttctgcccggcccacaagagctacatcatcgctggtggtctgggtggcttcggcctggagttggcgcagtggctgatacagcgtggggtgcagaagctcgtgttgacttctcgctccgggatccggacaggctaccaggccaagcaggtccgccggtggaggcgccagggcgtacaggtgcaggtgtccaccagcaacatcagctcactggagggggcccggggcctcattgccgaggcggcgcagcttgggcccgtgggcggcgtcttcaacctggccgtggtcttgagagatggcttgctggagaaccagaccccagagttcttccaggacgtctgcaagcccaagtacagcggcaccctgaacctggacagggtgacccgagaggcgtgccctgagctggactactttgtggtcttctcctctgtgagctgcgggcgtggcaatgcgggacagagcaactacggctttgccaattccgccatggagcgtatctgtgagaaacgccggcacgaaggcctcccaggcctggccgtgcagtggggcgccatcggcgacgtgggcattttggtggagacgatgagcaccaacgacacgatcgtcagtggcacgctgccccagcgcatggcgtcctgcctggaggtgctggacctcttcctgaaccagccccacatggtcctgagcagctttgtgctggctgagaaggctgcggcctatagggacagggacagccagcgggacctggtggaggccgtggcacacatcctgggcatccgcgacttggctgctgtcaacctggacagctcactggcggacctgggcctggactcgctcatgagcgtggaggtgcgccagacgctggagcgtgagctcaacctggtgctgtccgtgcgcgaggtgcggcaactcacgctccggaaactgcaggagctgtcctcaaaggcggatgaggccagcgagctggcatgccccacgcccaaggaggatggtctggcccagcagcagactcagctgaacctgcgctccctgctggtgaacccggagggccccaccctgatgcggctcaactccgtgcagagctcggagcggcccctgttcctggtgcacccaatcgagggctccaccaccgtgttccacagcctggcctcccggctcagcatccccacctatggcctgcagtgcacccgagctgcgccccttgacagcatccacagcctggctgcctactacatcgactgcatcaggcaggtgcagcccgagggcccctaccgcgtggccggctactcctacggggcctgcgtggcctttgaaatgtgctcccagctgcaggcccagcagagcccagcccccacccacaacagcctcttcctgttcgacggctcgcccacctacgtactggcctacacccagagctaccgggcaaagctgaccccaggctgtgaggctgaggctgagacggaggccatatgcttcttcgtgcagcagttcacggacatggagcacaacagggtgctggaggcgctgctgccgctgaagggcctagaggagcgtgtggcagccgccgtggacctgatcatcaagagccaccagggcctggaccgccaggagctgagctttgcggcccggtccttctactacaagctgcgtgccgctgagcagtacacacccaaggccaagtaccatggcaacgtgatgctactgcgcgccaagacgggtggcgcctacggcgaggacctgggcgcggactacaacctctcccaggtatgcgacgggaaagtatccgtccacgtcatcgagggtgaccaccgcacgctgctggagggcagcggcctggagtccatcatcagcatcatccacagctccctggctgagccacgcgtgagcgtgcgggagggctaggcccgtgcccccgcctgccaccggaggtcactccaccatccccaccccaccccaccccacccccgccatgcaacgggattgaagggtcctgccggtgggaccctgtccggcccagtgccactgccccccgaggctgctagatgtaggtgttaggcatgtcccacccacccgccgcctcccacggcacctcggggacaccagagctgccgacttggagactcctggtctgtgaagagccggtggtgcccgtgcccgcaggaactgggctgggcctcgtgcgcccgtggggtctgcgcttggtctttctgtgcttggatttgcatatttattgcattgctggtagagacccccaggcctgtccaccctgccaagactcctcaggcagcgtgtgggtcccgcactctgcccccatttccccgatgtcccctgcgggcgcgggcagccacccaagcctgctggctgcggccccctctcggccaggcattggctcagcccgctgagtggggggtcgtgggccagtccccgaggagctgggcccctgcacaggcacacagggcccggccacacccagcggccccccgcacagccacccgtggggtgctgcccttatgcccggcgccgggcaccaactccatgtttggtgtttgtctgtgtttgtttttcaagaaatgattcaaattgctgcttggattttgaaatttactgtaactgtcagtgtacacgtctggaccccgtttcatttttacaccaatttggtaaaaatgctgctctcagcctcccacaattaaaccgcatgtgatctccaaaaaaaaaaaaaaaaaaaaaaaa

SEQ ID NO: 2250 - DNA, 591 bp, Homo Sapiens
  NM_004106
cagaacggccgatctccagcccaagatgattccagcagtggtcttgctcttactccttttggttgaacaagcagcggccctgggagagcctcagctctgctatatcctggatgccatcctgtttctgtatggaattgtcctcaccctcctctactgtcgactgaagatccaagtgcgaaaggcagctataaccagctatgagaaatcagatggtgtttacacgggcctgagcaccaggaaccaggagacttacgagactctgaagcatgagaaaccaccacagtagctttagaatagatgcggtcatattcttctttggcttctggttcttccagccctcatggttggcatcacatatgcctgcatgccattaacaccagctggccctacccctataatgatcctgtgtcctaaattaatatacaccagtggttcctcctccctgttaaagactaatgctcagatgctgtttacggatatttatattctagtctcactctcttgtcccacccttcttctcttccccattcccaactccagctaaaatatgggaagggagaacccccaataaaactgccatggactggactc

SEQ ID NO: 2251 - DNA, 1629 bp, Homo Sapiens
  NM_004107
agcctatcaagtgtctgtaattaattaaccaactgagatccagttcaggggtgaaagttcttcaggtacgaggagggcattgttgtcagtctggaccgagcccgcagagcccctcctcggcgtcctggtcccggccgtgcccgcggtgtcccgggaggaaggggcgggccgggggtcgggaggagtcacgtgccccctcccgccccaggtcgtcctctcagcatgggggtcccgcggcctcagccctgggcgctggggctcctgctctttctccttcctgggagcctgggcgcagaaagccacctctccctcctgtaccaccttaccgcggtgtcctcgcctgccccggggactcctgccttctgggtgtccggctggctgggcccgcagcagtacctgagctacaatagcctgcggggcgaggcggagccctgtggagcttgggtctgggaaaaccaggtgtcctggtattgggagaaagagaccacagatctgaggatcaaggagaagctctttctggaagctttcaaagctttggggggaaaaggtccctacactctgcagggcctgctgggctgtgaactgggccctgacaacacctcggtgcccaccgccaagttcgccctgaacggcgaggagttcatgaatttcgacctcaagcagggcacctggggtggggactggcccgaggccctggctatcagtcagcggtggcagcagcaggacaaggcggccaacaaggagctcaccttcctgctattctcctgcccgcaccgcctgcgggagcacctggagaggggccgcggaaacctggagtggaaggagcccccctccatgcgcctgaaggcccgacccagcagccctggcttttccgtgcttacctgcagcgccttctccttctaccctccggagctgcaacttcggttcctgcggaatgggctggccgctggcaccggccagggtgacttcggccccaacagtgacggatccttccacgcctcgtcgtcactaacagtcaaaagtggcgatgagcaccactactgctgcattgtgcagcacgcggggctggcgcagcccctcagggtggagctggaatctccagccaagtcctccgtgctcgtggtgggaatcgtcatcggtgtcttgctactcacggcagcggctgtaggaggagctctgttgtggagaaggatgaggagtgggctgccagccccttggatctcccttcgtggagacgacaccggggtcctcctgcccaccccaggggaggcccaggatgctgatttgaaggatgtaaatgtgattccagccaccgcctgaccatccgccattccgactgctaaaagcgaatgtagtcaggcccctttcatgctgtgagacctcctggaacactggcatctctgagcctccagaaggggttctgggcctagttgtcctccctctggagccccgtcctgtggtctgcctcagtttcccctcctaatacatatggctgttttccacctcgataatataacacgagtttgggcccgaatcagtgtgttctcatcatttttcaggcaggggaggtaagggaataagtcgggggactgaatggcggctgggcctcggatctctcctacaggtaac

SEQ ID NO: 2252 - DNA, 2705 bp, Homo Sapiens
  NM_004114
gtgccgcgcccagagcagcagcaacagcgaagatgcgaggccattacctgtttgatccctgtcggaaacctggcacgggccaacttttcccgattatcacgccaagaagttgcaaggactagtcgaagactcggaggggccagggcgagggcgcgctcccccgcgcgctgcctcgtccctcctccgtccggccgcccgagctcccggcctctctcccgcccgcgctcactccctccgcccgcctccctcctctggcccccatcagaagggcaacagggcgagggggtccggcgaaattcggaccggagcagctggacatgcacggtgtccgccgggcgcaggggccgaccacacgcagtcgcgcagttcagcatccgcgtgccagtctcgcccgcgatcccgggcccggggctgtggcgtcgactccgacccaggcagccagcagcccgcgcgggagccggaccgccgccggaggagctcggacggcatgctgagccccctccttggctgaagcccgagtgcggagaagcccgggcaaacgcaggctaaggagaccaaagcggcgaagtcgcgagacagcggacaagcagcggaggagaaggaggaggaggcgaacccagagaggggcagcaaaagaagcggtggtggtgggcgtcgtggccatggcggcggctatcgccagctcgctcatccgtcagaagaggcaagcccgcgagcgcgagaaatccaacgcctgcaagtgtgtcagcagccccagcaaaggcaagaccagctgcgacaaaaacaagttaaatgtcttttcccgggtcaaactcttcggctccaagaagaggcgcagaagaagaccagagcctcagcttaagggtatagttaccaagctatacagccgacaaggctaccacttgcagctgcaggcggatggaaccattgatggcaccaaagatgaggacagcacttacactctgtttaacctcatccctgtgggtctgcgagtggtggctatccaaggagttcaaaccaagctgtacttggcaatgaacagtgagggatacttgtacacctcggaacttttcacacctgagtgcaaattcaaagaatcagtgtttgaaaattattatgtgacatattcatcaatgatataccgtcagcagcagtcaggccgagggtggtatctgggtctgaacaaagaaggagagatcatgaaaggcaaccatgtgaagaagaacaagcctgcagctcattttctgcctaaaccactgaaagtggccatgtacaaggagccatcactgcacgatctcacggagttctcccgatctggaagcgggaccccaaccaagagcagaagtgtctctggcgtgctgaacggaggcaaatccatgagccacaatgaatcaacgtagccagtgagggcaaaagaagggctctgtaacagaaccttacctccaggtgctgttgaattcttctagcagtccttcacccaaaagttcaaatttgtcagtgacatttaccaaacaaacaggcagagttcactattctatctgccattagaccttcttatcatccatactaaagccccattatttagattgagcttgtgcataagaatgccaagcattttagtgaactaaatctgagagaaggactgccaaattttctcatgatctcacctatactttggggatgataatccaaaagtatttcacagcactaatgctgatcaaaatttgctctcccaccaagaaaatgtaaaagaccacaattgttcttcaaaaacaaacaaaacaaaacaaaacaaaattaactgcttaaatgttttgtcggggcaaacaaaattatgtgaattgtgttgttttcttggcttgatgttttctatctacgcttgattcacatgtactcttttctttggcatagtgcaactttatgatttctgaaattcaatggttctattgactttttgcgtcacttaatccaaatcaaccaaattcagggttgaatctgaattggcttctcaggctcaaggtaacagtgttcttgtggtttgaccaattgtttttctttctttttttttttttttagatttgtggtattctggtcaagttattgtgctgtactttgtgcgtagaaattgagttgtattgtcaaccccagtcagtaaagagaacttcaaaaaattatcctcaagtgtagatttctcttaattccatttgtgtatcatgttaaactattgttgtggcttcttgtgtaaagacaggaactgtggaactgtgatgttgtcttttgtgttgttaaaataagaaatgtcttatctgtatatgtatgagtcttcctgtcattgtatttggcacatgaatattgtgtacaaggaattgttaagactggttttccctcaacaacatatattatacttgctactggaaaagtgtttaagacttagctaggtttccatttagatcttcatatctgttgcatggaagaaagttgggttcttggcatagagttgcatgatatgtaagattttgtgcattcataattgttaaaaatctgtgttccaaaagtggacatagcatgtacaggcagttttctgtcctgtgcacaaaaagtttaaaaaagttgtttaatatttgttgttgtatacccaaatacgcaccgaataaactctttatattcattcaaagaaaaaaaaaaaaaaaaaaaaaaaaaaaaaa

SEQ ID NO: 2253 - DNA, 3793 bp, Homo Sapiens
  NM_004117
gattcgggccggctcgcgggcgctgccagtctcgggcggcggtgtccggcgcgcgggcggcctgctgggcgggctgaagggttagcggagcacgggcaaggcggagagtgacggagtcggcgagcccccgcggcgacaggttctctacttaaaagacaatgactactgatgaaggtgccaagaacaatgaagaaagccccacagccactgttgctgagcagggagaggatattacctccaaaaaagacaggggagtattaaagattgtcaaaagagtggggaatggtgaggaaacgccgatgattggagacaaagtttatgtccattacaaaggaaaattgtcaaatggaaagaagtttgattccagtcatgatagaaatgaaccatttgtctttagtcttggcaaaggccaagtcatcaaggcatgggacattggggtggctaccatgaagaaaggagagatatgccatttactgtgcaaaccagaatatgcatatggctcggctggcagtctccctaaaattccctcgaatgcaactctcttttttgagattgagctccttgatttcaaaggagaggatttatttgaagatggaggcattatccggagaaccaaacggaaaggagagggatattcaaatccaaacgaaggagcaacagtagaaatccacctggaaggccgctgtggtggaaggatgtttgactgcagagatgtggcattcactgtgggcgaaggagaagaccacgacattccaattggaattgacaaagctctggagaaaatgcagcgggaagaacaatgtattttatatcttggaccaagatatggttttggagaggcagggaagcctaaatttggcattgaacctaatgctgagcttatatatgaagttacacttaagagcttcgaaaaggccaaagaatcctgggagatggataccaaagaaaaattggagcaggctgccattgtcaaagagaagggaaccgtatacttcaagggaggcaaatacatgcaggcggtgattcagtatgggaagatagtgtcctggttagagatggaatatggtttatcagaaaaggaatcgaaagcttctgaatcatttctccttgctgcctttctgaacctggccatgtgctacctgaagcttagagaatacaccaaagctgttgaatgctgtgacaaggcccttggactggacagtgccaatgagaaaggcttgtataggaggggtgaagcccagctgctcatgaacgagtttgagtcagccaagggtgactttgagaaagtgctggaagtaaacccccagaataaggctgcaagactgcagatctccatgtgccagaaaaaggccaaggagcacaacgagcgggaccgcaggatatacgccaacatgttcaagaagtttgcagagcaggatgccaaggaagaggccaataaagcaatgggcaagaagacttcagaaggggtcactaatgaaaaaggaacagacagtcaagcaatggaagaagagaaacctgagggccacgtatgacgccacgccaaggagggaagagtcccagtgaactcggcccctcctcaatgggctttcccccaactcaggacagaacagtgtttaatgtaaagtttgttatagtctatgtgattctggaagcaaatggcaaaaccagtagcttcccaaaaacagcccccctgctgctgcccggagggttcactgaggggtggcacgggaccactccaggtggaacaaacagaaatgactgtggtgtggagggagtgagccagcagcttaagtccagctcatttcagtttctatcaaccttcaagtatccaattcagggtccctggagatcatcctaacaatgtggggctgttaggttttacctttgaactttcatagcactgcagaaacctttaaaaaaaaaatgcttcatgaatttctcctttcctacagttgggtagggtaggggaaggaggataagcttttgttttttaaatgactgaagtgctataaatgtagtctgttgcatttttaaccaacagaacccacagtagaggggtctcatgtctccccagttccacagcagtgtcacagacgtgaaagccagaacctcagaggccacttgcttgctgacttagcctcctcccaaagtccccctcctcagccagcctccttgtgagagtggctttctaccacacacagcctgtccctgggggagtaattctgtcattcctaaaacacccttcagcaatgataatgagcagatgagagtttctggattagcttttcctattttcgatgaagttctgagatactgaaatgtgaaaagagcaatcagaattgtgctttttctcccctcctctattccttttagggaataatattcaatacacagtacttcctcccagcattgctactgctcagcttcttctttcattctaatccttgctattaagaatttaagacttgtgcttacaatatttttgacctggagtggatctatttacatagtcatttaggatccatgcagctttttttgtctttttaagattattggctcataagcatatgtatactggtttatggaactttatttacactcctctatcatgcaaaaaaattttgactttttagtactaagcttaatttttaaaaacaaaatctgtagggttgacaaataaatagttgctcttctacactaggggtttcacctgcaggtttgacacgcagttgctcgcttttcctgccctgtcaagcttctctgttctggcgtgagttgtgaaagagttgaagacagcttcccatgccggtacacagccagtagcctaaatctccagtacttgagctgaccattgaactagggcaagtcttaaatgtgtacatgtagttgaatttcagtccttacgggtaaacagattgagcatggctctctattccctcagcctaagaaacactcatgggaatgcatttggcaacccaaggaaccatttgcttaaacctggaacatctcacctttttaaatcctaaaaaacactggcagttatattttaaattagtttttatttttatgatggttttatcaaaagacttttattattagattgggacccccttcaaacctaaaaatcaagttatttccttttataatacttttcttccccatggaacaaatgggatcaatttgtgagttttttcctttaatgataactaaaatccctctaatttctcatttatgcttttgtcttttttatgaaatatttcttttaaaagccccagtctcacctacgaaatatgaagagcaaaagctgattttgcttacttgctaaactgttgggaaagctctgtagagcatggttccagtgaggccaagattgaaatttgatactaaaaaggccacctagctttttgcagataacaaacaagaaagctattccaagactcagatgatgccagctgtctcccacgtgtgtattatggttcaccagggggaactggcaaaagtgtgtgtggggaggggaagggtgtgtgagtggttctgagcaaataactacagggtgcccattaccactcaagaagacacttcacgtattcttgtatcaaattcaataatcttaaacaatttgtgtagaagtccacagacatctttcaaccaccttttaggctgcatatggattgccaagtcagcatatgaggaattaaagacattgtttttaaaaaaaaaaaatcatttagatgcacttttttgtgtgttctttaaataaatccaaaaaaaatgtgacttccaaaaaaaaaaa

SEQ ID NO: 2254 - DNA, 3848 bp, Homo Sapiens
  NM_004119
acctgcagcgcgaggcgcgccgctccaggcggcatcgcagggctgggccggcgcggcctggggaccccgggctccggaggccatgccggcgttggcgcgcgacggcggccagctgccgctgctcgttgttttttctgcaatgatatttgggactattacaaatcaagatctgcctgtgatcaagtgtgttttaatcaatcataagaacaatgattcatcagtggggaagtcatcatcatatcccatggtatcagaatccccggaagacctcgggtgtgcgttgagaccccagagctcagggacagtgtacgaagctgccgctgtggaagtggatgtatctgcttccatcacactgcaagtgctggtcgacgccccagggaacatttcctgtctctgggtctttaagcacagctccctgaattgccagccacattttgatttacaaaacagaggagttgtttccatggtcattttgaaaatgacagaaacccaagctggagaatacctactttttattcagagtgaagctaccaattacacaatattgtttacagtgagtataagaaataccctgctttacacattaagaagaccttactttagaaaaatggaaaaccaggacgccctggtctgcatatctgagagcgttccagagccgatcgtggaatgggtgctttgcgattcacagggggaaagctgtaaagaagaaagtccagctgttgttaaaaaggaggaaaaagtgcttcatgaattatttgggacggacataaggtgctgtgccagaaatgaactgggcagggaatgcaccaggctgttcacaatagatctaaatcaaactcctcagaccacattgccacaattatttcttaaagtaggggaacccttatggataaggtgcaaagctgttcatgtgaaccatggattcgggctcacctgggaattagaaaacaaagcactcgaggagggcaactactttgagatgagtacctattcaacaaacagaactatgatacggattctgtttgcttttgtatcatcagtggcaagaaacgacaccggatactacacttgttcctcttcaaagcatcccagtcaatcagctttggttaccatcgtagaaaagggatttataaatgctaccaattcaagtgaagattatgaaattgaccaatatgaagagttttgtttttctgtcaggtttaaagcctacccacaaatcagatgtacgtggaccttctctcgaaaatcatttccttgtgagcaaaagggtcttgataacggatacagcatatccaagttttgcaatcataagcaccagccaggagaatatatattccatgcagaaaatgatgatgcccaatttaccaaaatgttcacgctgaatataagaaggaaacctcaagtgctcgcagaagcatcggcaagtcaggcgtcctgtttctcggatggatacccattaccatcttggacctggaagaagtgttcagacaagtctcccaactgcacagaagagatcacagaaggagtctggaatagaaaggctaacagaaaagtgtttggacagtgggtgtcgagcagtactctaaacatgagtgaagccataaaagggttcctggtcaagtgctgtgcatacaattcccttggcacatcttgtgagacgatccttttaaactctccaggccccttccctttcatccaagacaacatctcattctatgcaacaattggtgtttgtctcctcttcattgtcgttttaaccctgctaatttgtcacaagtacaaaaagcaatttaggtatgaaagccagctacagatggtacaggtgaccggctcctcagataatgagtacttctacgttgatttcagagaatatgaatatgatctcaaatgggagtttccaagagaaaatttagagtttgggaaggtactaggatcaggtgcttttggaaaagtgatgaacgcaacagcttatggaattagcaaaacaggagtctcaatccaggttgccgtcaaaatgctgaaagaaaaagcagacagctctgaaagagaggcactcatgtcagaactcaagatgatgacccagctgggaagccacgagaatattgtgaacctgctgggggcgtgcacactgtcaggaccaatttacttgatttttgaatactgttgctatggtgatcttctcaactatctaagaagtaaaagagaaaaatttcacaggacttggacagagattttcaaggaacacaatttcagtttttaccccactttccaatcacatccaaattccagcatgcctggttcaagagaagttcagatacacccggactcggatcaaatctcagggcttcatgggaattcatttcactctgaagatgaaattgaatatgaaaaccaaaaaaggctggaagaagaggaggacttgaatgtgcttacatttgaagatcttctttgctttgcatatcaagttgccaaaggaatggaatttctggaatttaagtcgtgtgttcacagagacctggccgccaggaacgtgcttgtcacccacgggaaagtggtgaagatatgtgactttggattggctcgagatatcatgagtgattccaactatgttgtcaggggcaatgcccgtctgcctgtaaaatggatggcccccgaaagcctgtttgaaggcatctacaccattaagagtgatgtctggtcatatggaatattactgtgggaaatcttctcacttggtgtgaatccttaccctggcattccggttgatgctaacttctacaaactgattcaaaatggatttaaaatggatcagccattttatgctacagaagaaatatacattataatgcaatcctgctgggcttttgactcaaggaaacggccatccttccctaatttgacttcgtttttaggatgtcagctggcagatgcagaagaagcgatgtatcagaatgtggatggccgtgtttcggaatgtcctcacacctaccaaaacaggcgacctttcagcagagagatggatttggggctactctctccgcaggctcaggtcgaagattcgtagaggaacaatttagttttaaggacttcatccctccacctatccctaacaggctgtagattaccaaaacaagattaatttcatcactaaaagaaaatctattatcaactgctgcttcaccagacttttctctagaagctgtctgcgtttactcttgttttcaaagggacttttgtaaaatcaaatcatcctgtcacaaggcaggaggagctgataatgaactttattggagcattgatctgcatccaaggccttctcaggctggcttgagtgaattgtgtacctgaagtacagtatattcttgtaaatacataaaacaaaagcattttgctaaggagaagctaatatgattttttaagtctatgttttaaaataatatgtaaatttttcagctatttagtgatatattttatgggtgggaataaaatttctactacagaattgcccattattgaattatttacatggtataattagggcaagtcttaactggagttcacgaaccccctgaaattgtgcacccatagccacctacacattccttccagagcacgtgtgcttttaccccaagatacaaggaatgtgtaggcagctatggttgtcacagcctaagatttctgcaacaacaggggttgtattgggggaagtttataatgaataggtgttctaccataaagagtaatacatcacctagacactttggcggccttcccagactcagggccagtcagaagtaacatggaggattagtattttcaataaagttactcttgtccccacaaaaaaa

SEQ ID NO: 2255 - DNA, 4125 bp, Homo Sapiens
  NM_004124
cgactgggccaggcgccggggcaggaagggaggcggccgccgtgccattcttaaaggcgcccgagtgtaggcgacaggccgctgacggccggaaggaaaatgagtgagtctttggttgtttgtgatgttgccgaagatttagtggaaaagctgagaaagtttcgttttcgcaaagaaacgaacaacgctgctattataatgaagattgacaaggataaacgcctggtggtactggatgaggagcttgagggcatttcaccagatgaacttaaagatgaactacctgaacgacaacctcgcttcattgtgtatagttataaatatcaacatgatgatggaagagtttcatatcctctgtgctttattttctccagtcctgttggatgtaagcctgaacaacagatgatgtatgctggaagtaagaataagctagtccagacagctgaactaaccaaggtatttgaaataagaaataccgaagacctaactgaagaatggttacgtgagaaacttggattttttcactaatgtgaacttctgtgtttctaaagtatttatgtattaacctgaccatactggaatcagacataaatacttatttatgcctaaaaatgcactgttacttacagtttgtttcctgcagtaaagaaaaattcttcatttgtgcaaaatttgaacaaagaggaaatcatcttcatagtaatgaaactttgtaaagtgtttccttatattggtaattgttaggtggactacttttctccagggactttttgcactcttgtgactaatttctataacttatggttcggaatttgttactatttacagacaccattggaaagtggatatattagattgtgagagacaacagttgcctccttttgacaaatactggatattagcagtttatttatgaaaatagcgtattatcacttgtcaaatcattgaaattcatttggggtcaaagacttgagtgacccagtattgagccatgaataatttagtgtaacctgtattacaagtacattgatgaattctgtatcttctttggtttcctgtatctttttaatcaagtctagaaactatgttcatcagtcactcatttttaaggtcgggagttagattttatgatagaattatgactgttagcttttctccttatagcatcttagtcttagaaattggtgggttgtaataatcaagggcttcattccttttatgtcatttctagacagttttgaatctaggttaataacactttatttataaagcacctcaatgtcctgtgaacactaattattttaaatgtgttaatactgtgcctttgatttgttagctttaaagttagtttaagacttttacactgccagtattccacatttggtgaaattaatacttttttaaagggtccaaataaaataattttctaatgtgtatatctgaaatttgtaataaaatcaacttcatattttaaaaattccaactatctgcttgcattggtgaatatatggcagtcgagagttataattttgggtatacttgtggttagttttgtgccataggaaaaaattatcttaaaactttggccatagttaataacattaacacttcaatagcaatcacatcttatatcctaaatgtcagaagatattctgaactggatgcctgaatagttaactaaaccagtcttgttagatgatggtactcttggcataaagcgaggattctgatatttggcatacttgtaaaaacaaatacataagtaaccattgaacattaatttgataataggtctagagactctaaaaactaaccaaacttggtgagtgtattcttatattaagaatatcttagtcatctcaaaactagcaaaatttaaattttggcatgttttccattcatatgttctttgcattttatttttgaggtttctgtgagaagtaaagatagttggaatttttgcgatattgaatagaacatcttctgttcccaacactgtttggcttcactaatttagaagtcaggaagcaatagaaagttggagatgaggaagtgctagagtaggtgtttgttttggttcttggagggaaaagattctttattccaatttccagagagaagagaaaactcacccaggaagtttaaaaattctttaaacaggtattttgatattggagaataacatgcatataattctgtaggaatgcacatgtaatccaagtgagtggagagtgtttttaatgtttttgaatgaaggaaatgaggttttgtttcacctgttttgcagcagtaagagaaactagtgctgcaagaatgtattttttaatgaagttccttattttgtcttgcatgttttagttttgcttatttttaaatttggaggtcctccataatgtcagataatattgacctgccatacgttagcactcttagttccgctactgtctttaacaggagcaaagagctgtgataaaccatgcttttttgagcttgtctgactcctaattaataacatgtttttggcaagacaacagattgaggttagaggatcagtaggacatttttattccatctgtcctatggggaaatttacaaatcccgtgctctaaaatgttctcaaacatttatatagatttccctttcatcttactaaattttgcattgttcttttcaagtatgtttcgtatttactgtctttttttctgccatttcccaaataataactccagatttcataattccagtttttacattccgttatctttctggtacaaccattcccattcagccttaaatctgagtcctttttagcagcaacttttttcctgggatcctccttcgtggtcttctaagtcagtgttagttttgaaatttttggccctgcataagttctgcatagcatctaatgtcaaaatagaaccaactggtaatcacagtattatttagtgtggtttccatgacaacaaaaatacatacgaagaaaacttctcaggttactatgctgaaattccaaaatgtctgagttttgaatagtgatcactttgttctggtattgacgcaattatattaggaaaaaagttggttgactgtttttgtttaattgacttctaaaatgttcaaattgtctagttctaaaagtttactaaatgcctagtgcagttaaacatactcttgtttaagtgtgtgttgctaaattttttactgtcattactaaataatctgtgtggcaaaatgtgtgtcagcacttttccctccttttttatctcctattttcaggagtcaaatgtagccataaactgtatccttgtctgacactttagctaaaaatttccagttaggggagtttattgccaaattaaatttggctgttccccccaacccatatagatattaaggaaggtgtacttaaaaaatgtttggactgcttttaaaacctgagcaatgtcattaatccatatgtggactagtgatgaatagatattttcataagagtttaaatgctgatatttggtggaagtagagagtaactcatattctatcaattcaagtattcttactatggttgctttccctatttgttcaatagactgataatactggaatttatagagtttgagccattacaacttttgtgaggatgtgtttcaaacatttctggacaaatcttattttgtatttctggaagaatgtagtaatcttctagaccgcttaaaaccaatgctcccaagctgaatattcttgagaaatttgtttttattatgccatttgacatttcaaatcagtgctcatatacagtaaacttgtgatagaaattgtattttattgctttttggattataattcatataaatataattacttgaatattgtttgagatcattaacatgccagggcagttcccactgatttagatggtccaagataatctcattcaggaggcttgaaacattaatggtttagtcttgtgaattttaacagttctctgtcatcgtttaacaaaaccaacaactgacacaactccttaagctgtggtttcagtctctgctagttcatattgcatgtttattttggacagtcttttgttaagcatggtgcttgtactggtttaaataaaatgttaacatt

SEQ ID NO: 2256 - DNA, 1515 bp, Homo Sapiens
  NM_004125
gcgcggctgagtgctgcagaatcgctggggtggcagagccgccagcgaggctggggatgggggcgccgctgctctctcccggctggggagccggggctgccggccggcgctggtggatgctgctggcgcccctgctgccggcgctgctgctggtgcggcccgcgggggccctggtggaggggctctactgcggcacgcgggactgctacgaggtgctgggcgtgagccgctcggcgggcaaggcggagatcgcgcgggcctaccgccagctggcccggcgctaccaccctgaccgctaccggccccagcccggagacgagggccccgggcggacgccgcagagcgccgaggaggctttcctgctggtggcaaccgcctacgagacactcaaggtctctcaggcagctgcagagcttcaacagtactgtatgcagaatgcctgcaaggatgccctgctggtgggtgttccagctggaagtaaccccttccgggagcctagatcctgtgctttactctgaagactcgagagaagtttgctgaggaatgccttcaagcacaaagtgatgaatgactgccttcaagtctcaagaaaacacttttccctaacttttagagatatttcagccctttcctgtggcctggtcctatagccaaaatcacagatattcatgagtttctacttgagtgagaaaactgggtgaaggaatagaattttaaatagtaataactgcttgttttttttgtgcaagtacttttatacataagataaacaaaaaccttaccaccaaacataccaaaatgcacctctttcataagtgagttactaagatttctatacctggaatatcatgtatgtttcatttactggatgtttacattttaggaaggaaaatagttttgtttatttaaacaactgaatacttataaactgttgttcctggaagttatttattccataaaaaatttgttcttttgtcatgaatttataattcctaaatgaagaccagaaagtacaaattgctgggaggaagaataggctttattaatcaactgatgtcttgatttttctaaatgggaagattgctttatttttaacactaattatgggagcagattcttagcaaacttctttggaaaagttaatgttatgatgtgcattaggctgccccatcgtgtatataaatgaagcagatttgatttttgtattcttacgtttctctgctttgtagttgtggctgtacttaaagaaatacagaatttcatatatttaaaaatgtttaaaatgtgacccacagaacattgtaaatgattaaaaactaacatgaaaatattacaacctaaaagaattcttaacttcacaagtgttttacttcgacgatgtgcctttgatttaatttgggacacttttttagaaggatacattattcgtgtttgcaacggtctttgaagagcttggaaataaaatttctgcttaattaatcatttttctatgacagcaaaaaaaaaaaaaaaaaa

SEQ ID NO: 2257 - DNA, 964 bp, Homo Sapiens
  NM_004126
gagaacacaaagtaaaacttctgctgttcccagtcctgcagccccagcccagccgtcccccgcgggcgtggcaggtcctgagtcagggcctgtccgtggccagcatccctgctgggcgattgagcagcgggaagctgcttggacccagtctcaaacttaaccctcatctagcacccgggcaggcctcctgggttgcagggacttgagaaaaggcagagttctcaggtcctaggaagctggggcacgctggcgtgacaagcgtcccggagaaagccaagccctcggggagctggggaccgcagcagggctgcagtcacatcctgcgcgggtgggcggcgggccaggccttcagttgtttcgggacgcgccgagcttcgccgctcttccagcggctccgctgccagagctagcccgagcccggttctggggcgaaaatgcctgcccttcacatcgaagatttgccagagaaggaaaaactgaaaatggaagttgagcagcttcgcaaagaagtgaagttgcagagacaacaagtgtctaaatgttctgaagaaataaagaactatattgaagaacgttctggagaggatcctctagtaaagggaattccagaagacaagaacccctttaaagaaaaaggcagctgtgttatttcataaataacttgggagaaactgcatcctaagtggaagaactagtttgttttagttttcccagataaaaccaacatgctttttaaggaaggaagaatgaaattaaaaggagactttcttaagcaccatatagatagggttatgtataaaagcatatgtgctactcatctttgctcactatgcagtcttttttaagagagcagagagtatcagatgtacaattatggaaataagaacattacttgagcatgacacttctttcagtatattgcttgatgcttcaaataaagttttgtcttgggaaaaaaaaaaaa

SEQ ID NO: 2258 - DNA, 1880 bp, Homo Sapiens
  NM_004127
gctgccccggaagtggacggcacgccgcggcggggtgggtgcaagatgccgctgccggttcaggtgtttaacttgcagggggccgtggagcccatgcagatcgacgtggacccccaggaagacccgcagaatgcacctgacgtcaactacgtggtggagaaccccagcctggatctggaacagtacgcggccagctacagcggcctgatgcgcatcgaacggctgcagttcattgctgatcactgccccacgctgcgggtggaggccctgaagatggccctctccttcgtgcagagaacctttaacgtggacatgtacgaggagatccaccgcaagctctcagaggccaccaggtcctctctcagggagctgcagaacgcacccgacgccatccctgagagcggcgtggagcccccagccctggacacggcctgggtggaggccacgcggaagaaggcgctgctgaagctggagaagctggacacagacctgaagaactacaagggcaactccatcaaagagagcatccggcgcggccacgacgacctgggcgaccactacctggactgtggggacctcagcaacgccctcaagtgctattcccgggcccgggactactgcaccagcgccaaacacgtcatcaacatgtgcctcaatgtcatcaaggtcagcgtctacttgcagaattggtctcatgtgctcagctacgtcagcaaggctgagtccaccccagagattgccgagcagcgaggagagcgtgacagccagacccaggccatcctcaccaagctcaagtgtgccgcaggcttggcagagctggccgccaggaagtacaagcaggctgccaagtgcctcctgctggcttcctttgatcactgtgacttccctgagctgctgtcccccagcaacgtggccatctacggtggcctgtgcgccttggctacctttgaccggcaggagctgcagcgcaatgtcatctccagcagctccttcaagttgttcttggagctggagccacaggtccgagacatcatcttcaaattctacgagtccaagtacgcctcatgtctcaagatgctggacgagatgaaggacaacctgctcctggacatgtatctggccccccatgtcaggaccctgtacacccagattcgcaaccgtgccctcatccagtatttcagcccctacgtgtcagccgacatgcataggatggcggcagccttcaataccacggtggccgccctggaggacgagctgacgcagctaatcctggaggggctgatcagtgcccgtgtggactcacacagcaagatcctatacgcccgggacgtggatcagcgcagcaccacctttgagaagtctctgttgatgggcaaggagttccagcgccgcgccaaggccatgatgctgcgggcagctgtgctccgcaaccagatccatgtcaagtccccgcccagagaagggagccagggggagctgactccagccaacagccagtcccggatgagcaccaacatgtgaggggtgaaccttggcctccaggacatctgcaccccctccccacctccacggacctcggacctccaggcggctcagtgctgcctgcggcccagctaaggggcctggccactgggtgccacccagcctgtgtgccctccctggggctgaggaggcaggcggctgctagttgtggcccttcctggaaggagaggcctgcagggctcgaccctgtgggtttctgtccccagggagcagactgtgcggcacccaggcccagtggcaccatttcccagacccctcctgttcccgcctcagtcaggtgcagacaagtgggcggtgtccattaaagagcagactcagcgttaaaaaaaaaaaaaaaa

SEQ ID NO: 2259 - DNA, 1469 bp, Homo Sapiens
  NM_004128
gtgttcctcttttcctcggttcccagtgttctggcaggtaaggaacgccggctcttcgcctctcagcgcggcttgtcctttgttccggacgcccgctcctcagccctgcggctcctggggtcgctgctgcatcccgcacgcctccaccggctgcagacccatggccgagcgcggggaactcgacttgaccggcgccaaacagaacacaggagtgtggctagtcaaggttcctaaatatttgtcacagcaatgggctaaagcctctggaagaggtgaagttgggaaactgcggattgccaagactcaaggaaggactgaggtgtcatttactttgaatgaggatcttgcaaatattcatgatattggtggaaaaccagcttcagtcagtgctcctagagaacatccatttgtcttgcaaagtgttggaggacagacattaacagtatttactgagagctcatcagataagctgtcattggaaggaatagtggtacaaagagctgaatgccgaccagctgccagtgaaaactacatgcgattaaaaagattgcaaatagaagagtcttccaaaccagtgaggctatcacaacagctggacaaagttgtaacaaccaattacaaacctgttgctaatcatcaatacaatatcgaatatgaaaggaaaaagaaagaagacggaaagcgagctcgagctgataaacaacatgttttagacatgctattttcagcctttgagaaacatcaatactataatcttaaggacttggtggacatcacaaagcaacctgtggtgtacctgaaggaaatcttaaaagaaattggtgttcagaatgtaaaagggatccacaaaaacacatgggagctgaagccagagtacagacactatcaaggagaagaaaagagtgactaagaagactcctagccagcatgctagtgaaacgactagcagcgatgctatgcaaaaggcgctgatactggaaggcttgaacaccgtatgttaataggggttaagtgacagtactttgatttctctcggtaaattttttaaacctgtaattcttgtaaagtttcttaactgtttttttgaggagaaagaacagatttatttatagacttaacttgtattaaaccagattattcacagtaggaataggggttggaggattaagagggtttttcttaaatattagcttttaatgtgtacaattaggaaatttttttaagtgaggactctctacccttgccgtatctaaggagctgaggtaatacagatccaaggagaattgtatagcaagaaaaaaacagtcaactacagaaactcttaaaaggaataaaaacccaaagttccttattttgaaattgtcaaagaacaaagcggtgtttttcttttaaacaggtgatcacgtttcgtgttcatactcaacgttaataaaaggagagagtttgtagtgaaaaaaaaaaaaaaaaaa

SEQ ID NO: 2260 - DNA, 2051 bp, Homo Sapiens
  NM_004130
ggagacgcgggacccggagccccgcgggccaccgcccctgccggccgcgcagctgggaggatgcggacggcagcgagagcgtgcgcggccacgtgacggccgctataagagcgcacggggcagacgctcggttccccgccgtgcctcctcgctggccgcgctccctcccggtgccggcttctctgagtcaccaacctgaggctgccccggccgcctgcgcacccggcagcaccatgacagatcaggcctttgtgacactaaccacaaacgatgcctacgccaaaggtgccctggtcctgggatcatctctgaaacagcacaggaccaccaggaggctggtcgtgctcgccacccctcaggtctcagactccatgagaaaagttttagagacagtctttgatgaagtcatcatggtagatgtcttggacagtggcgattctgctcatctaaccttaatgaagaggccagagttgggtgtcacgctgacaaagctccactgctggtcgcttacacagtattcaaaatgtgtattcatggatgcagatactctggtcctagcaaatattgatgatctttttgacagagaagaattgtcagcagcaccagacccagggtggcctgactgcttcaattccggagtcttcgtttatcagccttcagttgaaacatacaatcagctgttgcatcttgcttctgagcaaggtagttttgatggtggggaccaaggcatactgaacacattttttagcagctgggcaacaacagatatcagaaaacacctgccgtttatttataacctaagcagcatctctatatactcctacctcccggcatttaaagtgtttggtgcaagtgccaaagttgtgcatttcctgggacgagtcaaaccatggaattatacttatgatcccaaaacaaaaagtgtcaaaagtgaggcccatgatcccaacatgactcatccagagtttctcatcctgtggtggaacatctttaccaccaacgttttacctctgcttcaacaatttggccttgtcaaagacacctgctcatatgtaaatgtgctttcagacttggtctatacactggctttctcttgtggcttctgtagaaaggaagatgtctcaggagccatatcacatctgtcccttggggagatcccagctatggcacagccgtttgtatcctcggaagaacggaaggaacgatgggaacagggccaggctgattatatgggagcagattcctttgacaacatcaagaggaaacttgacacttacctccagtagaaacactgcatttttctgtgaacacatccacttcacaagccttgtttctgatacttagtatctagagctgggttgagaaaagtctgttacagttgctagaggttttcattaaaacttatcagatgagaggcttttttaggataagaggtgagaactgggcaaaagttgtgaagcagcaattctgttatatggacagtgttctgctttttaatcctatttagcttgtttcagaaattctcacttttgttgactgccaacatacaaagtaagggaaactcaagatattaagatggctgtatcagttcttaaaatctgcagagcctggttcaaaatcagtcactcccttcagaagcagacatggcatctgttccttgcttgcttgttggttgtgtacctttcacgagacctgaattttagaattgcccagtgctgccagagtgagtgagtgtaattctcctttcaggtaaagataggctatctcaacactgctgagtgattcataaacatatcaaccaatagcattaacccattttatttcctgtccttagtgtctgaagatgctcaccagttttctgtgtacagtaaggcagcatgctaaaatgcttttgttcagttctgtatatttgaaaatagcagtgtgttctctgatggttacctgcagtggcaccctgtacaaaaaataaaagacttattgctgtatcttggttgtttaattaaattaaggaatttcaccataaaaaaaaaaaaaaaaaaaaaaaaaaaaaa

SEQ ID NO: 2261 - DNA, 941 bp, Homo Sapiens
  NM_004131
ccaagagctaaaagagagcaaggaggaaacaacagcagctccaaccagggcagccttcctgagaagatgcaaccaatcctgcttctgctggccttcctcctgctgcccagggcagatgcaggggagatcatcgggggacatgaggccaagccccactcccgcccctacatggcttatcttatgatctgggatcagaagtctctgaagaggtgcggtggcttcctgatacgagacgacttcgtgctgacagctgctcactgttggggaagctccataaatgtcaccttgggggcccacaatatcaaagaacaggagccgacccagcagtttatccctgtgaaaagacccatcccccatccagcctataatcctaagaacttctccaacgacatcatgctactgcagctggagagaaaggccaagcggaccagagctgtgcagcccctcaggctacctagcaacaaggcccaggtgaagccagggcagacatgcagtgtggccggctgggggcagacggcccccctgggaaaacactcacacacactacaagaggtgaagatgacagtgcaggaagatcgaaagtgcgaatctgacttacgccattattacgacagtaccattgagttgtgcgtgggggacccagagattaaaaagacttcctttaagggggactctggaggccctcttgtgtgtaacaaggtggcccagggcattgtctcctatggacgaaacaatggcatgcctccacgagcctgcaccaaagtctcaagctttgtacactggataaagaaaaccatgaaacgctactaactacaggaagcaaactaagcccccgctgtaatgaaacaccttctctggagccaagtccagatttacactgggagaggtgccagcaactgaataaatacctcttagctgagtggaaaaaaaaaaaaaaaaaa

SEQ ID NO: 2262 - DNA, 3506 bp, Homo Sapiens
  NM_004134
ttcctcccctggactctttctgagctcagagccgccgcagccgggacaggagggcaggctttctccaaccatcatgctgcggagcatattacctgtacgccctggctccgggagcggcagtcgagtatcctctggtcaggcggcgcgggcggcgcctcagcggaagagcgggcctctgggccgcagtgaccaacccccgcccctcaccccacgtggttggaggtttccagaagcgctgccgccaccgcatcgcgcagctctttgccgtcggagcgcttgtttgctgcctcgtactcctccatttatccgccatgataagtgccagccgagctgcagcagcccgtctcgtgggcgccgcagcctcccggggccctacggccgcccgccaccaggatagctggaatggccttagtcatgaggcttttagacttgtttcaaggcgggattatgcatcagaagcaatcaagggagcagttgttggtattgatttgggtactaccaactcctgcgtggcagttatggaaggtaaacaagcaaaggtgctggagaatgccgaaggtgccagaaccaccccttcagttgtggcctttacagcagatggtgagcgacttgttggaatgccggccaagcgacaggctgtcaccaacccaaacaatacattttatgctaccaagcgtctcattggccggcgatatgatgatcctgaagtacagaaagacattaaaaatgttccctttaaaattgtccgtgcctccaatggtgatgcctgggttgaggctcatgggaaattgtattctccgagtcagattggagcatttgtgttgatgaagatgaaagagactgcagaaaattacttggggcacacagcaaaaaatgctgtgatcacagtcccagcttatttcaatgactcgcagagacaggccactaaagatgctggccagatatctggactgaatgtgcttcgggtgattaatgagcccacagctgctgctcttgcctatggtctagacaaatcagaagacaaagtcattgctgtatatgatttaggtggtggaacttttgatatttctatcctggaaattcagaaaggagtatttgaggtgaaatccacaaatggggataccttcttaggtggggaagactttgaccaggccttgctacggcacattgtgaaggagttcaagagagagacaggggttgatttgactaaagacaacatggcacttcagagggtacgggaagctgctgaaaaggctaaatgtgaactctcctcatctgtgcagactgacatcaatttgccctatcttacaatggattcttctggacccaagcatttgaatatgaagttgacccgtgctcaatttgaagggattgtcactgatctaatcagaaggactatcgctccatgccaaaaagctatgcaagatgcagaagtcagcaagagtgacataggagaagtgattcttgtgggtggcatgactaggatgcccaaggttcagcagactgtacaggatctttttggcagagccccaagtaaagctgtcaatcctgatgaggctgtggccattggagctgccattcagggaggtgtgttggccggcgatgtcacggatgtgctgctccttgatgtcactcccctgtctctgggtattgaaactctaggaggtgtctttaccaaacttattaataggaataccactattccaaccaagaagagccaggtattctctactgccgctgatggtcaaacgcaagtggaaattaaagtgtgtcagggtgaaagagagatggctggagacaacaaactccttggacagtttactttgattggaattccaccagcccctcgtggagttcctcagattgaagttacatttgacattgatgccaatgggatagtacatgtttctgctaaagataaaggcacaggacgtgagcagcagattgtaatccagtcttctggtggattaagcaaagatgatattgaaaatatggttaaaaatgcagagaaatatgctgaagaagaccggcgaaagaaggaacgagttgaagcagttaatatggctgaaggaatcattcacgacacagaaaccaagatggaagaattcaaggaccaattacctgctgatgagtgcaacaagctgaaagaagagatttccaaaatgagggagctcctggctagaaaagacagcgaaacaggagaaaatattagacaggcagcatcctctcttcagcaggcatcactgaagctgttcgaaatggcatacaaaaagatggcatctgagcgagaaggctctggaagttctggcactggggaacaaaaggaagatcaaaaggaggaaaaacagtaataatagcagaaattttgaagccagaaggacaacatatgaagcttaggagtgaagagacttcctgagcagaaatgggcgaacttcagtctttttactgtgtttttgcagtattctatatataatttccttaatttgtaaatttagtgaccattagctagtgatcatttaatggacagtgattctaacagtataaagttcacaatattctatgtccctagcctgtcatttttcagctgcatgtaaaaggaggtaggatgaattgatcattataaagatttaactattttatgctgaagtgaccatattttcaaggggtgaaaccatctcgcacacagcaatgaaggtagtcatccatagacttgaaatgagaccacatatggggatgagatccttctagttagcctagtactgctgtactggcctgtatgtacatggggtccttcaactgaggccttgcaagtcaagctggctgtgccatgtttgtagatggggcagaggaatctagaacaatgggaaacttagctatttatattaggtacagctattaaaacaaggtaggaatgaggctagacctttaacttccctaaggcatacttttctagctaccttctgccctgtgtctggcacctacatccttgatgattgttctcttacccattctggaatttttttttttttaaataaatacagaaagcatcttgatctcttgtttgtgaggggtgatgccctgagatttagcttcaagaatatgccatggctcatgcttcccatatttcccaaagagggaaatacaggatttgctaacactggttaaaaatgcaaattcaagatttggaagggctgttataatgaaataatgagcagtatcagcatgtgcaaatcttgtttgaaggattttattttctccccttagacctttggtacatttagaatcttgaaagtttctagatctctaacatgaaagtttctagatctctaacatgaaagtttttagatctctaacatgaaaaccaaggtggctattttcaggttgctttcagctccaagtagaaataaccagaattggcttacattaaagaaactgcatctagaaataagtcctaagatactatttctatggctcaaaaataaaaggaacccagatttctttcccta

SEQ ID NO: 2263 - DNA, 6367 bp, Homo Sapiens
  NM_004136
agacccggggctggctctgctgctctcgcgatatttgcgcgagcctgcttccttctttcctcccttgccagtccgcctgtcttcctccccgtcttccctgcccggcctcccccttcttcccccgctggccccctccccggagggataatatggtctccggcgatggacgccccaaaagcaggatacgcctttgagtaccttattgaaacattaaatgacagttcacataagaagttcttcgatgtatctaaacttggcaccaagtatgatgttctgccttactcaatacgggtcttgttggaagctgctgtacgaaattgtgatggctttttaatgaagaaggaagatgttatgaacattttagactggaaaaccaaacaaagcaatgttgaagtgccctttttccctgcccgtgttcttcttcaagattttactggaataccagcaatggtggattttgctgctatgagggaggcagtgaaaactcttggaggtgatcctgagaaagtccatcctgcttgtccgacagatcttacagttgaccattctttacaaattgacttcagtaaatgtgcaatacagaatgcaccaaatcctggaggtggtgacctgcagaaagcaggaaagctctctccacttaaagtgcagcctaagaagcttccctgcagaggccagactacctgccgaggatcttgtgattctggagaactaggccgaaactcaggaacattttcttcgcagattgagaatacacccatcctgtgtccttttcatttgcaaccagtgcctgaacctgaaacagtgttaaaaaatcaagaagtagaattcggcagaaatcgagagaggcttcagttttttaagtggagttcaagagtttttaagaatgtggcagtgatccctcctggaactggaatggctcatcaaataaacttagaatatttgtcaagagtggtttttgaagaaaaagacctcctcttcccagacagtgtagtcggcacagattcacacataacgatggtgaatggtttagggattctggggtggggggttggaggcattgaaacagaagcagttatgcttggtctgccagtttctcttactttaccagaggtggttggatgtgagttaactgggtcatcaaacccttttgttacatccatagatgttgttcttggtattacaaagcacctcaggcaagtaggagtggctggaaagtttgttgagttttttggaagtggagtttcacaattatctatagttgatcgaactacaatagcaaacatgtgtccggaatatggtgctatcctcagctttttccctgttgacaatgtgacattaaaacatttagaacatacaggttttagcaaagccaaactcgaatcaatggaaacataccttaaagctgtgaaattgtttcgaaatgaccagaattcttcaggagaacctgaatactcccaggtgatccagattaatctgaattcaatagttccatctgttagtggtccaaaaagacctcaggatagagttgctgtgacagatatgaaaagcgatttccaggcttgcttaaatgaaaaggttggatttaaaggcttccaaattgcagctgaaaaacaaaaggatattgtctccattcattatgaaggaagtgaatataagctgtctcatggatcagtggtcattgctgcagttatcagttgtaccaataattgcaatccatctgtcatgcttgctgcaggtcttttggctaaaaaggctgttgaagctggtctgcgtgttaaaccttatataagaacaagtttatctccaggcagtgggatggttacacattacctcagttcaagtggagtattaccatatctaagtaagcttggatttgaaatcgttggctatggatgttcaacttgtgtgggaaatacagcacccttatcagacgcagttttaaatgcagtaaaacagggtgatttggttacctgtggaattttatctggaaacaaaaattttgaaggtcgtctttgtgattgtgttcgtgccaattatcttgcctctccacccttagtggtagcttatgccatagcaggcacagtgaatatagatttccagacagaacctttaggtactgaccccaccggcaagaacatttacctgcatgatatttggcctagtcgagaagaagttcatcgagtagaggaagaacatgttatactatccatgtttaaagcattaaaagataaaatagaaatggggaataaacggtggaattccttagaagcaccggattcagttttgtttccatgggacttaaagtctacttatatcagatgcccttcattttttgataaacttaccaaagagccaattgcactccaggctattgaaaatgcccatgtcttattatatttgggagactctgtcacaacagatcatatatcacctgcaggaagtatcgctaggaatagtgctgccgctaagtatttgacaaacagaggccttacccctcgtgaattcaactcttacggagctcgaagaggtaatgatgctgtaatgacaagaggcacttttgcaaatatcaagctttttaataagtttattggaaaaccagctcctaaaacaattcattttccatcaggacagacgctagatgtatttgaggctgcagagctgtaccagaaagaaggtatcccactgattattttagcaggaaagaaatatggttcaggaaactccagagactgggctgccaaaggaccgtatttactgggtgtgaaagctgttttggccgaaagttatgaaaaaatacacaaagatcatttgattggaattggcatagctccacttcagttccttccaggagaaaatgcagattccttgggcctctccggtagagaaacattttctttaacatttcctgaagaactgtctcctggaattacattgaatatacagacaagcactggaaaagtattcagcgtgattgcttcgtttgaagatgatgtggaaataacattatacaaacatggaggattattaaactttgtggcacgaaaattctcatagtatctacttaccatagatacctttcataactggtaactgcaaagccttttgtgctggacccaggaatccttaccatggagcagcagatagtcccagtatactcacttatctcatccatggatgtaaatgatgatgaatcaacatagtaactgaaatgaaatcttcttgattttaaataatatacgaatggtgctattaatattgctaaaatcaacgtgtgaagtgtgttgtggaagagacctgtaagtatggggggggggcgatattttatcagaccattttgtaaataaaggcagaatttgtgttgaagattcttatatgaataaccttcctggatttgtttagttttgcaccaataaaactgtgtactactgtttgttggtttaagagtagcagattgaaatataagaagccagattagactctaaaattgtggccattggaatctcatttataaatggaccttttaagtatattaattcctcttcagaattgagctggacacatttggcattcttagtttgtcatataaccaggtttatccttagtctaactgcaagggatagaacctgccccaggtcacaatcattctgtccaatccagccaaggttccctccacatatgaagatggaccatggcaggatacaactgattgtgtggcaccatgtattagcagtgggaatatgtatcacatatgatgcagcctttcatatttcagcagtttgccactgtgactgtctggcaagcccccagatggcgttatattaattggattagattattttgctcaccttatgtaatactgtaacttcctataacctaatattttcggtatcattaaccaaaatttcacactcatagttgctaaagagaatgttattcaatcattaaactctgaactgatttcttctatacatttaaattatccaccctcaataatacgggtgctcaaccctatgcattttttaagtgttgctatttcttaattaaattgatttcctgtcattttgaatcatttatcacctgcgatgcatgattctattaattttgttatgttactgttttaaccaaagctgaccgtaaggataaaacacttaagttgttgctgagtactatatatcctcaatatgcatgtctgcccatcacatcaaatgttctgtcaacaagatgtttggtaattttttttaaaaaggttggaaaattaattatagaaggttctatactgtttttttaattaagaaactaaatctagcaggctaaaggttaattgtagtgattttttttcacatagatatctttctatgacctagttagttactgcaattcagaattagttcacattgcataaagaattacttgttgtaagcaaaatgctgaaactaccaaaccagtggatgaagaccactaagaactttgcacataatcatacaatcttttgaaaatattttgcaaatatgtgtttagacaataagatggactagagttcgacaaaatgatttctttatttaaattttgtataagtattttcttcgacactttcaaattatattgtgttcttgatatatgctgtatatttatttgttagtgcatgtgtttttaatttacatgaaaacatgagttaggagaaattacaggttgaaagatgaaatgcctgtatgtgctctgaagaaatggtaattccagattgtgcagggggaaacaaatctattttgttttgttttgttttttgagacggagtcttgccctgtggctgggctggagtgcaatggcgcgatcttggctcactgcaacctccgcctcccgggttcaggggattctcctgcctcagcctcctgagtagctgggactacaagcatgcaccaccacgcccagctaatttttgtagttttagtagagatggggtttcaccatgttggccagatgatctgaatctcttgacctcgtgatccgcccgccttggcctccacaagtgctgggattacaggtgtgagccaccacacccggcctatattgttttgaaagcatactctatatatagttatgggcagaggcacaggcatcctcagcagctgattcaggagatgatggtaaagctagctaactatgaattaaacattcacatatccagtctacctggtccagtaataatacaagcaaatcttgtatttcaggaacaaatcaaggttctcttaattttttggcttatatacaatgaagtaaaaacttgataaacatggtttcaaattgaggaggagagtcttggatgtatgttttaatatgtataccttataattctgcctctagccaaatgctatgtttgcaaaatgtggcatctgttagtttttattgtctgtgtcttctttgtttactataccttgggtaattttgtgttaccaaaaaaaaaaaaaaaaaaaggaagtgtaatgtcagacacacaagaaaagcaaatcagtgttgtaagcttaaagtacaatttcaaaggtcactaccaacagcagggttttttttatactttgaaaacattatgctacatatcattgccattttcatattttggggttttgctactcttatacaatggaatcaatggaaatgtcatccagccactgaattgccattattatatctaaaaagtttctaagatgacagttatcactattttgttttatctccatgctgacatttgaaagaaggtactagtatccctctagccagattgcttagtttttcgttggtaatcaaacaacagttgtactaaaggaaagtaaagctaggacctaaatcagaatcatagttgcctgcatatatggtaacaaggtcgtgtgcatttgctttcacagtgatgagtgagaggatgagaagaaattatttgacatttttctgtggttgaatagaagacacctttcttttgtctttaggtttaggaggagatactaagatactggatgtttatcctatcttagtttggttggagtaataagagagaagaagagggtggactttggcttttcagtgttttttcccctaaagagtgatattgctgacgtttctatcaattttacacataatatgtggctatgaaaccatatatctcacttaagtaacaaagtaatcactttgtctatcactaagtaatagacaaaaatcattgtctattatttaaagccaacaaaacagtgtaacagttttaagttcaataatgttaagtattgtatagaaatatattggaggcaaagttcagttgatgacaattgtgtatatgttactgatgctgtaaattatttttaataaagaaaattgtattatcacattt

SEQ ID NO: 2264 - DNA, 4225 bp, Homo Sapiens
  NM_004140
ggccgcgcggcgcatcctgcgggcggcggcggcgggcgaggcgcctgcagccgggcgcaagatgatgaagtttcggttccggcggcagggcgccgacccgcagcgcgagaagctcaagcaggagcttttcgccttcaacaagactgtggagcatggcttccccaatcagcccagcgccctggccttcgacccggaacttcgcatcatggccatcggcaccaggtctggggctgtcaagatctatggtgcacctggcgtggagttcacaggcctgcaccgggatgcagccactgtcacacagatgcacttcttgaccggccagggccgcctcctgtccctgcttgatgacagcagtctgcatctctgggagattgtccaccataatggctgtgcccacctggaagaagcactcagtttccagctgcccagccggcccggctttgatggtgccagtgctccgctcagccttacccgagtcacagtggtcctgctggtggctgccggcgacatagcagccctgggcactgagggcagcagtgtcttcttcctggatgttaccaccctgaccctgctcgaggggcagacgcttgccccaggcgaggttctgcgcagcgtgccagacgactaccgctgtgggaaggcactgggccccgtggagtcactccagggacacctgcgggaccccacaaagattctcattggctacagccggggcctgctggtcatctggaaccaggcctcgcagtgtgtggaccacatcttcctggggaaccagcagctggagagcctatgctgggggcgtgatagcagcactgtggtcagctcacacagcgatggcagctatgctgtctggtctgtggatgccggcagcttcccaacgctgcagcccacggtagccaccacaccttacggcccctttccctgcaaggccattaacaagattctgtggcggaactgtgaatctgggggccactttatcatcttcagcggtggcatgccccgtgccagctatggtgaccgccactgtgtaagtgtgcttcgagccgagacattggtgacgctggacttcacttcccgcatcatcgacttcttcacagtgcacagcacacggcccgaggatgaatttgatgacccccaggccctggctgtgctgctggaagaggagctggtggtgctggacctgcagactcctggctggccagctgtgcctgccccatacctggccccgctgcactcctctgcaatcacttgctcggcccacgtggccagtgtccccgccaagctgtgggcccgcattgtgagcgctggcgagcagcagagcccccagcctgtctccagtgccttgagctggcccatcactgggggccgaaacctggcccaggagccgtcacagcgagggctgctgctgacgggccatgaggacggcaccgtgaggttctgggatgcctcgggtgtggcgctgcggccgctctataagctgagcacagctggcctcttccagacagactgtgagcacgctgacagcctggcccaggctgccgaggacgactggccacccttccgcaaggtgggctgcttcgatccctacagtgacgatccccggcttggcgtgcagaaggttgctctctgcaagtatacagcccagatggtggtggctggcactgcaggccaggtgctggtactggagcttagtgatgtgccggtggagcaggcggtcagcgtggccatcatagacctcctccaggaccgcgagggcttcacatggaagggccacgagcggctgagcccacgcacggggccgctgccctggcctgctggcttccagccccgtgtcctggtgcagtgcctgccgccagctgctgtaaccgctgtcacactccacaccgagtggagcctcgtggcttttggcaccagtcatggctttggcctcttcgactaccagcgcaagagccctgtgctggccaggtgcactcttcaccccaatgactccctggccatggagggtccgctctcccgggtgaagtctctcaagaagtcactgcgccagtctttccggcgcattcgcaagagtcgtgtctctggcaagaagcgggctgctaatgccagcagcaagttgcaggaagccaatgcacagctggctgagcaggcctgcccccacgacgtggagatgacgcccgtgcagcgccgcattgagccccgctctgccgatgactccttgtcgggtgtcgtgcgttgcctatactttgccgacacattccttcgagatggggcccaccacgggcccaccatgtgggctggcaccaactcaggctctgtgttcgcctatgcactggaggtgccggcagcagcagtgggtggtgagaagcggcctgagcaagcggtggaggccgtgctgggcaaggaggtgcagctgatgcaccgggcgcctgtggtggccattgccgtgttggacgggcgtggccgcccactgcccgagccctacgaggcctcacgggacctggcgcaggcacctgacatgcagggtggtcacgctgtgctcatcgcatctgaggagcagttcaaggtgttcacactgcccaaggtgagcgcgaagaccaagttcaagctgacggcccatgagggctgtcgtgtgcgcaaggtggcactggccacgtttgccagtgtggcctgcgaggactatgctgagacctgcctggcctgcctcaccaacctgggtgacgtccacgtcttctcggtgcctggcctgcggccccaggtgcactattcctgcatccggaaggaggacatcagcggcatcgcttcgtgcgtctttacgcgccatggccagggcttttacctgatatccccatcagaatttgaacgcttctccctaagtgcccggaacatcacagagccgctctgctctctggacattaactggccccgcgatgccacccaggccagttacaggatccgagagtcacccaagctgagccaggctaacgggaccccaagcatcctgctggccccacagagccttgatggaagccctgatccagcccacagcatgggacctgacaccccggagccacccgaggctgcactctcacccatgtccatcgactcagccaccagtgctgacaccacgctggacacgacaggggacgtcacagtggaagatgtgaaggatttcctgggctcctctgaggagtcagagaagaacctgaggaacctggcagaagacgaggcccacgcctgtgccatcctgatcaaatgaggaaggccagaactatcccgacctccacctgccctgctcggagctggagtgctggatccctggcacctgcctggccccttaacatagaaccacgcctgctaacctgtaggctccactgggacctgctgtcctgtcccgcctgaccctgggccctggagcagcaccagccccagggtgtgggcctgggacctgggccagaactgagccctcctgcaggcatttggctgccctgggggcccactgcctagggaagaggacaggtggggcccagcacctgtgccacctccccccctccacacaccatccttccccctcactttgcagagtatttttccttttttttttttttcttaaagacggagtcttgctctgtcgcccaggctggagtgcagtggccccatctctgctcactgcaagccccgccttctgggttcccgccattcttctgcctcagcctcccaagtagctgggactacaggcgcccaccaccacgcccagctaattttttctgtatttttagtagagatggggtttcaccatgttagccaggatggtctcgatctcctgacctcgtgatccacccacctcagcctcccaaagtgctgggattacaggcgtgagccaccatgcccagccctgcaaagagtatttttctagcgcctgggctggacagttgtttctaaaactaaactattttggtacctgcttctgggccagtccccagcctgtcatgagtgtgtgtgtgcgggcatggatgtgactgggagctctgctgggcacccacatctggggcctagtcaggtgtgtgtgtccggcggggggggggggcaggggggggggtcaagatgagtttccctgtagattgtaccttggggtttttttctgtcgttttgttaaaattagcgccattttaatattaaaaatactgatttttaatattgaaaataaaagcatttaatatctcttaaa

SEQ ID NO: 2265 - DNA, 1146 bp, Homo Sapiens
  NM_004152
ttttgcgaacggcgagcagcggcggcggcgcggagagacgcagcggaggttttcctggtttcggaccccagcggccggatggtgaaatcctccctgcagcggatcctcaatagccactgcttcgccagagagaaggaaggggataaacccagcgccaccatccacgccagccgcaccatgccgctcctaagcctgcacagccgcggcggcagcagcagtgagagttccagggtctccctccactgctgtagtaacccgggtccggggcctcggtggtgctcctgatgcccctcacccacccctgaagatcccaggtgggcgagggaatagtcagagggatcacaatctttcagctaacttattctactccgatgatcggctgaatgtaacagaggaactaacgtccaacgacaagacgaggattctcaacgtccagtccaggctcacagacgccaaacgcattaactggcgaacagtgctgagtggcggcagcctctacatcgagatcccgggcggcgcgctgcccgaggggagcaaggacagctttgcagttctcctggagttcgctgaggagcagctgcgagccgaccatgtcttcatttgcttccacaagaaccgcgaggacagagccgccttgctccgaaccttcagctttttgggctttgagattgtgagaccggggcatccccttgtccccaagagacccgacgcttgcttcatggcctacacgttcgagagagagtcttcgggagaggaggaggagtagggccgcctcggggctgggcatccggcccctggggccaccccttgtcagccgggtgggtaggaaccgtagactcgctcatctcgcctgggtttgtccgcatgttgtaatcgtgcaaataaacgctcactccgaattagcggtgtatttcttgaagtttaatattgtgtttgtgatactgaagtatttgctttaattctaaataaaaatttatattttacttttttattgctggtttaagatgattcagattatccttgtactttgaggagaagtttcttatttggagtcttttggaaacagtcttagtcttttaacttggaaagatgaggtattaatcccctccattgctctccaaaagccaataaagtgattacacccga

SEQ ID NO: 2266 - DNA, 3192 bp, Homo Sapiens
  NM_004153
acggtctgggggcggggccacgccgattggcgcgaagttttcttttctccttccaccttcttttcatttctagtgagacacacgctttggtcctggctttcggcccgtagttgtagaaggagccctgctggtgcaggttagaggtgccgcatcccccggagctctcgaagtggaggcggtaggaaacggagggcttgcggctagccggaggaagctttggagccggaagccatggcacactaccccacaaggctgaagaccagaaaaacttattcatgggttggcaggcccttgttggatcgaaaactgcactaccaaacctatagagaaatgtgtgtgaaaacagaaggttgttccaccgagattcacatccagattggacagtttgtgttgattgaaggggatgatgatgaaaacccgtatgttgctaaattgcttgagttgttcgaagatgactctgatcctcctcctaagaaacgtgctcgagtacagtggtttgtccgattctgtgaagtccctgcctgtaaacggcatttgttgggccggaagcctggtgcacaggaaatattctggtatgattacccggcctgtgacagcaacattaatgcggagaccatcattggccttgttcgggtgatacctttagccccaaaggatgtggtaccgacgaatctgaaaaatgagaagacactctttgtgaaactatcctggaatgagaagaaattcaggccactttcctcagaactatttgcggagttgaataaaccacaagagagtgcagccaagtgccagaaacccgtgagagccaagagtaagagtgcagagagcccttcttggaccccagcagaacatgtggccaaaaggattgaatcaaggcactccgcctccaaatctcgccaaactcctacccatcctcttaccccaagagccagaaagaggctggagcttggcaacttaggtaaccctcagatgtcccagcagacttcatgtgcctccttggattctccaggaagaataaaacggaaagtggccttctcggagatcacctcaccttctaagagatctcagcctgataaacttcaaaccttgtctccagctctgaaagccccagagaaaaccagagagactggactctcttatactgaggatgacaagaaggcttcacctgaacatcgcataatcctgagaacccgaattgcagcttcgaaaaccatagacattagagaggagagaacacttacccctatcagtgggggacagagatcttcagtggtgccatccgtgattctgaaaccagaaaacatcaaaaagagggatgcaaaagaagcaaaagcccagaatgaagcgacctctactccccatcgtatccgcagaaagagttctgtcttgactatgaatcggattaggcagcagcttcggtttctaggtaatagtaaaagtgaccaagaagagaaagagattctgccagcagcagagatttcagactctagcagtgacgaagaagaggcttccacaccgccccttccaaggagagcacccagaactgtgtccaggaacctgcgatcttccttgaagtcatccttacataccctcacgaaggtgccaaagaagagtctcaagcctagaacgccacgttgtgccgctcctcagatccgtagtcgaagcctggctgcccaggagccagccagtgtgctggaggaagcccgactgaggctgcatgtttctgctgtacctgagtctcttccctgtcgggaacaggaattccaagacatctacaattttgtggaaagcaaactccttgaccataccggagggtgcatgtacatctccggtgtccctgggacagggaagactgccactgttcatgaagtgatacgctgcctgcagcaggcagcccaagccaatgatgttcctccctttcaatacattgaggtcaatggcatgaagctgacggagccccaccaagtctatgtgcaaatcttgcagaagctaacaggccaaaaagcaacagccaaccatgcggcagaactgctggcaaagcaattctgcacccgagggtcacctcaggaaaccaccgtcctgcttgtggatgagctcgaccttctgtggactcacaaacaagacataatgtacaatctctttgactggcccactcataaggaggcccggcttgtggtcctggcaattgccaacacaatggacctgccagagcgaatcatgatgaaccgggtgtccagccgactgggtcttaccaggatgtgcttccagccctatacatatagccagctgcagcagatcctaaggtcccggctcaagcatctaaaggcctttgaagatgatgccatccagctggtagccaggaaggtagcagcactgtctggagatgcacgacggtgcctggacatctgcaggcgtgccacagagatctgtgagttctcccagcagaagcctgactcccctggcctggtcaccatagcccactcaatggaagctgtggatgagatgttttcatcatcatacatcacggccatcaaaaattcctctgttctggaacagagcttcctgagagccatcctcgcagagttccgtcgatcaggactggaggaagccacgtttcaacagatatatagtcaacatgtggcactgtgcagaatggagggactgccgtaccccaccatgtcagagaccatggccgtgtgttctcacctgggctcctgtcgcctcctgcttgtggagcccagcaggaacgatctgctccttcgggtgcggctcaacgtcagccaggatgatgtgctgtatgcgctgaaagacgagtaaaggggcttcacaagttaaaagactggggtcttgctgggttttgttttttgagacagggtcttgctctgtcgcccaggctggagtgcagtggcacgatcatggctcactgcagccttgacttctcaggcttaggtgaccccccaacctcatcctcccaggtggctgaaactacaggcacatgccaccatgcccagctgattttttgtagagacagggcttcaccatgttgccaagctagtctacaaagcatctgattttggaagtacatggaattgttgtaacaaagtatattgaatggaaatggctctcatgtattttggaattttccattaaataatttgctttttcctgaaaaaaaaaaaaaaaaaaaaaaaa

SEQ ID NO: 2267 - DNA, 4159 bp, Homo Sapiens
  NM_004155
gcgggagtccgcggcgagcgcagcagcagggccgggtcctgcgcctcgggggtcggcgtccaggctcggagcgcggcacggagacggcggcagcgctggactaggtggcaggccctgcatcatggaaactctttctaatgcaagtggtacttttgccatacgccttttaaagatactgtgtcaagataacccttcgcacaacgtgttctgttctcctgtgagcatctcctctgccctggccatggttctcctaggggcaaagggaaacaccgcaacccagatggcccaggcactgtctttaaacacagaggaagacattcatcgggctttccagtcgcttctcactgaagtgaacaaggctggcacacagtacctgctgagaacggccaacaggctctttggagagaaaacttgtcagttcctctcaacgtttaaggaatcctgtcttcaattctaccatgctgagctgaaggagctttcctttatcagagctgcagaagagtccaggaaacacatcaacacctgggtctcaaaaaagaccgaaggtaaaattgaagagttgttgccgggtagctcaattgatgcagaaaccaggctggttcttgtcaatgccatctacttcaaaggaaagtggaatgaaccgtttgacgaaacatacacaagggaaatgccctttaaaataaaccaggaggagcaaaggccagtgcagatgatgtatcaggaggccacgtttaagctcgcccacgtgggcgaggtgcgcgcgcagctgctggagctgccctacgccaggaaggagctgagcctgctggtgctgctgcctgacgacggcgtggagctcagcacggtggaaaaaagtctcacttttgagaaactcacagcctggaccaagccagactgtatgaagagtactgaggttgaagttctccttccaaaatttaaactacaagaggattatgacatggaatctgtgcttcggcatttgggaattgttgatgccttccaacagggcaaggctgacttgtcggcaatgtcagcggagagagacctgtgtctgtccaagttcgtgcacaagagttttgtggaggtgaatgaagaaggcaccgaggcagcggcagcgtcgagctgctttgtagttgcagagtgctgcatggaatctggccccaggttctgtgctgaccaccctttccttttcttcatcaggcacaacagagccaacagcattctgttctgtggcaggttctcatcgccataaagggtgcacttaccgtgcactcggccatttccctcttcctgtgtccccagatccccactacagctccaagaggatgggcctagaaagccaagtgcaaagatgagggcagattctttacctgtctgccctcatgatttgccagcatgaattcatgatgctccacactcgcttatgctacttaatcagaatcttgagaaaatagaccataatgattccctgttgtattaaaattgcagtccaaatcccataggatggcaagcaaagttcttctagaattccacatgcaattcactctggcgaccctgtgctttcctgacactgcgaatacattccttaacccgctgcctcagtggtaataaatggtgctagatattgctactattttatagatttcctggtgcttagccttataaaaaaggttgtaaaatgtacatttatattttatcttttttttttttttttttctgagacgcagtctggctctctgtcgcccaggctggagtgcagtggctcgatctcggctcactgcaagctccgcctcccgggttcacgccattctcctgcctcagcctcccgagtagctgggactacaggcgcccgccaccacgcccggctaattttttgtatttttagtagagacggggtttcaccgtgttagccaggatggtgtcgatctcctgacctcgtgatccacccgcctcggcctcccaaagtgctgggattacaggcttgagccaccgcgcccggctatattttatcttttatctttttctttgacatttaccaatcaccaagcatgcaccaaacactgctttaggcactggggacacaaaggggacagagccatcctcctttgacacctggtcttcagttctgtgcccaacgtatatagttttgacaatgaccaggttggactgtttaatgtctttcaacttaccacgtaatcctcttgtagggatcacatctttctttatgatattgtatttctctacctctaacagtaaaaattccattcaacccttaaagctcacttcaaattcttctttgagaagtttttcctttctccgcaaccagatgtacatatttgaactctctttgtacttggagggcacttctttcgtggtagttcttttatttttattaatctctgtatccttagatagtcctccaacaaccaaaggttgggactctgtcttacatatctgggtgcccctcatagtgcagtaataagtaagttgattatatacgagctatgtaacttatattttttaatggttggatatcactgagtttttttttttaagaatttttttattgaggtaaacttcacataacataaaattaactattttaaagtgagaagttcagtgccacttagtattgttaacaatgttgcataaccaccacctttatttaaagttccaaaaaaaatgttctcctctaaaaggaaaccccatcccattaagcagatactctccattccttccttcctccagcccccagcaaccaccaatctgctttctgtctctatggatttatctattcttgctattttatataaattgaattgtatgagaccttttgtgtctggcttctttcacttagtacaagtttttgagatttatttacatagtagcatgtatcaacacttcatttttatggccaaataaaattgtattatgtgtttatagcacaatttatttatccactcattcattgatggactttgggttgtttctgacttttggctattgggaatagtgctgctatgaatgtttgtgtacctgtatttgtttgaatgcctattttgcattctcttgggtatatatctaggagtggaactgctgggtcatatgttaattctatgtttagctttttgaggaacagacaaactgttttccacagcagttgaaccattccacattcccaccagcaatgtatgagaattccaatttctgtccacttcctcaccaacacttattattttccttttcctttttttaaaaaaaataagttatggccatcttagtgggtgtgaagtggtatctcattgtgttttttatttgcatttcctatgtaatgagctagaaactaaagtacaaactagatgggacatccagtccctttgatagataatgctgagtaaaaaatgagatgaaagacatttgtttgtttttagaacacgagtgacagtttgttaaaaagctttagaggaggaatgaaaacaaagtgaagtacacttagaaaagggccaagtggacatcttggatgtcaagtgcctagttcagtatcttttttttttttttttttttttttgagacagtgcctcactctgtcacccaggctggagtgtagtggcatgatctgggctcactgcaacctcctcctcctggattcaagcaattctcttgcttcagcctcccaagtagctgagactacaagcacccaccatcacacccagctaattttgtatttttcagtagagacggggtttcgccacattggccgtgttggtcttgaactcctggcctcaagcgatccgcctacctcagcctcccaaagtgctaggattacaggcataagccactgagcccagccctagttcagtatcttttatgtaaattacaaacatctgcaacattatgtatcatatgcagatacttattgcatttcttttattagtggtgaaagtgttctatgcatttattggctcttgaatttcctcatctatgaattgtcattcatacacctacttttctgcttcgtttttacatatgtctttgcctattaaagatattatccctctgttttatattttctctcattcttgtattgccttttaaattttgttatgatgtttcattaataaacagtgttttgttttcctctataaaaaaaaaaaaaaaa

SEQ ID NO: 2268 - DNA, 2381 bp, Homo Sapiens
  NM_004157
gcccgtcggtccccgcggcggcggcggctgcccagtgacagcggcggcggtgccaggtcggccgtggtagcgtagggttgcgcggcccggaaacgcagagccggccaaagagcggcgcgacgtgagccggggccgtgcgcgaagagacctcgcgggcgcggagcgaaaggccggcgtgagtgagcgcggagacagtggccgccggcggcccaacccgtctatcccttcggccgccgccggcatgagccacatccagatcccgccggggctcacggagctgctgcagggctacacggtggaggtgctgcgacagcagccgcctgacctcgtcgaattcgcagtggagtacttcacccgcctgcgcgaggcccgcgccccagcctcagtcctgcccgccgccaccccacgccagagcctgggccaccccccgccagaacccggcccggaccgtgtcgccgacgccaaaggggacagcgagtcggaggaggacgaggacttggaagttccagttcctagcagatttaatagacgagtatcagtctgtgctgagacctataaccctgatgaggaagaggaagatacagatccaagggtgattcatcctaaaactgatgaacagagatgcagacttcaggaagcttgcaaagatattctccttttcaaaaatcttgatcaggaacagctttctcaagttctcgatgccatgtttgaaaggatagtcaaagctgatgagcatgtcattgaccaaggagatgatggagacaacttttatgtcatagaacggggaacttatgacattttagtaacaaaagataatcaaacccgctctgttggtcaatatgacaaccgtggcagttttggagaactagctctgatgtacaacaccccgagagctgctaccattgttgctacctcagaaggctccctttggggactggaccgggtgacttttagaagaatcatagtgaaaaataatgcaaagaagaggaagatgtttgaatcatttattgagtctgtgcccctccttaaatcactagaggtgtcagaacgaatgaagattgtggatgtaataggagagaagatctataaggatggagaacgcataatcactcagggtgaaaaggctgatagcttttacatcatagagtctggcgaagtgagcatcttgattagaagcaggactaaatcaaacaaggatggtgggaaccaggaggtcgagattgcccgctgccataaggggcagtactttggagagcttgccctggtcaccaacaaacccagagctgcctcagcttatgcagttggagatgtcaaatgcttagttatggatgtacaagcattcgagaggcttctggggccctgcatggacatcatgaagaggaacatctcacactatgaggaacagctggtgaagatgtttggctccagcgtggatctgggcaacctcgggcagtaggtgtgccacaccccagagccttcttagtgtgacaccaaaaccttctggtcagccacagaacacatacagaaaacagacatgacagaactgttcctgccgttgccgccactgctgccattgctgtggttatgggcatttagaaaacttgaaagtcagcactaaaggatgggcagaggttcaacccacacctccactttgcttctgaaggcccattcattagaccacttgtaaagattactccaacccagtttttatatctttggttcaaaacggcatgtctctccaacaatttaagtgcctgatacaaagtccaaagtataaacatgctcctttcctctcttgctgctactcttgcttttggaagttaccacagggtctgcagaaacctgttgtataactgtagacactctctaatggttctcaaaggaggaaatgtagccttcagtctcctcatttgtcctttgaggaagtccacatttgttcacagttgcagcctttggttttacagtgggaaatggtggtggatgatatggacatatgtagcccagtggcattgtactttctgctgacagctgcacacattacagctgtctccaaacccacagtgatgcttagggaaagaccctgctcaggacccagcaggtcagcaccccagagcagactgataggtccgtgggacccatgttagagcagaaaatttgggctcagcacattttactgttagtagagagccaggaaacgttttctgggttggggattttgtgggattttttaatttttttagtaggttttgtttaacctctgtgcagtttgtatgaatgaattgctatacatttataaggagccagggtctggagggttgctatcactttgtccagcccaaataccttcctgggcaactcctaccatttgtttgcagttgcct

SEQ ID NO: 2269 - DNA, 2648 bp, Homo Sapiens
  NM_004161
caggtacgcatgccccagaggcgcggcgcttggcgggaagctgagtcctggccttgcgtcgcactgtctgtcctcagctcgcgtagccgcgctcgcgactccctttcccggcatgccaggcggtgcggccgccctctgggccgtgtaaaggcccctcggtctaaggcttccctatttcctggttcgccggcggccattttgggtggaagcgatagctgagtggcggcggctgctgattgtgttctaggggacggagtaggggaagacgtttgctctcccggaacagcctatctcattcctttctttcgattacccgtggcgcggagagtcagggcggcggctgcggcagcaagggcggcggtggcggcggcggcagctgcagtgacatgtccagcatgaatcccgaatatgattatttattcaagttacttctgattggcgactcaggggttggaaagtcttgccttcttcttaggtttgcagatgatacatatacagaaagctacatcagcacaattggtgtggatttcaaaataagaactatagagttagacgggaaaacaatcaagcttcaaatatgggacacagcaggccaggaaagatttcgaacaatcacctccagttattacagaggagcccatggcatcatagttgtgtatgatgtgacagatcaggagtccttcaataatgttaaacagtggctgcaggaaatagatcgttatgccagtgaaaatgtcaacaaattgttggtagggaacaaatgtgatctgaccacaaagaaagtagtagactacacaacagcgaaggaatttgctgattcccttggaattccgtttttggaaaccagtgctaagaatgcaacgaatgtagaacagtctttcatgacgatggcagctgagattaaaaagcgaatgggtcccggagcaacagctggtggtgctgagaagtccaatgttaaaattcagagcactccagtcaagcagtcaggtggaggttgctgctaaaatttgcctccatccttttctcacagcaatgaatttgcaatctgaacccaagtgaaaaaacaaaattgcctgaattgtactgtatgtagctgcactacaacagattcttaccgtctccacaaaggtcagagattgtaaatggtcaatactgactttttttttattcccttgactcaagacagctaacttcattttcagaactgttttaaacctttgtgtgctggtttataaaataatgtgtgtaatccttgttgctttcctgataccagactgtttcccgtggttggttagaatatattttgttttgatgtttatattggcatgtttagatgtcaggtttagtcttctgaagatgaagttcagccattttgtatcaaacagcacaagcagtgtctgtcactttccatgcataaagtttagtgagatgttatatgtaagatctgatttgctagttcttccttgtagagttataaatggaaagattacactatctgattaatagtttcttcatactctgcatataatttgtggctgcagaatattgtaatttgttgcacactatgtaacaaaacaactgaagatatgtttaataaatattgtacttattggaagtaatatcaaactgtatggtgataagtattgttttgattcttatggttaaagggaaatagagccttgcattatattcaacacagccatttgtgtgtgcacaatgcaaactaaggtattctagacctatcttagagcagcatccagtatttgctttctagataatatgcccaataacatgacctagaggggcttctgtgctgtgtagggatttaaccaacttcagtggttcagggagctcaaactatatgtaaaacaagtttagaatgtatgctatctagcccgttatctctgatccttctctaaaaccatttgaaatagcttcattgatcaacatttcataaatgcatctgtggtagaggtagaaagcagcacctttcctaattggcaaatgatcagactaatgtgtgctaatgtttttcttccatgctttcagtcagattcaactattttatcctccacagttgcttaacttggtgttggaggagggtttaagcattaagataggaagcaggaaatttgattgctctaaatttagaaattatatccctaaaaattaaaacatgaatactgggtggtaatgataattgaggcaaatgtatttattttggtgacattttgcatatatgaagattttctgaaataggaccttcaagatcctagggggttttgtttggtttttaattgtgaggaataaaaaatcttctgcccacactggcattttaaggtgactgaggtcaaacgttgtttccttaggttgaaatagcagccaaaacattcttcacgcaggggcttgggatatggctgctggcaacacattttgttgtgggctccttaatttaatgataaaatttaagctaaacacaagccaaaaatgaataggtttttttaatttttatttttcactaaacaggcaattgaaatacatggtacaaaaataagtggtaagataattgtaaaatgaaatggacagaatattcaattttccatctatgaaaatttcacaataaaaatcatagtttactttgtaaaaaa

SEQ ID NO: 2270 - DNA, 2548 bp, Homo Sapiens
  NM_004162
aagtgacgaagtggcgcagttcgctgcgtgcagcgacgtggcggcggggccggcaccgggcagcggaagtggctccggcggtgggacttgagtgtttgtgttttggttcgtgaaggagccggcggctggccttaggggaggaggcagagggaggaggaggaggaagaattagtcggaactccagcgccggcggcggcggcggcggcggaggaggagaaaggaaagaggaagggggagcggcgagaggcggagacggagcccgacaggggcggcaccacggcacgagccccgcacagtccagtgtgaggggagcggcgctaagagcaggcgacgccgccgccgccaccaccaccgccatagatacactctcatcctacgggccacgcctgggccttgctgccaggaagcttcggccccgcagctcggcttgctgcggtctcaggtttctttacctccagaaagaagaatattggccccttgaattctggaagttcattgaagagtctgaaattagggacttatttcaaatttggacatggctagtcgaggcgcaacaagacccaacgggccaaatacgggaaataaaatatgccagttcaaactagtacttctgggagagtccgctgttggcaaatcaagcctagtgcttcgttttgtgaaaggccaatttcatgaatttcaagagagtaccattggggctgcttttctaacccaaactgtatgtcttgatgacactacagtaaagtttgaaatatgggatacagctggtcaagaacgataccatagcctagcaccaatgtactacagaggagcacaagcagccatagttgtatatgatatcacaaatgaggagtcctttgcaagagcaaaaaattgggttaaagaacttcagaggcaagcaagtcctaacattgtaatagctttatcgggaaacaaggccgacctagcaaataaaagagcagtagatttccaggaagcacagtcctatgcagatgacaatagtttattattcatggagacatccgctaaaacatcaatgaatgtaaatgaaatattcatggcaatagctaaaaaattgccaaagaatgaaccacaaaatccaggagcaaattctgccagaggaagaggagtagaccttaccgaacccacacaaccaaccaggaatcagtgttgtagtaactaaacctctagtttgaactagctggaatagtcttctgcttcctaaatgttaataacaatggaattggagcatttaaccagcccagtatgacttccaaaagaagagacttatgatagagtcaagtttctaatacagaattattttaagtgttttgaacttaatttttaataacatgcatgggtccctctcactaatgtttcaacaatagggaaaaatgagaactatgtggacacttgtttcattggaaggttagggggaataatttctcatcactaggaatatagacaaatgactgtctgggcccacacagttaaccagcccatttctccacactggtacagtagtcacctgtgaaaaaaaaattggaacttactaatttgggcttttcaaaaacattctttgtttagaaggagattctaaagttatttatgatgcttagccatagtattcaggcaaatgttcatttctcctggtacctgtatttaaaatgtacattccacattttaataaattaaccacaagaaaataatcccacatatacaaggtcaggggtggggaagagtattaatggtatcttaattatacccagtctggttttttttttttaaatggggtaaaaatcaaatgcaaccccatcttgttttaggaattttgagaactaataaatgcaccttaatggtcagtgttcctttcaaacatgtgagttctttaacaaaaatgaaataaaccaggtgtctgtgatttctaattaatcaccgctggccattacacaggttttgttgtttggggtggggagggggcttttgttcccttttgacataatatagtcaatgcactaacaattatgtatattcaaacttgattattttaaattcgatcttcagctgtactgtaaatagggtactgcattgtagtctccatatctgtattacttttctgtaatatttaagagttgcttaaaagcatacaaaatgtactgttactaaaacagctaattatttctctctccccctttgacaggaaggggcttcagttgttcctccatggctagaaccataataaacaatgtacccgtaatttgtaacataaagtattgcaatatgttagtaacaatcttgcagccttcctttccaaagttcattttattttgatcagttcagtatattgcactaattattttaggtattttcattatatgaaagctaccatgtgtcagagatgatttaatctatttaagtgttggactgctaggagaacttgtacatttatgataatgcagaattaggaaaacggttcaccagtgtttagttttatattgaggtgctcaggttggaataaagtggtataaaaagcaaaaaaaaaaaaaaa

SEQ ID NO: 2271 - DNA, 2405 bp, Homo Sapiens
  NM_004168
tccggcgtggtgcgcaggcgcggtatcccccctcccccgccagctcgaccccggtgtggtgcgcaggcgcagtctgcgcagggactggcgggactgcgcggcggcaacagcagacatgtcgggggtccggggcctgtcgcggctgctgagcgctcggcgcctggcgctggccaaggcgtggccaacagtgttgcaaacaggaacccgaggttttcacttcactgttgatgggaacaagagggcatctgctaaagtttcagattccatttctgctcagtatccagtagtggatcatgaatttgatgcagtggtggtaggcgctggaggggcaggcttgcgagctgcatttggcctttctgaggcagggtttaatacagcatgtgttaccaagctgtttcctaccaggtcacacactgttgcagcacagggaggaatcaatgctgctctggggaacatggaggaggacaactggaggtggcatttctacgacaccgtgaagggctccgactggctgggggaccaggatgccatccactacatgacggagcaggcccccgccgccgtggtcgagctagaaaattatggcatgccgtttagcagaactgaagatgggaagatttatcagcgtgcatttggtggacagagcctcaagtttggaaagggcgggcaggcccatcggtgctgctgtgtggctgatcggactggccactcgctattgcacaccttatatggaaggtctctgcgatatgataccagctattttgtggagtattttgccttggatctcctgatggagaatggggagtgccgtggtgtcatcgcactgtgcatagaggacgggtccatccatcgcataagagcaaagaacactgttgttgccacaggaggctacgggcgcacctacttcagctgcacgtctgcccacaccagcactggcgacggcacggccatgatcaccagggcaggccttccttgccaggacctagagtttgttcagttccaccctacaggcatatatggtgctggttgtctcattacggaaggatgtcgtggagagggaggcattctcattaacagtcaaggcgaaaggtttatggagcgatacgcccctgtcgcgaaggacctggcgtctagagatgtggtgtctcggtccatgactctggagatccgagaaggaagaggctgtggccctgagaaagatcacgtctacctgcagctgcaccacctacctccagagcagctggccacgcgcctgcctggcatttcagagacagccatgatcttcgctggcgtggacgtcacgaaggagccgatccctgtcctccccaccgtgcattataacatgggcggcattcccaccaactacaaggggcaggtcctgaggcacgtgaatggccaggatcagattgtgcccggcctgtacgcctgtggggaggccgcctgtgcctcggtacatggtgccaaccgcctcggggcaaactcgctcttggacctggttgtctttggtcgggcatgtgccctgagcatcgaagagtcatgcaggcctggagataaagtccctccaattaaaccaaacgctggggaagaatctgtcatgaatcttgacaaattgagatttgctgatggaagcataagaacatcggaactgcgactcagcatgcagaagtcaatgcaaaatcatgctgccgtgttccgtgtgggaagcgtgttgcaagaaggttgtgggaaaatcagcaagctctatggagacctaaagcacctgaagacgttcgaccggggaatggtctggaacacggacctggtggagaccctggagctgcagaacctgatgctgtgtgcgctgcagaccatctacggagcagaggcacggaaggagtcacggggcgcgcatgccagggaagactacaaggtgcggattgatgagtacgattactccaagcccatccaggggcaacagaagaagccctttgaggagcactggaggaagcacaccctgtcctatgtggacgttggcactgggaaggtcactctggaatatagacccgtgatcgacaaaactttgaacgaggctgactgtgccaccgtcccgccagccattcgctcctactgatgagacaagatgtggtgatgacagaatcagcttttgtaattatgtataatagctcatgcatgtgtccatgtcataactgtcttcatacgcttctgcactctggggaagaaggagtacattgaagggagattggcacctagtggctgggagcttgccaggaacccagtggccagggagcgtggcacttacctttgtcccttgcttcattcttgtgagatgataaaactgggcacagctcttaaataaaatataaatgaacaaactttcttttatttccaaaaaaaaaaaaaaaaaa

SEQ ID NO: 2272 - DNA, 2540 bp, Homo Sapiens
  NM_004169
gcctggcgcgcagagtgcaccttcctgagctcgagcggtccagcgccaagttcggggtttggggttggagcggctggtcacgtggctggcccgcggcggtgcgcggggcgttgggtcagcgggtctgggactggtggcaccggcggcggcgtaggacggaggcgtcgctaggcagcttcgaaccagtgcaatgacgatgccagtcaacggggcccacaaggatgctgacctgtggtcctcacatgacaagatgctggcacaacccctcaaagacagtgatgttgaggtttacaacatcattaagaaggagagtaaccggcagagggttggattggagctgattgcctcggagaatttcgccagccgagcagttttggaggccctaggctcttgcttaaataacaaatactctgaggggtacccgggccagagatactatggcgggactgagtttattgatgaactggagaccctctgtcagaagcgagccctgcaggcctataagctggacccacagtgctggggggtcaacgtccagccctactcaggctcccctgcaaactttgctgtgtacactgccctggtggaaccccatgggcgcatcatgggcctggaccttccggatgggggccacctgacccatgggttcatgacagacaagaagaaaatctctgccacgtccatcttctttgaatctatgccctacaaggtgaacccagatactggctacatcaactatgaccagctggaggagaacgcacgcctcttccacccgaagctgatcatcgcaggaaccagctgctactcccgaaacctggaatatgcccggctacggaagattgcagatgagaacggggcgtatctcatggcggacatggctcacatcagcgggctggtggcggctggcgtggtgccctccccatttgaacactgccatgtggtgaccaccaccactcacaagaccctgcgaggctgccgagctggcatgatcttctacaggaaaggagtgaaaagtgtggatcccaagactggcaaagagattctgtacaacctggagtctcttatcaattctgctgtgttccctggcctgcagggaggtccccacaaccacgccattgctggggttgctgtggcactgaagcaagctatgactctggaatttaaagtttatcaacaccaggtggtggccaactgcagggctctgtctgaggccctgacggagctgggctacaaaatagtcacaggtggttctgacaaccatttgatccttgtggatctccgttccaaaggcacagatggtggaagggctgagaaggtgctagaagcctgttctattgcctgcaacaagaacacctgtccaggtgacagaagcgctctgcggcccagtggactgcggctggggaccccagcactgacgtcccgtggacttttggaaaaagacttccaaaaagtagcccactttattcacagagggatagagctgaccctgcagatccagagcgacactggtgtcagagccaccctgaaagagttcaaggagagactggcaggggataagtaccaggcggccgtgcaggctctccgggaggaggttgagagcttcgcctctctcttccctctgcctggcctgcctgacttctaaaggagcgggcccactctggacccacctggcgccacagaggaagctgcctgccggaggacccccacctgagagatggatgagctgctccaaaggggaactgttgacactcgggccctttgagggggtttcttttggacttttttcatgttttcttcacaaatcaaaatttgtttaagtctcattgttagtaattctgggacaggttattaaaggatttaaatttgaacctggctttctcacagctggacataattctaggaaaataaaatactatgtcgccacttggtcataatcatttagatggtggtgtagggcaaagctgttagaaagattgtagcgttttactctccctgggctttcctccgccttgctgcaacagagaggaaatgcccatgtccacagcttgtacacactgccccctcactatcttgttatccagtggcatgccaaaggagaactgaattagcttctgaggcttctgctgtaaatcagaagtgtatgttagtcaagagtaaacaagatgcacccagtatggtgggagggttttgctgtcagtagctcaaagtatggtgtagaaatggcctcctccctccatcctgggaagtcccagtcccatcctggtgtgagaatcaaccaggctttcctgctccacctgagataaccaactccctcccgtaatcaggaagccaaatgtcaccttcccaaagaaattttattttcacgtagctgaagtgcaaaacatagatgaccatttttaataagcacaatcaaatttttaaccacagaatgtctacaagaattatagctttaaaaaatacaaccaatttttatatttcaaaaatatttgaactcaaataaattaatttcttaaaaagtaaaaaaaaaaaaaaaaaaaaaa

SEQ ID NO: 2273 - DNA, 4188 bp, Homo Sapiens
  NM_004172
gctttatttttcaattcttcctagtcccggttttgcatttctaatgacagtgaactgacaaagcgtgaaagtggtctaaggagcaaaacaaagccagcaagcctgcttctggtgtgccaagattaatcaatattccagaaacctcggggtttccccctcctccctgtgcggtttccattccccactcctcctttcccgggcacagactcctccccttttcttaagttgccctgatagtaacttgcagtttcagagcacatgcacactgtcagggctagcctgcctgcttacgcgcgctgcggattgttgctccgttgtacctgctggggaattcacctcgttactgcttgatatcttccaccccttacaaaatcagaaaagttgtgttttctaataccaaagaggaggtttggctttctgtgggtgattcccagacactgaagtgcaaagaagagaccctcctagaaaagtaaaatatgactaaaagcaatggagaagagcccaagatggggggcaggatggagagattccagcagggagtccgtaaacgcacacttttggccaagaagaaagtgcagaacattacaaaggaggatgttaaaagttacctgtttcggaatgcttttgtgctgctcacagtcaccgctgtcattgtgggtacaatccttggatttaccctccgaccatacagaatgagctaccgggaagtcaagtacttctcctttcctggggaacttctgatgaggatgttacagatgctggtcttaccacttatcatctccagtcttgtcacaggaatggcggcgctagatagtaaggcatcagggaagatgggaatgcgagctgtagtctattatatgactaccaccatcattgctgtggtgattggcataatcattgtcatcatcatccatcctgggaagggcacaaaggaaaacatgcacagagaaggcaaaattgtacgagtgacagctgcagatgccttcctggacttgatcaggaacatgttccctccaaatctggtagaagcctgctttaaacagtttaaaaccaactatgagaagagaagctttaaagtgcccatccaggccaacgaaacgcttgtgggtgctgtgataaacaatgtgtctgaggccatggagactcttacccgaatcacagaggagctggtcccagttccaggatctgtgaatggagtcaatgccctgggtctagttgtcttctccatgtgcttcggttttgtgattggaaacatgaaggaacaggggcaggccctgagagagttctttgattctcttaacgaagccatcatgagactggtagcagtaataatgtggtatgcccccgtgggtattctcttcctgattgctgggaagattgtggagatggaagacatgggtgtgattggggggcagcttgccatgtacaccgtgactgtcattgttggcttactcattcacgcagtcatcgtcttgccactcctctacttcttggtaacacggaaaaacccttgggtttttattggagggttgctgcaagcactcatcaccgctctggggacctcttcaagttctgccaccctacccatcaccttcaagtgcctggaagagaacaatggcgtggacaagcgcgtcaccagattcgtgctccccgtaggagccaccattaacatggatgggactgccctctatgaggctttggctgccattttcattgctcaagttaacaactttgaactgaacttcggacaaattattacaatcagcatcacagccacagctgccagtattggggcagctggaattcctcaggcgggcctggtcactatggtcattgtgctgacatctgtcggcctgcccactgacgacatcacgctcatcatcgcggtggactggttcctggatcgcctccggaccaccaccaacgtactgggagactccctgggagctgggattgtggagcacttgtcacgacatgaactgaagaacagagatgttgaaatgggtaactcagtgattgaagagaatgaaatgaagaaaccatatcaactgattgcacaggacaatgaaactgagaaacccatcgacagtgaaaccaagatgtagactaacataaagaaacactttcttgagcaccaggtgttaaaaaccattataaaatctttccatctcattacagctcattcgctccagcaagcccgtcatcttccctttcctcccttctgataagactggaaaatagtcctccaaaacacaagggaggattttgggtggccaaagtgtacaattttcatcccacaattgaaatttttaaatcatttcatgttagtcttaccgaataaggtaccaagatcacaaatagtgttgatcagatcttacaagtttatgtggcacacaatcctataaatgtgatttttttatataagttaaagagacaaatagtaggctaaaaacattttaaaatcaacttttgaaatttaaaaatctttcagaatacaattcagttttagtttcaaaatgttaacaacttgaattacaaccggttatcagttggacagtaagattttatccctttctcttctgactggtatacctatttcattagtagctaggtgcacatatacatctagcacagctgtgaggacagacagaaggcaaagtttccatgtggccttgagcaagtcccatctcacctctaggcctcagtgtcctcatctataaaatgagggacttccctagaagtcttcatggtctcttccagcccagacatcctgtgatgtcatgaaagcacctgccctctgtttcccctcagaacaccctgtaccatccatggagcacgaggccttcagaaaagacacttcaatgggagtgaacatttctaactaaggacaggatggctgtgtgtggtggtcaccaggtcctgtgagcaaagtgcaggttatgcaagtcgccaggcaggaggccattccaggagtgggattattcatcaaactctttgcccagttcatcccaatgggggaagtattcccttctttcctactctgggaagaatgtctcctgccactcctcaactgatgatagacttcgaaaacagatgagaagactagcagctagcaagggtgcttgtggtcacactgtggaacactaaagagctaggaaagagttgagcacaggcaacattacaaacaaaggatttgaaaacaccaagagtacaggtcttctttaaggaagaataaaaaagaagaggttcatttttctggctttttttttcacctgaaacactttttctcgagtccaaaatcattccccccgtgaagtctgcttaccaaaacataagacgacttatatatttgaaagaagtcaaatgaatgagctctctaatagaagtccatgagttgagtgggtatttcttatttgaaagtgtttttctttaatcaaaagtccttagaatgagggaaacaaaatatttatttgttttggaatcccacttatcaaatcattcaaaactttcagctggagtggggtttgcttttgttttgtttgtgtccataagagaaatggtagaagatgaatcagtatgaagacactgtcaatgaggttatgagaaaaaaacagcaggggcattagtttcaggcaaggcagctcccaggtttagagattaatttttaccccctaaggaatatccagtcaaagacgctgagtgggagctgtcaggcagtagcagctgtgtttgagtttctggctgaaaatggtgaagaatggacttaattatgctaacaaactgaaaaatctagacatagatcctctgatatacaattagagatatttttatatagaccccaagcattctgtgcataaaagttaacattaggctgtggtgcagtaaccatttaatgtcgaggctctatttcggaaatacactacaaatgttaaagtacgtggctgtcctcttaagacactagtagagcaaagacttaatcatatcaacttaattctgttacacaatatgtgttttttaatatactaaccatttcttatggaaaggtcctgtggggagcccatcctctcgccaagccatcacaggctctgcatacacatgcactcagtgtggactgggaagcattactttgtagatgtattttcaataaagaaaaaaatagttttacattaaaaaaaaaaaaaaaaaaaa

SEQ ID NO: 2274 - DNA, 1385 bp, Homo Sapiens
  NM_004175
gggaagtcctggcccttggcccaacctcctgctgtccccggtctgagggcccaagccccgcgtctccgccttgccgtccagcctgtccttggtgtggggtgcttggaagtgtgagcaccctctctggctctttgccggccccaagggtcgttgcggcggcccccgggcccagtcatcagccctcttttccggtgccggaactatcgtactggtgccctagtttcccagccggcaggcggagtgaggaggaagcggaggcgagaccgcgctcaacactggggaaaggaaggaggcgggccctgcgcgcagcattttgggaaagagtggaattctgggtgttaggcccgccattcgcttgactcacgccttcgccgtagcatctttcgcagcggaccgaagagaagaaaagtaggccagagccgaactctcttcctgccaagatgtctattggtgtgccgattaaagtactgcatgaggccgagggccacattgtgacatgtgagacgaacaccggtgaggtatatcgggggaagctcattgaagcagaggacaacatgaactgccagatgtccaacatcacagtcacatacagagatggccgagtggcacagctggagcaggtatacatccgtggcagcaaaatccgctttctgattttgcctgacatgctgaagaacgcacccatgttaaagagcatgaaaaataaaaaccaaggctcaggggctggccgaggaaaagctgctattctcaaggcccaagtggccgcaagaggaagaggacgtggaatgggacgtggaaacatctttcaaaagcgaagataattttctaagttgaacagaactttgtccttttttctttcaggttatctgagttcattggagtgggtgcttgtgcatatatgctaggtatcttttgccatctttctctttagatcaggggaaatgtttaagctaaataaatctggggggttttttgttctgttttgttttgttttctttgagaaaataaggactttgtgttcatttgaagtttgctttggctaaattttgacaccctgggggatgtcctgggagaatgccagtactttgaaatagcacagctattgatgagattttaagctgctgttcctggccagttgcaggttaagccccagaaaagttcaccttggagaagctccgagaacacacagattgtgtctcattcatcttcagacacaggcacatagtgtggcactttgttcagttaacatttgtggagctgtcatcagctcagctttaacaacacaggtgactctttcccttgataaagtcataggtaattcaggggctgggtgcggcggctcacgcatgtaatcccagcactttgggaggccaaggcgggcggat

SEQ ID NO: 2275 - DNA, 4922 bp, Homo Sapiens
  NM_004176
agcagagctgcggccgggggaacccagtttccgaggaacttttcgccggcgccgggccgcctctgaggccagggcaggacacgaacgcgcggagcggcggcggcgactgagagccggggccgcggcggcgctccctaggaagggccgtacgaggcggcgggcccggcgggcctcccggaggaggcggctgcgccatggacgagccacccttcagcgaggcggctttggagcaggcgctgggcgagccgtgcgatctggacgcggcgctgctgaccgacatcgaagacatgcttcagcttatcaacaaccaagacagtgacttccctggcctatttgacccaccctatgctgggagtggggcagggggcacagaccctgccagccccgataccagctccccaggcagcttgtctccacctcctgccacattgagctcctctcttgaagccttcctgagcgggccgcaggcagcgccctcacccctgtcccctccccagcctgcacccactccattgaagatgtacccgtccatgcccgctttctcccctgggcctggtatcaaggaagagtcagtgccactgagcatcctgcagacccccaccccacagcccctgccaggggccctcctgccacagagcttcccagccccagccccaccgcagttcagctccacccctgtgttaggctaccccagccctccgggaggcttctctacaggaagccctcccgggaacacccagcagccgctgcctggcctgccactggcttccccgccaggggtcccgcccgtctccttgcacacccaggtccagagtgtggtcccccagcagctactgacagtcacagctgcccccacggcagcccctgtaacgaccactgtgacctcgcagatccagcaggtcccggtcctgctgcagccccacttcatcaaggcagactcgctgcttctgacagccatgaagacagacggagccactgtgaaggcggcaggtctcagtcccctggtctctggcaccactgtgcagacagggcctttgccgaccctggtgagtggcggaaccatcttggcaacagtcccactggtcgtagatgcggagaagctgcctatcaaccggctcgcagctggcagcaaggccccggcctctgcccagagccgtggagagaagcgcacagcccacaacgccattgagaagcgctaccgctcctccatcaatgacaaaatcattgagctcaaggatctggtggtgggcactgaggcaaagctgaataaatctgctgtcttgcgcaaggccatcgactacattcgctttctgcaacacagcaaccagaaactcaagcaggagaacctaagtctgcgcactgctgtccacaaaagcaaatctctgaaggatctggtgtcggcctgtggcagtggagggaacacagacgtgctcatggagggcgtgaagactgaggtggaggacacactgaccccacccccctcggatgctggctcacctttccagagcagccccttgtcccttggcagcaggggcagtggcagcggtggcagtggcagtgactcggagcctgacagcccagtctttgaggacagcaaggcaaagccagagcagcggccgtctctgcacagccggggcatgctggaccgctcccgcctggccctgtgcacgctcgtcttcctctgcctgtcctgcaaccccttggcctccttgctgggggcccgggggcttcccagcccctcagataccaccagcgtctaccatagccctgggcgcaacgtgctgggcaccgagagcagagatggccctggctgggcccagtggctgctgcccccagtggtctggctgctcaatgggctgttggtgctcgtctccttggtgcttctctttgtctacggtgagccagtcacacggccccactcaggccccgccgtgtacttctggaggcatcgcaagcaggctgacctggacctggcccggggagactttgcccaggctgcccagcagctgtggctggccctgcgggcactgggccggcccctgcccacctcccacctggacctggcttgtagcctcctctggaacctcatccgtcacctgctgcagcgtctctgggtgggccgctggctggcaggccgggcagggggcctgcagcaggactgtgctctgcgagtggatgctagcgccagcgcccgagacgcagccctggtctaccataagctgcaccagctgcacaccatggggaagcacacaggcgggcacctcactgccaccaacctggcgctgagtgccctgaacctggcagagtgtgcaggggatgccgtgtctgtggcgacgctggccgagatctatgtggcggctgcattgagagtgaagaccagtctcccacgggccttgcattttctgacacgcttcttcctgagcagtgcccgccaggcctgcctggcacagagtggctcagtgcctcctgccatgcagtggctctgccaccccgtgggccaccgtttcttcgtggatggggactggtccgtgctcagtaccccatgggagagcctgtacagcttggccgggaacccagtggaccccctggcccaggtgactcagctattccgggaacatctcttagagcgagcactgaactgtgtgacccagcccaaccccagccctgggtcagctgatggggacaaggaattctcggatgccctcgggtacctgcagctgctgaacagctgttctgatgctgcgggggctcctgcctacagcttctccatcagttccagcatggccaccaccaccggcgtagacccggtggccaagtggtgggcctctctgacagctgtggtgatccactggctgcggcgggatgaggaggcggctgagcggctgtgcccgctggtggagcacctgccccgggtgctgcaggagtctgagagacccctgcccagggcagctctgcactccttcaaggctgcccgggccctgctgggctgtgccaaggcagagtctggtccagccagcctgaccatctgtgagaaggccagtgggtacctgcaggacagcctggctaccacaccagccagcagctccattgacaaggccgtgcagctgttcctgtgtgacctgcttcttgtggtgcgcaccagcctgtggcggcagcagcagcccccggccccggccccagcagcccagggcaccagcagcaggccccaggcttccgcccttgagctgcgtggcttccaacgggacctgagcagcctgaggcggctggcacagagcttccggcccgccatgcggagggtgttcctacatgaggccacggcccggctgatggcgggggccagccccacacggacacaccagctcctcgaccgcagtctgaggcggcgggcaggccccggtggcaaaggaggcgcggtggcggagctggagccgcggcccacgcggcgggagcacgcggaggccttgctgctggcctcctgctacctgccccccggcttcctgtcggcgcccgggcagcgcgtgggcatgctggctgaggcggcgcgcacactcgagaagcttggcgatcgccggctgctgcacgactgtcagcagatgctcatgcgcctgggcggtgggaccactgtcacttccagctagaccccgtgtccccggcctcagcacccctgtctctagccactttggtcccgtgcagcttctgtcctgcgtcgaagctttgaaggccgaaggcagtgcaagagactctggcctccacagttcgacctgcggctgctgtgtgccttcgcggtggaaggcccgaggggcgcgatcttgaccctaagaccggcggccatgatggtgctgacctctggtggccgatcggggcactgcaggggccgagccattttggggggcccccctccttgctctgcaggcaccttagtggcttttttcctcctgtgtacagggaagagaggggtacatttccctgtgctgacggaagccaacttggctttcccggactgcaagcagggctctgccccagaggcctctctctccgtcgtgggagagagacgtgtacatagtgtaggtcagcgtgcttagcctcctgacctgaggctcctgtgctactttgccttttgcaaactttattttcatagattgagaagttttgtacagagaattaaaaatgaaattatttataatctgggttttgtgtcttcagctgatggatgtgctgactagtgagagtgcttgggccctcccccagcacctagggaaaggcttcccctccccctccggccacaaggtacacaacttttaacttagctcttcccgatgtttgtttgttagtgggaggagtggggagggctggctgtatggcctccagcctacctgttccccctgctcccagggcacatggttgggctgtgtcaacccttagggcctccatggggtcagttgtcccttctcacctcccagctctgtccccatcaggtccctgggtggcacgggaggatggactgacttccaggacctgttgtgtgacaggagctacagcttgggtctccctgcaagaagtctggcacgtctcacctcccccatcccggcccctggtcatctcacagcaaagaagcctcctccctcccgacctgccgccacactggagagggggcacaggggcgggggaggtttcctgttctgtgaaaggccgactccctgactccattcatgcccccccccccagcccctcccttcattcccattccccaacctaaagcctggcccggctcccagctgaatctggtcggaatccacgggctgcagattttccaaaacaatcgttgtatctttattgacttttttttttttttttttctgaatgcaatgactgttttttactcttaaggaaaataaacatcttttagaaacaaaaaaaaaaaa

SEQ ID NO: 2276 - DNA, 6498 bp, Homo Sapiens
  NM_004177
agcttgtccccgcctagcaaggagtcggctaagaactggatcctagcgaggagcccggcacagacagcgaatgaccgcagccagacagtcgctcttgctcttcctcggccctgcggcaggatccgccggtgcaggggcctctccccggactccacgcgtgtctggagggctctcgggttagggaagggggctttggagacgccccgggcggccgggcggtggcgggacgcgggccctttaagaaggagcgaggggcgcggccaggtaggggcgggtccagggcggatcagcgctgcgccggcgccggcccgggagccggatttggagcgcgaggcgccggtgggggcggagggggctgcgcggcggaggctcccgtggcctcggacgctcctcctagctagcggccgccgcccgccgccgcctgcgcctccagctccttcgccccggcgggcccggccgccgcttccggcagctcacctgggaagcgctcacctgggacgcgctcacctgggacgcgctacctgcctccgggcgcctgggcttcaggatgaaggaccgtctggagcagctgaaggccaagcagctgacacaggatgatgatactgatgcggttgagattgctatcgacaacacggcttttatggacgagttcttttctgagattgaggaaactcggcttaacattgacaagatctcagaacatgtagaggaggctaagaaactctacagtatcattctctctgcaccgattccagagccaaaaaccaaggatgacctagagcagctcacgactgagattaagaaaagggccaacaacgtccggaacaaactgaagagcatggagaagcatattgaagaagatgaggtcaggtcatcggcagaccttcggattcggaaatcccagcactctgtcctttctcggaagtttgtggaggtgatgaccaaatacaatgaagctcaagtggacttccgagaacgcagcaaagggcgaatccagcggcagctcgaaattactggcaaaaagacaaccgatgaggagctggaggagatgttggagagtggcaacccggccatcttcacttctgggatcattgactcacagatttccaagcaagccctcagtgagattgagggacgacacaaggacattgtgaggctggagagcagcatcaaggagcttcacgacatgtttatggacatcgccatgctggtggagaatcagggtgagatgttagataacatagagttgaatgtcatgcacacagtggaccacgtggagaaggcacgagatgaaacgaaaaaagctgtgaaataccagagtcaggcccggaagaaattgataattatcattgtgctagtagttgtgttgctgggcattttagcattgattattggactttccgttgggctgaattaagagtggcctaagaggctgctgcactgaaataaactgatttcactccagactggtgtggccacccttgtcttcagatgagaatggagtctgaatggccttcctgagagcgagtgcgacccgttcctttgtttccttgcaaccacccttggacctgactcagctaacaatctagccctgggggaatgtgatctacctgatgcgaccctgagttctccccagagcctcctcctgccccaccagctctcaagtaccttttctcctggactgtgtggacccacccagctttcttcctccctgttgtgtgtcagattatgccttgcacttgggaaagctcttgtgagactctcccaaggtgctgtatttttctacctcatggagtattctcccagaaactgcaatgtatttttttaggggagtatctttaacaaagcagaatgattcttctaagtttggcaacaagaaggcttggatctgagtcttctacctggcaggatgccaatcctgtttgttgtccgtatgtcctgaaaacatgagggactggcagatgtcattttggtctaaagagctgacttgtttgaaattcagccttaaattaagctcttagttgttcagcttggggggcaactttgatttttctctgtgttgtagtctctcatatttactcaaggagggaccaggatgatacagtcatctgaggttatgctttgcaaaaggctgacggtatggaatatgtttccatgtctgagtcttagaaactggctgctcattgttagaaagtgatgctttgtgagactattgtcttggggccaaaaataatcagggattttaaattgggcaagggacaaggtgctagaatcctaagctctggaaatatttcatgacactggtgtattcactcatgtgttccagatgtattctaattgtgtatgaaatgtatgtacacataagtgtgtgtgtctcaggaagtaggaaataaaaatggaagctattatgacctcaaaaaaaaaaagccaactttgagctaggataaaaattgggtaaaggacatttgcttacctgcaaatgaatcactgtggaaatgtgatcttcccatatcatcaagaaacttgttttctggatgaatactgggagaataaaatgagaactctggagtgagctaaattgatcccaattaagtttttctgcttagcagacagaaggtataattttttgacaccctttcccacctggtgcctatgctaggcttgtcctgagaacatccctcagtaacttgatattcacatgacctacaggatgtcccatctgcagggctgagtcagttggggaacaccagaggctacacagtagctcttcctgctactcggttaatgagcttggcaggttctttgtctcactgaattcttatcatggaaacagcagcagcagccgctaggaaatcttcaagtgtagtgtctgtgctaacccagtggtaaatcccttagatcccctgctggtctctggcagtctccttgattttgggtaccatgtatattttccgctttgactttaacgctttctaggatagggtaagcacccttaattcaggcactgtccattagcttcctttgcaaaggctacttatggccggtcacaatccagcactcagacagagccaaggcaatatcctcttgcccatggctatgatgtcagacagtggatgggctccagcaacaagagacaaaataactaaaggcctttgctctcctctgacattgaggcctggggcttacagtttggaatacaacatgtgaaggtttttgttgttgtttgtattttttagatgtaaacttgattattttattgctaatttaaaaataaaaatgactttgtattgattgtgaaacggttctggctctgtctcgatgcagaaacacaatgatctggtgccaccatgtggtgatttttattcaggttttagaatgcagttcacacctttttaagccatgtgctggatcagatggttcaaaagtgcaatttttgaacatggtttaactcccacagaatgcagtgtaactatgtttgtgtttcagatttgaggtgttccccccaaaagaatttggttcagtccttgggagtatctggctttaggaggaaatgggggagatctgtcacgatgttatctagaaggtggaatgaccataccaaacatccttttaatctaacttgaatgtctcaccaaaaataacatttctgttggcattctgggtcctagaagccagatccatctcctttttccttctgttgctctcttccttcacaccctcttccatgtccacatgcacttatctccctgcagaatactttttgcgatgatgtttctcatgtattctttctttccttgtctggatgagcagaagaagatcatgatcatgatctgctgtattatccttgcgatcatcttagcttccaccattgggagcatatttgcctgaaaaaggtgagccatctgtggggagggtcagaccttctttcactgacttgaaacctttgtgtcttgggggcactctaggtgccttaatctgggtgggattaggtgctaataatggttagagaaaactaaagaaagggatgtttcagagacagaaaagtgagtgaagaatgaactgttagtaggtagtctgtgggaggaggggggagacagaaggtggcaatctgtcctataacctggtgtggcagaatgctttgtacaggtgaaggatagtgattcctgctaaacagtttgagccttggtatctggaagtgacaaaaagaacaagaattagttcttgcattaggtgcatcttgaactttttggaagagggccggccacacagtaaattcaaattaaatttcttccctttcaaggttaatgaaagttaacacagccttgtatgtagtcctttaccccgggtaagagggatttggtgatcccagccacgaacaccatgctatataatctatgatttttttcctccatttttctgttatctcccacagccctcacagattgatcgactggcatttctaatcctccttccacttctgtggtaccatcacttctccacgcagactcctcatcagcttctcctctttccattatgaaacttcttaagaaacagggcaccaatcaactacttattaagaattatgcaaagaataaacgtatacagaattgggcggaggacagggacagggagtacagatacatagctgattaggcagatggtttaaaggaggactgcagggtagagaagcaagcagagtgggcgcctctttaggaagtgacacagcctgcatgtgcagtatggctgtgaaggggcagatatcatagcacacctaactcaacaggatcttacttgaactgctgtgagttggtcaagtcagggcacttctgctcttcaggctcctctaggtcacacctttgaccaccctacatctgtttcctctttcaggctccagtagtagtcttaaaagtgaagtttatctaaggataagcacatgcctatcttgctcactgctgtgtccccactttttagcacagcgcctgctgcttacaggtactcaaatatctgctgacttaattacttataattaagctcttatttcagtcatggacaaatccttgggtttgactcctaaactctttaaggtaccaatgagaacgtggtttgttactgtcagaggctgtgtaaagccgcttgggaatgggctgatctgcttatgcaaaaatgctaccaacctttcaaaccccattaccacaacatgaaaatttaaagtgctttttctatgggtggtgatggtggagttctagcaacagcctcttaatctgtggagaagatggctggctccaggactgtggttcaataacgaaatacaggcccacaaaataaaataggtttatagcatgactgaactcacacatcagtagaacactctgtgaaccataacaaagaacagataaaggtgtcaagtgagaaaggtgaaatgaggttatcactcacttcacctctcacctgatttgtgttgctagctgaaactgctggccagtaacgtatgtataagaaactgttataggccgggcacggtggctcatgcctgtaatcacagcactttgggaggccaaggcaggtggatcaccagactgaccaacatagtgaaaccccctctctacaaaaaatacaaaaattagccaggcatggtggcttgcacctgtattcccagctacttgggaggctgaggcaggagaattgcttgaatgcaagaggcggaagttgcagtgagccgagatcgcgccactgcactccagcctgggcaacaagagctaaattccatctaaaaaaaaaaaaaaaacaaaaaaaaaaaactgttcttaatacttaatactgtccccaattccattcaaggttcagttgtgttcagctttaaaaccagctatgtgaatgtgagttctagtgcagattatttagtgattatgtaactaaaattgatgaaaaaatcacactatacaactgtgaggagcacacaactgctaagtttgtacttttgaaagtaaattattctttgtttgataccttattttttaagaaagtgggattaaaaatattttggtcagtgctgttttctacccaccttcaaaagccaatggtttgatatttctattaatttgtgcttcctttagttttaataggggatagaagactgcagctggttgggtctggaaaacattaatctgggcaaacggagctggagctatgaggatctgagtcctagggggccctcattcactagcagtaagaatttaagtggtgcatggcacatagcactgtactagattctgcaggggcacaaacatagagccaaacactctccctcttggagaatttcagacccagaaaaggccacgcagttctaacttttgtcatcggttccttttgctaaaaggcaaagggtatgttccttgcctattgtccaacataccccttccaagattgtgagaagatgggtagctgggcatcaataaatattgaatcaattgacctaaaaaaaaaaaaaaaaaaaaaaaa

SEQ ID NO: 2277 - DNA, 2089 bp, Homo Sapiens
  NM_004180
gtttgagcagcattgttagagcctgtggaaaacactttacaactgtgtaactgtcttcatctttacagaggaatagtctacaaaggaagacttgtaacctggagaagagacctgtcatttactccatcctttatagtgatgctacaggacgaagaggaatggataaaaacattggcgagcaactcaataaagcgtatgaagccttccggcaggcatgcatggatagagattctgcagtaaaagaattacagcaaaagactgagaactatgagcagagaatacgtgaacaacaggaacagctgtcacttcaacagactattattgacaagctaaaatctcagttacttcttgtgaattccactcaagataacaattatggctgtgttcctctgcttgaagacagtgaaacaagaaagaataatttgactcttgatcagccacaagataaagtgatttcaggaatagcaagagaaaaactaccaaaggtaagaagacaagaggtttcttctcctagaaaagaaacttcagcaaggagtcttggcagtcctttgctccatgaaaggggtaatatagagaagactttctgggatctgaaagaagaatttcataaaatatgcatgctagcaaaagcacagaaagaccacttaagcaaacttaatataccagacactgcaactgaaacacagtgctctgtgcctatacagtgtacggataaaacagataaacaagaagcgctgtttaagcctcaggctaaagatgatataaatagaggtgcaccatccatcacatctgtcacaccaagaggactgtgcagagatgaggaagacacctcttttgaatcactttctaaattcaatgtcaagtttccacctatggacaatgactcaactttcttacatagcactccagagagacccggcatccttagtcctgccacgtctgaggcagtgtgccaagagaaatttaatatggagttcagagacaacccagggaactttgttaaaacagaagaaactttatttgaaattcagggaattgaccccatagcttcagctatacaaaaccttaaaacaactgacaaaacaaagccctcaaatctcgtaaacacttgtatcaggacaactctggatagagctgcgtgtttgccacctggagaccataatgcattatatgtaaatagcttcccacttctggacccatctgatgcaccttttccctcactcgattccccgggaaaagcaatccgaggaccacagcagcccatttggaagccctttcctaatcaagacagtgactcggtggtactaagtggcacagactcagaactgcatatacctcgagtatgtgaattctgtcaagcagttttcccaccatccattacatccaggggggatttccttcggcatcttaattcacacttcaatggagagacttaagacacatttgaaaacagacatatcaagttctatgtgatgattttgggtttttaatactataaatacttgattgtaaactaaattcaagatcatttataggaaaatctagtttcacagctatttgaatttttttctggatttactatataactcttattttttaaaagatcattctgttctttcaaggagaaataagcctaaaagaagaaaaacaaaaaaaattctgtataaaactgtaatcctttgtattcatgtttacagtgctattactataattcaaaattatgtatgtgacttagagttatataatcataatttatgtttatttcaaatatctaagtttattgcttggatttctagtgagagctgttgaatttggtgatgtcaaatgtttctagggtttttttagtttgtttttattgaaaaatttaattatttatgctataggtgatattctctttgaataaacctataatagaaaatagcagacaacataaacatctttgtaaatatcaaacctaatacatttcttgtccagtgataaaacaactggtagaattatttaaacactttagatttttaaataatatacatggctttaatttttactgtgtgtatagctacatgatgaaattaattaaatattaagaggt

SEQ ID NO: 2278 - DNA, 2149 bp, Homo Sapiens
  NM_004192
gtggcctcgcggaggcgggcgggggcgtggcctcgcggaggcgggactctggccgcctgttttttttgcagccgcgctgcgcgcaccgcgggctccgggctcagaagtgcggacgcccggctcccggcgtggacgccatggtgctgtgcccggtgattgggaagctgctgcacaagcgcgtggtgctggccagcgcctccccacgccgtcaggagatcctcagcaacgcgggtctcaggtttgaggtggtcccctccaagtttaaagagaagctggacaaagcctccttcgctactccgtatgggtacgccatggagaccgccaagcagaaggccctggaggtggccaaccggctgtaccagaaagacctgcgggcccccgacgtggtcattggagcggacacgatcgtgacagtcggggggctgattctggagaagccggtggacaagcaggacgcctacaggatgctgtcccggttgagtgggagagaacacagcgtgttcacaggtgtcgcgatcgtccactgctccagcaaagaccatcagctggacaccagggtctcggaattctacgaggaaacgaaggtgaagttctcggagctgtccgaggagctgctctgggaatacgtccacagcggggagcccatggacaaagctggcggctacgggatccaggccctgggcggcatgctggtggagtccgtacacggggactttctgaacgtggtgggattcccgctgaaccacttctgcaagcagctggtgaagctctactacccgccccgtccggaggacctgcggcggagtgtcaagcacgactccatcccggccgcggacaccttcgaagacctcagtgacgtggaggggggcggctcggagcccactcagagggacgcgggcagccgcgatgagaaggccgaggcgggagaggcgggacaggccacggcagaggctgagtgtcacaggactcgggagaccctgcctccgttcccgacacgcctcctggagctgattgagggctttatgctatccaagggcctgctcaccgcttgcaaactgaaggtgttcgatttgttaaaagatgaagcaccccagaaggctgcggatattgccagcaaagtggacgcctctgcgtgtggaatggagaggcttctggacatctgtgctgccatggggctcctggagaagacagagcaaggttacagtaacacagagacagcgaacgtctacctggcatcggatggcgaatactctctgcacggcttcatcatgcacaataatgacctcacatggaacctctttacatacctggagtttgccatccgagagggaacaaaccagcaccacagggcgttggggaagaaggcggaagatctgttccaggatgcgtactaccagagcccggagacgcggctgaggttcatgcgggccatgcacggcatgacgaagctgactgcgtgccaggtggccacggccttcaatctgtcccgcttctcctccgcctgcgacgtgggaggctgcacgggtgcactggcccgagagctggcccgtgagtaccctcgtatgcaggtgactgtgtttgacctcccagacattatcgagctggccgcccacttccaaccccccggaccgcaggcagtgcagatccacttcgcagcaggtgactttttcagggaccccctccccagcgctgagctgtacgtcctgtgccggatcctgcatgactggccagacgacaaagtccacaagttactcagcagggtcgccgagagctgcaagccaggggccggcctgctgctggtggagacgctcctggatgaggagaagagggtggcgcagcgcgccctgatgcagtcactgaacatgctggtgcagactgaaggcaaggagcggagcctgggcgagtatcagtgcttgctggagctgcacggcttccaccaggtgcaggtggtgcacttggggggtgtcctggatgccatcttggccaccaaagtggccccctgaagcccaggcagcatgttcattatagggatgtcctcccccaggctgcaggtggaccgcccggtccccaagtaccataggacagtcacataggagcgtgtagtcgtgactgaataaagaaagcaaaagcctgaaaaaaaaaaaaaaaa

SEQ ID NO: 2279 - DNA, 2921 bp, Homo Sapiens
  NM_004204
cagcgagcgccgtcgtctgcccgggcccgcccatcggggtccccaaccccatccggaccccgccgcccgagcgcgcggccccggaagcacccgcctcccggcatggtgctcaaggccttcttccccacgtgctgcgtctcgacggacagcgggctgctggtgggacggtgggtgccggagcagagcagcgccgtggtcctggcggtcctgcactttcccttcatccccatccaggtcaagcagctcctggcccaggtgcggcaggccagccaggtgggcgtggccgtgctgggcacctggtgccactgccggcaggagcccgaggagagcctgggccgcttcctggagagcctgggtgctgtcttcccccatgagccctggctgcggctgtgccgggagagaggcggcacgttctggagctgcgaggccacccaccggcaagcgcccactgcccccggtgcccctggtgaggaccaggtcatgctcatcttctatgaccagcgccaggtgttgctgtcacagctacacctgcccaccgtcctgcccgaccgccaggctggagccaccactgccagcacggggggcctggctgccgtcttcgacacggtagcacgcagtgaggtgctcttccgcagtgaccgctttgatgagggccccgtgcggctgagccactggcagtcggagggcgtggaggccagcatcctcgcggagctggccaggcgagcctcgggacccatttgcctgctgttggccagcctgctgtcgctggtctcagctgtcagtgcctgccgagtgttcaagctctggcccctgtccttcctcgggagcaaactctccacgtgcgaacagctccggcaccggctggagcacctcacgctaatcttcagtacacggaaggcggagaaccctgcccagctgatgaggaaggccaacacggtggcctctgtgctgctggacgtggccctgggcctcatgctgctgtcctggctccacgggagaagccgcatcgggcatctggccgacgccctcgttcctgtggctgaccacgtggccgaggagctccagcatctgctgcagtggctgatgggtgctcccgccgggctcaagatgaaccgtgcactggaccaggtgctgggccgcttcttcctctaccacatccacctgtggatcagctacatccacctcatgtcccccttcgtggagcacatcctttggcacgtgggcctctcggcctgcctgggcctgacggtggccctgtccctcctctcggacattatcgccctcctcaccttccacatctactgcttttacgtctatggagccaggctgtactgcctgaagatccatggcctgtcctcactgtggcgtctgttccgggggaagaagtggaacgttctgcgccagcgcgtggactcctgttcctatgacctggaccagctgttcatcgggactctgctcttcaccatcctgctcttcctcctgcctaccacagccctgtactacctggtgttcaccctgctccggctcctggtggtcgccgtgcagggcctgatccatctgctcgtggacctcatcaactccctgccgctgtactcactgggtcttcggctctgccggccctacaggctggcggctggcgtgaagttccgtgtcctccggcacgaggccggcaggcccctccgcctcctgatgcagataaacccactgccctacagccgcgtggtgcacacctaccgcctccccagctgtggctgccaccccaagcactcctggggcgccctgtgccgcaagctgttccttggggagctcatctacccctggaggcagagaggggacaagcaggactgagggaactgctggctcgcctggcaccaccacacggccacagccagccatctgctctgccagggtggcaccagctcagctggcgcatgtcctgtgctttgtggacgctgctgtgtgctcctgaacacggcaggccctgctatcacaccttgggcttggaggtcattgggagtgagcagatgtgggggtggccagccaggctggccgcactccatcactggcactgcctgccttgggacccgcttcccacctgctgcggtcaccatggtggcgagcacagcaaccccaggtgtccagagcactgccccatgcccaccctgtgtacccaggtccagagggtccgtccaccacagcagccccaggtggagggctggtctccctgggggctccccagtggctctgccctggctgtgggggtggagggaccttgccaggatgaaccccccagtcccaggcaccctctagctccctcagccgaacagcaccctgcatctgggggattgaagcagtcgctgacccccgtccccagcgggcccgggccctcactccctgaaccacacggggtttatttgcggatgttccctggagaggtcgctttgtgaagaaaccatcagcaggctgtgagcatcgccaggctgctgtgggggcgggagcagcctcagtgtcaagggcccgcccactgacccagccgtacctattcgtccacggtgccccgtagcagcaggtcctgcggccaaatctgtctcccttcatgggcctcccagggaaggaggaagccctgctgtgcagacacctctgtggccccccaggagtgtgagtggcctggggagggggccgtggcactgaggccgaaagtgcctgccagacggcacggtctgggtgcgggtgttccctgtgagcccgagtccgcttcaggaggggagcctgcaggtgccggctggtgaggggatgacgcgctgtgggtgggaggaggcagcgcccatctcagcagcaccaggactgcctgggactccctggcaacccagcaccggggaagccgtcagctgctgtgacaataaaacctgccccgtgtctgg

SEQ ID NO: 2280 - DNA, 2035 bp, Homo Sapiens
  NM_004207
ttaaagtcgcccccggcgcggagcggaccggcagaggcgggcagaggcggcgagaggcggcgagaggcgggctgaggcggcccagcggcggcaggtgaggcggaaccaaccctcctggccatgggaggggccgtggtggacgagggccccacaggcgtcaaggcccctgacggcggctggggctgggccgtgctcttcggctgtttcgtcatcactggcttctcctacgccttccccaaggccgtcagtgtcttcttcaaggagctcatacaggagtttgggatcggctacagcgacacagcctggatctcctccatcctgctggccatgctctacgggacaggtccgctctgcagtgtgtgcgtgaaccgctttggctgccggcccgtcatgcttgtggggggtctctttgcgtcgctgggcatggtggctgcgtccttttgccggagcatcatccaggtctacctcaccactggggtcatcacggggttgggtttggcactcaacttccagccctcgctcatcatgctgaaccgctacttcagcaagcggcgccccatggccaacgggctggcggcagcaggtagccctgtcttcctgtgtgccctgagcccgctggggcagctgctgcaggaccgctacggctggcggggcggcttcctcatcctgggcggcctgctgctcaactgctgcgtgtgtgccgcactcatgaggcccctggtggtcacggcccagccgggctcggggccgccgcgaccctcccggcgcctgctagacctgagcgtcttccgggaccgcggctttgtgctttacgccgtggccgcctcggtcatggtgctggggctcttcgtcccgcccgtgttcgtggtgagctacgccaaggacctgggcgtgcccgacaccaaggccgccttcctgctcaccatcctgggcttcattgacatcttcgcgcggccggccgcgggcttcgtggcggggcttgggaaggtgcggccctactccgtctacctcttcagcttctccatgttcttcaacggcctcgcggacctggcgggctctacggcgggcgactacggcggcctcgtggtcttctgcatcttctttggcatctcctacggcatggtgggggccctgcagttcgaggtgctcatggccatcgtgggcacccacaagttctccagtgccattggcctggtgctgctgatggaggcggtggccgtgctcgtcgggcccccttcgggaggcaaactcctggatgcgacccacgtctacatgtacgtgttcatcctggcgggggccgaggtgctcacctcctccctgattttgctgctgggcaacttcttctgcattaggaagaagcccaaagagccacagcctgaggtggcggccgcggaggaggagaagctccacaagcctcctgcagactcgggggtggacttgcgggaggtggagcatttcctgaaggctgagcctgagaaaaacggggaggtggttcacaccccggaaacaagtgtctgagtggctgggcggggccggcaggcacagggaggaggtacagaagccggcaacgcttgctatttattttacaaactggactggctcaggcagggccacggctgggctccagctgccggcccagcggatcgtcgcccgatcagtgttttgagggggaaggtggcggggtgggaaccgtgtcattccagagtggatctgcggtgaagccaagccgcaaggttacaaggcatcctcaccaggggccccgcctgctgctcccaggtggcctgcggccactgctatgctcaaggacctggaaacccatgcttcgagacaacgtgactttaatgggagggtgggtgggccgcagacaggctggcagggcaggtgctgcgtggggccctctccagcccgtcctaccctgggctcacatggggcctgtgcccacccctcttgagtgtcttggggacagctctttccacccctggaagatggaaataaacctgcgtgtgggtggagtgttaggaccaacggtttccta

SEQ ID NO: 2281 - DNA, 2289 bp, Homo Sapiens
  NM_004208
aatgcggcagcgagtgctacgcctgcgcagtaggcctccggtcgccgttccccttccccggctctagcaggccggcttctctgtccaatgcccacccggagctgggaggaggagtctgcgtaatgtgcgtgtgaagagactgggggagctggccggggctcacggtgtttgacccgtcggtcgtgcgtgagaggaaagggaaggaggaggtcccgaatagcggtcgccgaaatgttccggtgtggaggcctggcggcgggtgctttgaagcagaagctggtgcccttggtgcggaccgtgtgcgtccgaagcccgaggcagaggaaccggctcccaggcaacttgttccagcgatggcatgttcctctagaactccagatgacaagacaaatggctagctctggtgcatcagggggcaaaatcgataattctgtgttagtccttattgtgggcttatcaacagtaggagctggtgcctatgcctacaagactatgaaagaggatgaaaaaagatacaatgaaagaatttcagggttagggctgacaccagaacagaaacagaaaaaggccgcgttatctgcttcagaaggagaggaagttcctcaagacaaggcgccaagtcatgttcctttcctgctaattggtggaggcacagctgcttttgctgcagccagatccatccgggctcgggatcctggggccagggtactgattgtatctgaagatcctgagctgccgtacatgcgacctcctctttcaaaagaactgtggttttcagatgacccaaatgtcacaaagacactgcgattcaaacagtggaatggaaaagagagaagcatatatttccagccaccttctttctatgtctctgctcaggacctgcctcatattgagaatggtggtgtggctgtcctcactgggaagaaggtagtacagctggatgtgagagacaacatggtgaaacttaatgatggctctcaaataacctatgaaaagtgcttgattgcaacaggaggtactccaagaagtctgtctgccattgatagggctggagcagaggtgaagagtagaacaacgcttttcagaaagattggagactttagaagcttggagaagatttcacgggaagtcaaatcaattacgattatcggtgggggcttccttggtagcgaactggcctgtgctcttggcagaaaggctcgagccttgggcacagaagtgattcaactcttccccgagaaaggaaatatgggaaagatcctccccgaatacctcagcaactggaccatggaaaaagtcagacgagagggggttaaggtgatgcccaatgctattgtgcaatccgttggagtcagcagtggcaagttacttatcaagctgaaagacggcaggaaggtagaaactgaccacatagtggcagctgtgggcctggagcccaatgttgagttggccaagactggtggcctggaaatagactcagattttggtggcttccgggtaaatgcagagctacaagcacgctctaacatctgggtggcaggagatgctgcatgcttctacgatataaagttgggaaggaggcgggtagagcaccatgatcacgctgttgtgagtggaagattggctggagaaaatatgactggagctgctaagccgtactggcatcagtcaatgttctggagtgatttgggccccgatgttggctatgaagctattggtcttgtggacagtagtttgcccacagttggtgtttttgcaaaagcaactgcacaagacaaccccaaatctgccacagagcagtcaggaactggtatccgatcagagagtgagacagagtccgaggcctcagaaattactattcctcccagcaccccggcagttccacaggctcccgtccagggggaggactacggcaaaggtgtcatcttctacctcagggacaaagtggtcgtggggattgtgctatggaacatctttaaccgaatgccaatagcaaggaagatcattaaggacggtgagcagcatgaagatctcaatgaagtagccaaactattcaacattcatgaagactgaagccccacagtggaattggcaaacccactgcagcccctgagaggaggtcgaatgggtaaaggagcatttttttattcagcagactttctctgtgtatgagtgtgaatgatcaagtcctttgtgaatattttcaactatgtaggtaaattcttaatgttcacatagtgaaataaattctgattcttctaaattaaaaaaaaaaaaaaaaaaaaaaaa

SEQ ID NO: 2282 - DNA, 1655 bp, Homo Sapiens
  NM_004215
gacctccctcgacgcccgacagctgctctgggtactgtttccgggtcagggtgacctctggggtgaggaaactgcgactgggagcgggacccaggcgtgcagcattcgccatgctccgctcacgcgtgggagactgggctgtggggtaccggcccggaaagcacgcagcctccaaagccgccttcctcagggaaatttgcgtgaccttactgccctccgtctacaggccttgtacctctccaggccgatttttccacaatttaaatctcagttcacctggtatccagctccagcaacttagagcgtttcacgtcacgccgggcgccaggcgtcggcttgtataacctgaaaacgctcctgtttttctcatctgtgcagtgggttttgattcccaccatggccatcacccagtttcggttatttaaattttgtacctgcctagcaacagtattctcattcctaaagagattaatatgcagatctggcagaggacggaaattaagtggagaccaaataactttgccaactacagttgattattcatcagttcctaagcagacagatgttgaagagtggacttcctgggatgaagatgcacccaccagtgtaaagatcgaaggagggaatgggaatgtggcaacacaacaaaattctttggaacaactggaacctgactattttaaggacatgacaccaactattaggaaaactcagaaaattgttattaagaagagagaaccattgaattttggcatcccagatgggagcacaggtttctctagtagattagcagctacacaagatctgccttttattcatcagtcttctgaattaggtgacttagatacctggcaggaaaataccaatgcatgggaagaagaagaagatgcagcctggcaagcagaagaagttctgagacagcagaaactagcagacagagaaaagagagcagccgaacaacaaaggaagaaaatggaaaaggaagcacaacggctaatgaagaaggaacaaaacaaaattggtgtgaaactttcataacacatgttcaaattttatcatgccagtaggagaaatctcagctccacaacccaagcaacatttgtatggatttaagagtattttaagaagacatactgcttgattttaatacattgatcaggccatccaggacaccacgattctcccaaagtaccttgaactcttagtgattgagactcaaaaaaacaaaaaagacttgagacaatgttttcttcaacatgctccaaatataagacatttgtttgctgtacagaaagtatcacaaatggaatatatcagtacctctcaagctagtgtttctagctaaataaatgggtgtatataattttatggtggaaaagaactgtactgtctgttatgatttccttcaatgtgcataatgataaaataaataattttaatattcttttgtttccatggttacctgacctaaattagataaattgtagggctttagctttcttatttttgtcaaaagttggtgttgacatacattccctctaatttgaactggtattgtttacgtttgatacaacattaaggaatttgatgattttcatttcatgaaaatgacattaaatgcaataattttacttatcataaaaaaaaaaaaaaaa

SEQ ID NO: 2283 - DNA, 1253 bp, Homo Sapiens
  NM_004217
gggcggccgggagagtagcagtgccttggaccccagctctcctccccctttctctctaaggatggcccagaaggagaactcctacccctggccctacggccgacagacggctccatctggcctgagcaccctgccccagcgagtcctccggaaagagcctgtcaccccatctgcacttgtcctcatgagccgctccaatgtccagcccacagctgcccctggccagaaggtgatggagaatagcagtgggacacccgacatcttaacgcggcacttcacaattgatgactttgagattgggcgtcctctgggcaaaggcaagtttggaaacgtgtacttggctcgggagaagaaaagccatttcatcgtggcgctcaaggtcctcttcaagtcccagatagagaaggagggcgtggagcatcagctgcgcagagagatcgaaatccaggcccacctgcaccatcccaacatcctgcgtctctacaactatttttatgaccggaggaggatctacttgattctagagtatgccccccgcggggagctctacaaggagctgcagaagagctgcacatttgacgagcagcgaacagccacgatcatggaggagttggcagatgctctaatgtactgccatgggaagaaggtgattcacagagacataaagccagaaaatctgctcttagggctcaagggagagctgaagattgctgacttcggctggtctgtgcatgcgccctccctgaggaggaagacaatgtgtggcaccctggactacctgcccccagagatgattgaggggcgcatgcacaatgagaaggtggatctgtggtgcattggagtgctttgctatgagctgctggtggggaacccaccctttgagagtgcatcacacaacgagacctatcgccgcatcgtcaaggtggacctaaagttccccgcttccgtgcccatgggagcccaggacctcatctccaaactgctcaggcataacccctcggaacggctgcccctggcccaggtctcagcccacccttgggtccgggccaactctcggagggtgctgcctccctctgcccttcaatctgtcgcctgatggtccctgtcattcactcgggtgcgtgtgtttgtatgtctgtgtatgtataggggaaagaagggatccctaactgttcccttatctgttttctacctcctcctttgtttaataaaggctgaagctttttgtactcatgaaaaaaaaaaaaaaaaaa

SEQ ID NO: 2284 - DNA, 728 bp, Homo Sapiens
  NM_004219
gcggcctcagatgaatgcggctgttaagacctgcaataatccagaatggctactctgatctatgttgataaggaaaatggagaaccaggcacccgtgtggttgctaaggatgggctgaagctggggtctggaccttcaatcaaagccttagatgggagatctcaagtttcaacaccacgttttggcaaaacgttcgatgccccaccagccttacctaaagctactagaaaggctttgggaactgtcaacagagctacagaaaagtctgtaaagaccaagggacccctcaaacaaaaacagccaagcttttctgccaaaaagatgactgagaagactgttaaagcaaaaagctctgttcctgcctcagatgatgcctatccagaaatagaaaaattctttcccttcaatcctctagactttgagagttttgacctgcctgaagagcaccagattgcgcacctccccttgagtggagtgcctctcatgatccttgacgaggagagagagcttgaaaagctgtttcagctgggccccccttcacctgtgaagatgccctctccaccatgggaatccaatctgttgcagtctccttcaagcattctgtcgaccctggatgttgaattgccacctgtttgctgtgacatagatatttaaatttcttagtgcttcagagtttgtgtgtatttgtattaataaagcattcttcaacagaaaaaaaaaaaaaaaaa

SEQ ID NO: 2285 - DNA, 1260 bp, Homo Sapiens
  NM_004223
gggggtggggtccccggggcggggcggggcgcgctgtgtcgcgggtcggagctcggtcctgctggaggccacgggtgccacacactcggtcccgacatgatggcgagcatgcgagtggtgaaggagctggaggatcttcagaagaagcctcccccatacctgcggaacctgtccagcgatgatgccaatgtcctggtgtggcacgctctcctcctacccgaccaacctccctaccacctgaaagccttcaacctgcgcatcagcttcccgccggagtatccgttcaagcctcccatgatcaaattcacaaccaagatctaccaccccaacgtggacgagaacggacagatttgcctgcccatcatcagcagtgagaactggaagccttgcaccaagacttgccaagtcctggaggccctcaatgtgctggtgaatagaccgaatatcagggagcccctgcggatggacctcgctgacctgctgacacagaatccggagctgttcagaaagaatgccgaagagttcaccctccgattcggagtggaccggccctcctaactcatgttctgaccctctgtgcactggatcctcggcatagcggacggacacacctcatggactgaggccagagccccctgtggcccattccccattcatttttcccttcttaggttgttagtcattagtttgtgtgtgtgtgtggtggagggaagggagctatgagtgtgtgtgttgtgtatggactcactcccaggttcacctggccacaggtgcacccttcccacaccctttacattccccagagccaagggagtttaagtttgcagttacaggccagttctccagctctccatcttagagagacaggtcaccttgcaggcctgcttgcaggaaatgaatccagcagccaactcgaatccccctagggctcaggcactgagggcctggggacagtggagcatatgggtgggagacagatggagggtaccctatttacaactgagtcagccaagccactgatgggaatatacagatttaggtgctaaaccgtttattttccacggatgagtcacaatctgaagaatcaaacttccatcctgaaaatctatatgtttcaaaaccacttgccatcctgttagattgccagttcctgggaccaggcctcagactgtgaagtatatatcctccagcattcagtccagggggagccacggaaaccatgttcttgcttaagccattaaagtcagagatgaattctgg

SEQ ID NO: 2286 - DNA, 5324 bp, Homo Sapiens
  NM_004226
gaacggcgatgccccagacgcggctgcagttttcaaaccgcgactgcaagcttcggtagtcctctccgctgctgtcgccaggagtcacttcacgagaagccaggtcacaaccgtcggcccttgtctggaaaagtaaaagtggatcctgccacgttcggagctccctggcgcctcgcccggctggagctagagaactcgtcctgtggcggcccccggcgtggggcgggacagcggccccctggagggggcagtcccgggagaacctgcggcggccggagcggtaaaaataagtgactaaagaagcagacctgggaatcacctaacatgtcgaggaggagatttgattgccgaagtatttcaggcctactaactacaactcctcaaattccaataaaaatggaaaactttaataatttctatatacttacatctaaagagctagggagaggaaaatttgctgtggttagacaatgtatatcaaaatctactggccaagaatatgctgcaaaatttctaaaaaagagaagaagaggacaggattgtcgagcagaaattttacacgagattgctgtgcttgaattggcaaagtcttgtccccgtgttattaatcttcatgaggtctatgaaaatacaagtgaaatcattttgatattggaatatgctgcaggtggagaaattttcagcctgtgtttacctgagttggctgaaatggtttctgaaaatgatgttatcagactcattaaacaaatacttgaaggagtttattatctacatcagaataacattgtacaccttgatttaaagccacagaatatattactgagcagcatataccctctcggggacattaaaatagtagattttggaatgtctcgaaaaatagggcatgcgtgtgaacttcgggaaatcatgggaacaccagaatatttagctccagaaatcctgaactatgatcccattaccacagcaacagatatgtggaatattggtataatagcatatatgttgttaactcacacatcaccatttgtgggagaagataatcaagaaacatacctcaatatttctcaagttaatgtagattattcggaagaaactttttcatcagtttcacagctggccacagactttattcagagccttttagtaaaaaatccagagaaaagaccaacagcagagatatgcctttctcattcttggctacagcagtgggactttgaaaacttgtttcaccctgaagaaacttccagttcctctcaaactcaggatcattctgtaaggtcctctgaagacaagacttctaaatcctcctgtaatggaacctgtggtgatagagaagacaaagagaatatcccagaggatagcagcatggtttccaaaagatttcgtttcgatgactcattacccaatccccatgaacttgtttcagatttgctctgttagcacttttttctttgactcatttggactgaatttgaaattttatatccactccagtgagattatgatttgtagcttcatatatgacatgtttatattgtaaatgcacttttccatggaataatttagggaagtgttttaatgttaaattactagttgctagcatgttatgatttcatatcctgagatagctctgcagataagaaaatatttaaatatatgacaaaaagtaaaattgtacatgtgagtttacatgttaatgaaataattcaacttcaaatgaacttaccagaatgttttgcatatcaacaaaaaaagtggcttgagttttattatagttggtgtaaactgaacacagtgaagacattggaatttaataggttctctctctaaggtgactcttataccatgcctctatcaacataatttgtttaggaaagcagtatgaagtttaagccaaaataatttctactttatagatgctcaagagacattttacaattgaaaatgtctttcaattacaaatattttgaaacttcgtaagattttcattctctgtggtctgttatatgagagagatcctttaactagagcaaagagggagttagaaacctgatcagggatattctttacaagttggagcagaggaaagagtagcatgccttcgtattttaacgcaaatgtctttttcctcctcccaacctacttgagatctgataaggtctggaagatggagatatttggtatgcaagtgtagagttttttaatcctccagaatttctagagtagaagatacttaggtatagttaaatattctgtatttttagtcaaacatatttattaattgaatatagaagaaaatgttgacacactcagacagcttactgaattttagatgtcttctgcatcttagaatacaagccagtcattcagagttctaaaagtatgcataaaaaattacagcaccggtaggtctattaacacagtgcccgagtcagcggtagcaagactgatgtgatcataaaacatgacatcaggctcgtctgaagttcttgtgtgaaattcctagtgagtgaggaggctcagcttaaagccatctgcagagtggcccctcattgtggtcttttgctgggaccaatgcaagagactagggagagcaaaatgtttgcttatggctagagactatatccagccctaatgatggggaaagttagtccttttcgggtaatcttttatgaattttcacctgatgaccgttatattggtctgttatcatgttacgataactgtgatctcatgaccatgttgctgtatcagaagaaatagtttgacaaatggtaacaacaacctgatgttccccctttagacctttaacttctcaaaattttggtaagtttccaaattctttaataataacttaaaactttttgaataactatcaggtcactttatttgaccacatggtgaattcctttaatgtcttcagcatttgttaaggaaaagttttctctacttgtgtgtgtatgtgtgcacatgtgtgtatgtacaggtgtatgtatatatctatagatagatacaatacattctttagacacttttcaagattctttgctgtggtatattgtgctcaactcaggtgccaaaggagctttttttttttttttttttttttgagatggagttttgctctgtctctcaggctggagtgcagtggcatgatctcagctcacggcaacctctgcctcccgggttcaagcaattctcctgtctcagcctcctgagtagttgggattacaggcgcatgccaccgtgcccagctaatttttgtatttttagtagagacggggtttcaccatgttggccaggctggtcacaaactcctgacttcaagtgatccacccgcctcggcctcccaaagtgctgggattacaggcgtgagccactgcgcccccgcccaggagctcttttcttatgacatataaattatgacatttatattctttatatgactttatgttctcttcttatgacatttaaattctttaagtagtttgttggtccaataaactagacgttgtataatctaaattgagcccttgtatatctaaaactgatgagttgtttctaaattgttgattgtccatttacttgcctttggtattaagataatgcaagtaaagtttagtaagtcattggataatgaaatgattatgtttctgaagaccatattatatttttaatttttagaggaatcatgccatcccccaaaaaatcaagaaatatttgaattttaaattataagttcatttgttaaaagacatttttacaaatgtctgaaaatcttaaaatactttacatctacctttaagtagtagaatacagagctgtaaatttccatgccttttttcctgatattaagttttatagtaaaaaagcaactagtgattgcacaaagaatataaaaatccactctttttacaaaggtgtgaatttaaataacgttattgattggaatatgaaaatagaccaatcatttaagagctttttagcaaatgattcaattcttactctttttctcccaagattgaaaagcataatgtatttctctaaagtaggaatctagagagcccctgtgagtggacaaatgtcagtaacacttgaacacatgagaagataagtgttatgttgtgataatttaaagttaaatttgctttttgggtaggatccctaaatagatgggatttttaaatagatgatatatagatgacaattgcaattgtcattttaattattttccctacagtaaagaacctagctctgagcagtgaaattgtaatggcactttaaaggaagtaagccgttaactgttctctagtggagcgatctccaactgttttggcactagggacgggttttgtggaagaaaatttttccacaggactgggggtttagggggatggtttcaggatgattcaagtacattacatttatcattagattctcataaggagcatgcaacctagatctcttgcacgtgtggttcacagcaggattcgagctcctttgagaatctaatgccatggctgatctaacaggaaactgagctcaggcagtaatgcttggcaccgccccccaccttctatgcagcccggtcgtggcctggggactggggacccctgctctagtcagtaataaggtacttgtgccagaatataaatcaacacattgcttcctttatcaaagaagtcttgttatttaaaaaaagtcaactgagccagtatgattagtgatgtaattgattttcattctggcacaagcctctttcattctggacagctcacaaatagttaatggaccatgctttgaatagccttcctctaagcaacatttataaatactgatattttagaactgtttacatttcttctgtttatttttgaattttcagtttgatatcttgtccttattcattgttgtataaacaactgtactttaatttcaagtagtattaaaagtatttcacttcagtttggggggattattatcaatttataattttataaaagtattttaaagaataattgtaaattttccataaattacaacttcctgccatattttattaaataataatcttgcttaaggcatatagacagacattattatgagtattccagtaaaaaaaatctacatcaacttgaccattctggctaaaaattaaaaagcacttttttatatctgtggttgtcatttgtttcaaagcatttctaaatttattgttcttaaaagtatgtctgcatgttctagcctttgacctaggtcatctatgaaccctctttgtgtctaataaacatatctgtaaaggcaaaaaaaaaaaaaaaaaa

SEQ ID NO: 2287 - DNA, 4482 bp, Homo Sapiens
  NM_004227
tgaggagccgcccggtcgcctgcgcgctccctccggcggcgtccccagcccgcggcccctctgctgccggcccccggctcgccggctgcgggagtggcctcaagatggatgaagacggcggcggcgagggtggtggcgtgcctgaagacctctcattagaagagagagaagaacttctagacattcgtcgaagaaaaaaggaacttattgatgacattgagaggctgaaatatgaaattgcagaggtgatgacagagatcgacaatctaacttccgtagaggagagcaaaacgactcagaggaacaaacagatagccatgggaagaaagaaattcaacatggatcccaaaaagggaattcagtttctaatagaaaatgacctgctacagagttccccagaagacgtcgcccagttcctttataaaggagaaggcctaaataagaccgtcattggggactacctgggtgaaagggatgaatttaatattaaagttcttcaagcctttgttgaactccatgagtttgctgatctcaaccttgtacaagccttaaggcagttcttatggagcttcaggctgcccggggaggcgcagaagattgatcgcatgatggaggctttcgcttctcgctactgcctgtgcaaccccggggtcttccagtccacagacacgtgctacgtgctgtcattcgccatcatcatgctcaacaccagcctccacaaccacaacgtgcgtgacaagcccacggcagaacggttcatcgccatgaaccgcggcatcaacgagggcggggacctccctgaggagctgctgaggaatttgtatgagagcattaagaacgagccatttaagatcccggaggacgacgggaacgacctgacccacaccttcttcaaccccgaccgcgagggctggctcctgaagctgggagggcgtgtgaagacctggaagcgccggtggttcatcctgaccgataactgcctctattactttgaatacacaacagataaggagcccaggggaatcatcccgttggaaaacctcagcatcagggaggtggaggacccccggaaacccaactgttttgagctctacaatcccagccacaaagggcaggtcatcaaggcctgtaagactgaggccgacggccgcgtggtagaggggaaccatgtggtgtaccggatctcagccccgagcccggaggagaaggaggagtggatgaaatccatcaaagccagtatcagcagagatcccttctatgacatgttggcaacgaggaaacgaaggattgccaataaaaaatagctttcctggctaaaagacccaggtaaaagacccaaccccagcagaaagacaccgcgggcggcccctccgcggaaggcgtggcagggaggcagtcgccctgcggtgcaagctgctgctccagagcataccgtggcccaggtggtatccccaaggcctcgtgccgtggctggggtcctgggaggtggtcgccctgcagtgcaagctgctgctccagagcgtaccgtggcccagactgatcctcgaggcctcctgccgtggctggggtcatggtcggctgcgcatgtccagaagcatttccttcctgcgaccatcccggcgcccctagggggagaagccaggacagcagcttccgctgtctccacagcagacacgggacggattccacagacgggagcctcattcgtaccatgccaaacgcattcactcggggcagtattaaccgttctagaaagccactgttttatagcaaaacaggaaaggaaaagctaccagttttttattcagaatttttctcagatatataggattatagcttttatatgcctttttatattctgaaattataacaaaagatactttctaacagtagtatttttagaatggcagctataaagttaactcctggacacaagtatatactgtgcactgaaaaaatatccatctacacagcacccaaggggagggctgggggcaccggcacgggggcagcgtgcagccctgccctgtcaggctgtcagacaagccccggggggcagcaggtgggctcgggacgggctgggggagggacggccatggcacttgggggctccagggtgactcccatgaggcctcccttcaaccaggctttttggccccacaaatactttaagcaaatcattaaaattataacagttaatggtttgggggtgtttaggctgtaactgctaactcctaggaaacagccttttccctggacacagatggtccatacgctgagccacgtgaaactgctgatgttttgtttagatgcacacacatggcagcgtttcatacaggtcagcaggttagaccggcttttgaccatattcatcgctatttaaaacctgtggcaaaatgaacgcttattttacagactttctaatttgaccagatttcttaatgaatagacacagaattaactaaaaacagtctcaccccatgtagtgcgccgtgtcctgagagaggtgccctccctacgaggagggaagaacaggccctggggtgcagaggcccggcacgtagagaacccagatagacgccggtggtggaactggtcaaactccacgcccgcctgggaggttgtcaggttgctgtggatgtaaggataggaggtgcccagtgctccgctcaaggaaggctggatctgggccccacctacagagagggctcagggctggaccgggggcattgtgtgcttgggccgacccgggccggtggcagacgctgttctctgtcgggagatttgcgtccccaggaccctgttacacagtgggctgttgggttggtggctggcttttcctctatggacttcctcttcctgccccacctgcataggcacacacaccttgaatctgcaccctctggagggcatctgtactcctgtgcaaaatgcccagtccagagacaaaacctcagactttgtgcacctaggtttccttctcagcagcggagactgttctttgagttgccttgaagtggaggccgagcggctgcgggcccttcgcctccctgcggctgaccttgatgtagctttaagtcacactagactgcagaggggtccgaggccagaaacccctgtcctgcatcagactttcattcccacgttcttaggctttgttactgatacctcaaatcggaagttttagttctgagaaaggcaagtcagcgttcttgaaatgcctgactggtagatatgcaactctggcctccagtcttccatgaaaataaatgctgcctggacccccacccagaccacacactgacggccggctccggcggtgcccacccctcaggctggcccggcacccaagactggccacagccagctctgtcagcatgttgtgctcggacaagctgtttccttcttctgaccaacccaggtgtgacctggggatgcagagctttctgttttgggtgttgggagaagcagcaggaaggagtcgccagatgatcaagctccccctttgctgtcatctgtgaatgagcttcgccaggtggtgggcacctgggagccatgcagaggctgtggtgctgagttagactccaggtactttgtggtcaaaggaaatcgcctagctccaggctgtgttaggacagtattagcatgaaggctgtgcgaccatcatgcctgctgatccttgaggcaggcctggtccagaaaactctgggtcagtgactgcgcagggccagccgctaccaggacggccctgaaacaggacacatctgttttttgtccctcaccctgggcaggccgcgtcacaatcacagtcctcctcctccccaccctgacgtctgagcgcagggcttgaattgttagtcccaactctggccaaagatacttttttccagagacagaggccaggaggcagtgaggggagccccgcggggaggcggcggcgactgccacagcccttccagcctgtcttgctggccgccctggttcatatttgagtttaattgtactgaccctggacccagataagcagcaactttgtgtctttggggtcacagaacattttggggcagtttaatgtggtaccaaactgaaaataggagctatttatagatggagcagcacttagtgcttcatagaaagcaatgcctatttttaaagttacaaacgcagatatctacatagatatgctttgctgagaagttaggtctgtggtagaccagaaaccacaaattgactttttttcttagaaaatatttctatttgcggtaaatatagtaatatgtaaataatgtacatctgttgatttctggagtgtctgttattcaatgatgtatatactcccacagctcgcatgaaggaacagcctctattgatacttggttgtaaagtgaagtaagattggagggtggatggctgtcagagctcttgcagatactgtgttcactaaataaaaatcacatgtattgttaaaaaaaaaaaaaaaaa

SEQ ID NO: 2288 - DNA, 2478 bp, Homo Sapiens
  NM_004233
gacgggggcgccccggcctaagcgggactaggagggcgcgccacccgcttccgctgcccgccggggaatcccccgggctggcgcgcagggaagttcccgaacgcgcgggcataaaagggcagccggcgcccgcgcgccacagctctgcagctcgtggcagcggcgcagcgctccagccatgtcgcgcggcctccagcttctgctcctgagctgcgcctacagcctggctcccgcgacgccggaggtgaaggtggcttgctccgaagatgtggacttgccctgcaccgccccctgggatccgcaggttccctacacggtctcctgggtcaagttattggagggtggtgaagagaggatggagacaccccaggaagaccacctcaggggacagcactatcatcagaaggggcaaaatggttctttcgacgcccccaatgaaaggccctattccctgaagatccgaaacactaccagctgcaactcggggacatacaggtgcactctgcaggacccggatgggcagagaaacctaagtggcaaggtgatcttgagagtgacaggatgccctgcacagcgtaaagaagagacttttaagaaatacagagcggagattgtcctgctgctggctctggttattttctacttaacactcatcattttcacttgtaagtttgcacggctacagagtatcttcccagatttttctaaagctggcatggaacgagcttttctcccagttacctccccaaataagcatttagggctagtgactcctcacaagacagaactggtatgagcaggatttctgcaggttcttcttcctgaagctgaggctcaggggtgtgcctgtctgttacactggaggagagaagaatgagcctacgctgaagatggcatcctgtgaagtccttcacctcactgaaaacatctggaaggggatcccaccccattttctgtgggcaggcctcgaaaaccatcacatgaccacatagcatgaggccactgctgcttctccatggccaccttttcagcgatgtatgcagctatctggtcaacctcctggacattttttcagtcatataaaagctatggtgagatgcagctggaaaagggtcttgggaaatatgaatgcccccagctggcccgtgacagactcctgaggacagctgtcctcttctgcatcttggggacatctctttgaattttctgtgttttgctgtaccagcccagatgttttacgtctgggagaaattgacagatcaagctgtgagacagtgggaaatatttagcaaataatttcctggtgtgaaggtcctgctattactaaggagtaatctgtgtacaaagaaataacaagtcgatgaactattccccagcagggtcttttcatctgggaaagacatccataaagaagcaataaagaagagtgccacatttatttttatatctatatgtacttgtcaaagaaggtttgtgtttttctgcttttgaaatctgtatctgtagtgagatagcattgtgaactgacaggcagcctggacatagagagggagaagaagtcagagagggtgacaagatagagagctatttaatggccggctggaaatgctgggctgacggtgcagtctgggtgctcgcccacttgtcccactatctgggtgcatgatcttgagcaagttccttctggtgtctgctttctccattgtaaaccacaaggctgttgcatgggctaatgaagatcatatacgtgaaaattatttgaaaacatataaagcactatacagattcgaaactccattgagtcattatccttgctatgatgatggtgttttggggatgagagggtgctatccatttctcatgttttccattgtttgaaacaaagaaggttaccaagaagcctttcctgtagccttctgtaggaattcttttggggaagtgaggaagccaggtccacggtctgttcttgaagcagtagcctaacacactccaagatatggacacacgggagccgctggcagaagggacttcacgaagtgttgcatggatgttttagccattgttggctttcccttatcaaacttgggcccttcccttcttggtttccaaaggcattttattgcttgagttatatgttcactgtccccctaatattagggagtaaaacggataccaagttgatttagtgtttttacctctgtcttggctttcatgttattaaacgtatgcatgtgaagaaagggtgtttttctgttttatattcaactcataagactttgggataggaaaaatgagtaatggttactaggcttaatacctgggtgattacataatctgtacaatgaacccccatgatgtaagtttacctatgtaacaaacctgcacttatacccatgaacttaaaatgaaagttaaaaataaaaaacatatacaaataaaaaaatcccgactttgggatgagtgctaggatgttgtaaa

SEQ ID NO: 2289 - DNA, 3190 bp, Homo Sapiens
  NM_004234
ggaggcacttccgctccaggaaggcgaggtcggatctgagatatctcccagggaggttcacttccccggaactctgccttttcccagaaggaggaggggaaaaatgaccaagttccaggaggcagtgacattcaaggatgtggctgtggccttcactgaggaggagctggggctgctggactctgcccagaggaagctgtaccgagatgtgatgctggagaactttaggaacctggtttcagtgggacatcagtccttcaaaccagatatgatatcccagttggagagggaagaaaagctttggatgaaggagcttcaaacccaaagaggtaagcattcaggagacaggaatcaaaatgagatggcaactcttcacaaagcaggattaaggtgcttttcactgggagagctttcatgctggcaaatcaagagacacattgcgagcaaattagccagaagtcaagactccatgataaatattgaaggaaagagctctcagttccccaagcaccatgattccccctgtcaagtgggagcaggagaatctattcaagcttctgtggatgacaactgtctagtgaatcacataggggatcattccagtatcattgaaaatcaagaatttccaactgggaaagttccgaattcttggagtaaaatatatctgaatgagacacagaattatcagagaagttgtaagcagactcagatgaaaaacaaactatgtatatttgctccatatgttgacattttcagttgtatttcacaccaccatgatgataatatagtgcacaaaagagataaagttcatagcaatagtgattgtggtaaagataccctaaaggtatcacctcttacccagcgtagtattcacacaggacagaaaacctaccagggtaatgaatgtgaagaagccttcaatgatagctccagtcttgaacttcataaacaggtacacttgggaaagaagtctccagcgtgtagtacacatgagaaggacaccagttatagctcaggtattcctgttcaacaaagtgttcgtactgggaaaaaacgctattggtgtcatgaatgtggtaaaggtttcagtcagagctcaaatctgcaaactcatcagagagtccacacaggggagaaaccctatacatgccacgagtgtggtaagagctttaatcagagctcacatctttatgctcatttgcctattcacacaggagagaagccctatagatgtgacagttgtgggaagggcttcagtcgtagcacagatcttaacattcattgcagagttcacactggagagaaaccttataaatgtgaggtgtgtgggaagggcttcactcagagatcacatcttcaggcccatgaaagaattcacactggagagaaaccatataaatgtggggattgtggtaaacgctttagttgtagctcaaatcttcatacccatcagagagtccacactgaagaaaaaccatacaaatgtgatgagtgtggtaagtgctttagtttgagctttaatcttcatagtcatcaacgagtccacacaggagaaaaaccatataaatgtgaagagtgtggtaagggttttagttcagcctcaagtttccagagccatcagagggtccatacaggagagaaaccatttcgatgcaacgtgtgtgggaaaggcttcagtcagagttcatactttcaagcacatcagagagtccacactggagaaaaaccatacaaatgtgaagtgtgtgggaagcgcttcaattggagcttgaatcttcacaatcatcagagagtccacaccggagagaaaccctacaaatgtgaagagtgtggtaagggtttcagtcaggcttcaaatcttcaagcccatcagagcgtccacactggggaaaaaccattcaagtgtgatgcatgtcagaagcgattcagtcaggcctcacaccttcaagcccatcagagagtccacaccggagagaaaccatataaatgtgacacttgtggtaaggccttcagccagaggtcaaatcttcaagtccatcagataattcacactggagagaaaccatttaaatgtgaggaatgtgggaaagaattcagttggagtgctggtctcagtgcccatcagagggtccacacaggagagaaaccctatacgtgtcagcagtgtgggaagggcttcagtcaggcctcacattttcacacacaccagagagtccacactggagagaggccttacatatgtgatgtctgttgtaagggcttcagtcagaggtcacatctcatctaccatcagagagtccacactggagggaatctgtagaaatgagaggtgtggttcagccttcagttagagctcacatctttgtctccgttgggaagtccatgctgatgattgtgaaaagttcctttaaaactagaagcttcaaagaatcttgacaggaaagaagtctctcaaatgctgtgttttagacttggttaggacatgaattctttacaaacgtcatatttcacagatgcgagaaaactttgttctgtaaatatgatcagtgtttatatcagagtaccaggtgtcccggttctcaagatgtaacacagcagaaaagtcttgtcggagtctgcacaggagagaggccttcctttaacaaaagtatgattgacagaaaaaatggatgtcaactaaaatgtaacctctatgtaaggaggtgtttttcaccactctatctctaccatgtagaattgtgcttggctcataatagggcccagcaattactgaagaaagtgaagaaaatacctataattaggacaaatacttgaaaattctagtctgttttctactctaaatttatattaatttatattcaaaaggaatcctgcaagtagccttaataacgttagtttcagtaagtactgaaaagtatataatactgccatccatactaacacaaatttggaaaaaagacatgaatggctcccatccttcagccttagttctttgtacagtgtatcatcagttgtgtacagtatgatttttagtgtcagtttatagactgaacaatactgtttttatctaatgtgaccctgcaatttacatgattagaatttttggacactaagctgtactgtaactctgaaagtgttaaaagtagttactgatgacaaaaagtttcttagtaaacttgaattgttaata

SEQ ID NO: 2290 - DNA, 2949 bp, Homo Sapiens
  NM_004235
agtttcccgaccagagagaacgaacgtgtctgcgggcgcgcggggagcagaggcggtggcgggcggcggcggcaccgggagccgccgagtgaccctcccccgcccctctggccccccaccctcccacccgcccgtggcccgcgcccatggccgcgcgcgctccacacaactcaccggagtccgcgccttgcgccgccgaccagttcgcagctccgcgccacggcagccagtctcacctggcggcaccgcccgcccaccgccccggccacagcccctgcgcccacggcagcactcgaggcgaccgcgacagtggtgggggacgctgctgagtggaagagagcgcagcccggccaccggacctacttactcgccttgctgattgtctatttttgcgtttacaacttttctaagaacttttgtatacaaaggaactttttaaaaaagacgcttccaagttatatttaatccaaagaagaaggatctcggccaatttggggttttgggttttggcttcgtttcttctcttcgttgactttggggttcaggtgccccagctgcttcgggctgccgaggaccttctgggcccccacattaatgaggcagccacctggcgagtctgacatggctgtcagcgacgcgctgctcccatctttctccacgttcgcgtctggcccggcgggaagggagaagacactgcgtcaagcaggtgccccgaataaccgctggcgggaggagctctcccacatgaagcgacttcccccagtgcttcccggccgcccctatgacctggcggcggcgaccgtggccacagacctggagagcggcggagccggtgcggcttgcggcggtagcaacctggcgcccctacctcggagagagaccgaggagttcaacgatctcctggacctggactttattctctccaattcgctgacccatcctccggagtcagtggccgccaccgtgtcctcgtcagcgtcagcctcctcttcgtcgtcgccgtcgagcagcggccctgccagcgcgccctccacctgcagcttcacctatccgatccgggccgggaacgacccgggcgtggcgccgggcggcacgggcggaggcctcctctatggcagggagtccgctccccctccgacggctcccttcaacctggcggacatcaacgacgtgagcccctcgggcggcttcgtggccgagctcctgcggccagaattggacccggtgtacattccgccgcagcagccgcagccgccaggtggcgggctgatgggcaagttcgtgctgaaggcgtcgctgagcgcccctggcagcgagtacggcagcccgtcggtcatcagcgtcagcaaaggcagccctgacggcagccacccggtggtggtggcgccctacaacggcgggccgccgcgcacgtgccccaagatcaagcaggaggcggtctcttcgtgcacccacttgggcgctggaccccctctcagcaatggccaccggccggctgcacacgacttccccctggggcggcagctccccagcaggactaccccgaccctgggtcttgaggaagtgctgagcagcagggactgtcaccctgccctgccgcttcctcccggcttccatccccacccggggcccaattacccatccttcctgcccgatcagatgcagccgcaagtcccgccgctccattaccaagagctcatgccacccggttcctgcatgccagaggagcccaagccaaagaggggaagacgatcgtggccccggaaaaggaccgccacccacacttgtgattacgcgggctgcggcaaaacctacacaaagagttcccatctcaaggcacacctgcgaacccacacaggtgagaaaccttaccactgtgactgggacggctgtggatggaaattcgcccgctcagatgaactgaccaggcactaccgtaaacacacggggcaccgcccgttccagtgccaaaaatgcgaccgagcattttccaggtcggaccacctcgccttacacatgaagaggcatttttaaatcccagacagtggatatgacccacactgccagaagagaattcagtattttttacttttcacactgtcttcccgatgagggaaggagcccagccagaaagcactacaatcatggtcaagttcccaactgagtcatcttgtgagtggataatcaggaaaaatgaggaatccaaaagacaaaaatcaaagaacagatggggtctgtgactggatcttctatcattccaattctaaatccgacttgaatattcctggacttacaaaatgccaagggggtgactggaagttgtggatatcagggtataaattatatccgtgagttgggggagggaagaccagaattcccttgaattgtgtattgatgcaatataagcataaaagatcaccttgtattctctttaccttctaaaagccattattatgatgttagaagaagaggaagaaattcaggtacagaaaacatgtttaaatagcctaaatgatggtgcttggtgagtcttggttctaaaggtaccaaacaaggaagccaaagttttcaaactgctgcatactttgacaaggaaaatctatatttgtcttccgatcaacatttatgacctaagtcaggtaatatacctggtttacttctttagcatttttatgcagacagtctgttatgcactgtggtttcagatgtgcaataatttgtacaatggtttattcccaagtatgccttaagcagaacaaatgtgtttttctatatagttccttgccttaataaatatgtaatataaatttaagcaaacgtctattttgtatatttgtaaactacaaagtaaaatgaacattttgtggagtttgtattttgcatactcaaggtgagaattaagttttaaataaacctataatattttatctgaaaaaaaaaaaaaaaaaa

SEQ ID NO: 2291 - DNA, 4103 bp, Homo Sapiens
  NM_004236
agctgagagtgacgcctctgagccgcggaggattgtgggaggaggttgtctccaatttctcctccccctcccggccaagatgtctgacatggaggatgatttcatgtgcgatgatgaggaggactacgacctggaatactctgaagatagtaactccgagccaaatgtggatttggaaaatcagtactataattccaaagcattaaaagaagatgacccaaaagcggcattaagcagtttccaaaaggttttggaacttgaaggtgaaaaaggagaatggggatttaaagcactgaaacaaatgattaagattaacttcaagttgacaaactttccagaaatgatgaatagatataagcagctattgacctatattcggagtgcagtcacaagaaattattctgaaaaatccattaattctattcttgattatatctctacttctaaacagatggatttactgcaggaattctatgaaacaacactggaagctttgaaagatgctaagaatgatagactgtggtttaagacaaacacaaagcttggaaaattatatttagaacgagaggaatatggaaagcttcaaaaaattttacgccagttacatcagtcgtgccagactgatgatggagaagatgatctgaaaaaaggtacacagttattagaaatatatgctttggaaattcaaatgtacacagcacagaaaaataacaaaaaacttaaagcactctatgaacagtcacttcacatcaagtctgccatccctcatccactgattatgggagttatcagagaatgtggtggtaaaatgcacttgagggaaggtgaatttgaaaaggcacacactgatttttttgaagccttcaagaattatgatgaatctggaagtccaagacgaaccacttgcttaaaatatttggtcttagcaaatatgcttatgaaatcgggaataaatccatttgactcacaggaggccaagccgtacaaaaatgatccagaaattttagcaatgacgaatttagtaagtgcctatcagaataatgacatcactgaatttgaaaagattctaaaaacaaatcacagcaacatcatggatgatcctttcataagagaacacattgaagagcttttgcgaaacatcagaacacaagtgcttataaaattaattaagccttacacaagaatacatattccttttatttctaaggagttaaacatagatgtagctgatgtggagagcttgctggtgcagtgcatattggataacactattcatggccgaattgatcaagtcaaccaactccttgaactggatcatcagaagaggggtggtgcacgatatactgcactagataaatggaccaaccaactaaattctctcaaccaggctgtagtcagtaaactggcttaacagagaacaagcttttacagacgtccttaaggcaacagtgcagagatgtaatccttaaaagaactgggaatggcaaaactactgtcggttgatgtgtcctgaaaattattggagttatggcagaagtgcttttttgatcaactggtttgtgttttgctgctgcatttatcccaagaaaaacagctttaatctccagaagaaaaccaaaataccatgggatttatgctgtattgacatcttgccctaaacgtacaacatcatagtaatttgtcatgggcaacatgaccagagagaagatttttgtcatgattttaaatacactgacacgctactgttggttaaatttaaacatgttttacctgcagaaattctctcacaaataacctgcaataacttgaaatgcatacccttttgaacacttccttttctcatgtataaattaaaatgtttgctgcattttgcaaaatgtcaattctctaaaaatgtgtccgtatatttctgtacctgcagtgtagtaaaggtttagacgaaaccccataattatagtggcatactgtcacttaggtttcaagcagcaaaataaacagtgcagctcagaaattgtagtttggttcttgatgtgtttttattacatttggagttgttttgttttttagtaccttcgaaatttcaaattattttatcttcagttaatgattttaaaaagcctgggggcaaataagttggttatttgctttcaagtttttaaaagtagtctttattgatagagtaaggagaactactttctaacaaaacacgtgcatagttatgacagtgatgctttaaaggaataaaattctttttttttaaagagtgatattccttttcaaaagaatactaactctcagaatgttcactttaaacgaatatgccagaacatagacagctaaatgaatgttactctgcatagtgatcatgctggaaggttatttcctaatgccagcaatctaccattgcccaaaacctgctgagtttactcttttagaattgcattcaaagttaatttgtcacacacactaaactttatgattatacattgttttaaaaaatatagtattaggaagcttgattatttttagttaccattacttggcaccaaatgaaagtttccaaaacttccacctaactttgaggtaatgcagaaagtatataactggctttgaaggcaatcccaaaagagttttaaaggttttttgagcagtggcagtatacttaggagaatgaactgtggccttccaaggtaactaccttaaaggaactcagctcatttgaatgtattgagttttggatgtatttgtttcattttttaaaaagttcacattattttatagtgtcgaaaggaagaactaggattaacataatttctttggtttttctattgcttgttattattatgtaaaaactgggtggcagttcagaaggaagattgtggttacagaagagtgacaaccaagaattttttgatcattaaatcagattttataaacagtggaaggagcatggacttaaaacaaggcatgcttattcggttttgtcaaaattttacgaaaatatgtgatatatatttatactaaaaatatataatccttagatttagaaaagcaatcagttaatgtctttagcagactaaagcagtattaaacacaggtacaagttggaaattgtagaaaacggaaagaaaacaaaagacaaaatgtctatggtagggaataaaagtttaagatattataaaattatgtgtattttctcttttacataaatcatttgtgaaaagtgtgctaaactttttttacaagagtgatattaattaggatttatttttcaatataatttggagaccctttgttatccaaataaaaatgatgagtttttgtgcctgtattcaaatatgtatgcatgtgataacccttgaaagctaaagcccttcttaacttttgagttgatggaattagaattcaaagatttgaatgaaatgatttaacctttatcctccaattcttacagtgcccagttctcctgtgctatctttgctttgtacaatagtgcatcttccactttctagagagaaagcatgcacttgttatttggaaaactgggctaaatatataacagtatccaaagttataccataataatttattgtaattgtgtattacatagctttgtttacccagatataggtgcgttcttttttttctgttagtcatctgtgacttttgttctggaatacaggtttttaaatatatcttaacagtctgactaacttaaaataatttattcttcccttaaaacatttttctgtgtttttgtgcatcaaatattgtagagttgaaatcttagagattgcttatcgaaatataaatttaggggaagttaaaaatcgattggcaaatttgtagcatttattcactgattaaatcttttccacttttgtgaaaaccataccagtggtttacatcatattgtaatgtgttcatctcattcttctttttatccctaaacctagctaaaagttactgcaaagaaatctttggctgccacaagtagatgctctctactacaagagctggatttccattactcactcttgctcttacattaaagttgttgattaaatactttttctctacatcttaaaaaaaaaaaaaaaaaa

SEQ ID NO: 2292 - DNA, 2408 bp, Homo Sapiens
  NM_004237
cgggtcaggaggtggtgcgcctcgcgcggcagattcgaagctagggcggggcccgcgggctgaggcagcggctgtggcggcgacgctgggcgtgaggtggcggcggccgcgccctggttgggtccccactgctctcgggggcgccatggacgaggccgtgggcgacctgaagcaggcgcttccctgtgtggccgagtcgccaacggtccacgtggaggtgcatcagcgcggcagcagcactgcaaagaaagaagacataaacctgagtgttagaaagctactcaacagacataatattgtgtttggtgattacacatggactgagtttgatgaaccttttttgaccagaaatgtgcagtctgtgtctattattgacacagaattaaaggttaaagactcacagcccatcgatttgagtgcatgcactgttgcacttcacattttccagctgaatgaagatggccccagcagtgaaaatctggaggaagagacagaaaacataattgcagcaaatcactgggttctacctgcagctgaattccatgggctttgggacagcttggtatacgatgtggaagtcaaatcccatctcctcgattatgtgatgacaactttactgttttcagacaagaacgtcaacagcaacctcatcacctggaaccgggtggtgctgctccacggtcctcctggcactggaaaaacatccctgtgtaaagcgttagcccagaaattgacaattagactttcaagcaggtaccgatatggccaattaattgaaataaacagccacagcctcttttctaagtggttttcggaaagtggcaagctggtaaccaagatgtttcagaagattcaggatttgattgatgataaagacgccctggtgttcgtgctgattgatgaggtggagagtctcacagccgcccgaaatgcctgcagggcgggcaccgagccatcagatgccatccgcgtggtcaatgctgtcttgacccaaattgatcagattaaaaggcattccaatgttgtgattctgaccacttctaacatcaccgagaagatcgacgtggccttcgtggacagggctgacatcaagcagtacattgggccaccctctgcagcagccatcttcaaaatctacctctcttgtttggaagaactgatgaagtgtcagatcatataccctcgccagcagctgctgaccctccgagagctagagatgattggcttcattgaaaacaacgtgtcaaaattgagccttcttttgaatgacatttcaaggaagagcgagggcctcagcggccgggtcctgagaaaactcccctttctggctcatgcgctgtatgtccaggcccccaccgtcaccatagaggggttcctccaggccctgtctctggcagtggacaagcagtttgaagagagaaagaagcttgcagcttacatctgatcctgggcttccccatctggtgcttttcccatggagaacacacaaccagtaagtgaggttgccccacacagccgtctcccagggaatcccttctgcaaaccaaacgttacttagactgcaagctagaaagccaccaaggccaggctttgttaaaagaagtgtattctatttatgttgttttaaaatgcatactgagagacaaacatcttgtcattttcactgtttgtaaaagataattcagattgtttgtctccttgtgaagaaccatcgaaacctgtttgttcccagcccacccccagtggatgggatgcataatgccagcaagttttgtttaacagcaaaaaaggaagattaatgcaggtgttatagaagccagaagagaaactgtgtcaccctaaagaagcatataatcatagcattaaaaatgcacacattactccaggtggaaggtggcaattgctttctgatatcagctcgtttgatttagtgcaaaaatgttttcaagactatttaatggatgtaaaaaagcctatttctacattataccaactgagaaaaaaatggtcggtaaagtgttctttcataataaataatcagacatggtcccatttgcaggaaaagtgcagactctgagtgttccagggaaacacatgctggacatcccttgtaacccggtatgggcgcccctgcattgctgggatgtttctgcccacggttttgtttgtgcaataacgttatcacatttctaatgaggattcacattaatataatataaaataaataggtcagttactggtctctttctccgaatgttatgttttgcttttatctcacagtaaaataaatataattaatggtttgcatgtgaaattcacttttgaaagaacatgttaccttaccttttgttttagaagttttcaagtattaaaatattttttagaattttaaaaaaaaaaaaaaaaaa

SEQ ID NO: 2293 - DNA, 6428 bp, Homo Sapiens
  NM_004238
gctagtggaagttactgccgcgccaccgagtccggaccggagactttggggcctaactagtgaatggtagtgtctagaaagggtatgtcccttcaagagagaggtgccaatgtccaaccggcctaataacaatccaggggggtcactgcgacgttcacagaggaacactgccggggcccaaccacaagacgactcaataggaggaagaagctgcagttcatcatctgctgtgatagttccacaaccagaggatccagacagagccaatacttcagaaagacaaaaaacggggcaggtgcctaagaaagacaattctcgaggagtgaagcgcagtgctagtccagactacaacaggaccaattctcctagctctgcaaaaaaaccaaaagcacttcagcatactgaatctccctcagaaacaaataagccacatagtaagtcaaagaagagacatttagaccaggagcaacaactgaaatctgcacaatcaccatcaacaagcaaggctcataccaggaagagtggggccactggcggttcacggagtcagaaaagaaaaaggacagagagttcttgtgtaaagagtggctccgggtctgaatcaactggtgcagaagagagatctgcgaaacctaccaagctggcttcaaaatcagccacctcagccaaagctgggtgtagcaccatcactgattcttcttctgctgcctctacttcctcctcgtcttctgctgtagcctcggcctcctccactgtaccaccaggtgccagagtgaaacaaggaaaagatcagaacaaggccaggcgttcccgttcagcgtccagtcccagccccagaagaagtagcagggaaaaggaacagagtaaaactggtggctcttcaaaatttgattgggctgctcgtttcagccctaaagttagccttcctaaaacaaaactgtctcttccagggtcttctaagtcagagacatcaaaacctggaccttctggattacaggccaaattagcaagtttaagaaaatctacgaagaaacgcagtgagtctccacctgctgagctccccagtttgaggcggagcacacgccaaaagaccacgggctcctgtgctagtaccagtcggcgaggctctggcctgggcaaaagaggagcagctgaagctcgtcgacaggagaaaatggcagaccctgaaagcaaccaggaggcagtaaattcttcagctgctcggacagatgaagctccccaaggagctgcaggggctgttggcatgaccacctctggggagagtgaatcagatgattccgagatgggacgtttgcaagctttgttagaggcaaggggtcttccccctcacctatttggtcctcttggtcctcggatgtcacagcttttccatagaacaattggaagtggagctagttctaaggcccagcagctactacaaggattgcaagccagtgatgaaagtcaacagcttcaggcagttattgagatgtgtcagttactggtcatgggaaatgaggagacactgggagggtttcctgtcaagagtgttgttccagctttgattacgttacttcagatggagcacaattttgatattatgaaccatgcttgtcgagccttaacatacatgatggaagcacttcctcgatcttctgctgttgtagtagatgctattcctgtctttttagaaaagctgcaagttattcagtgtattgatgtggcagagcaggccttgactgccttggagatgttgtcacggagacatagtaaagccattctacaggcgggtggtttggcagactgcttgctgtacctagaattcttcagcataaatgcccaaagaaatgcattagcaattgcagctaattgctgccagagtatcacgccagatgaatttcattttgtggcagattcactcccattgctaacccaaaggctaacacatcaggataaaaagtcagtagaaagcacttgcctttgttttgcacgcctagtggacaacttccagcatgaggagaatttactccagcaggttgcttccaaagatctgcttacaaatgttcaacagctgttggtagtgactccacccattttaagttctgggatgtttataatggtggttcgcatgttttctctgatgtgttccaactgtccaactttagctgttcaacttatgaaacaaaacattgcagaaacgcttcactttctcctgtgtggtgcctccaatggaagttgtcaggaacagattgatcttgttccacgaagccctcaagagttgtatgaactgacatctctgatttgtgaacttatgccatgtttaccaaaagaaggcatttttgcagttgataccatgttgaagaagggaaatgcacagaacacagatggtgcgatatggcagtggcgtgatgatcggggcctctggcatccatataacaggattgacagccggatcattgagcaaatcaatgaggacacgggaacagcacgtgccattcagagaaaacctaacccgttagccaatagtaacactagtggatattcagagtcaaagaaggatgatgctcgagcacagcttatgaaagaggatccggaactggctaagtcttttattaagacattatttggtgttctttatgaagtgtatagttcctcagcaggacctgcggtcagacataagtgccttagagcaattcttaggataatttattttgcggatgctgaacttctgaaggatgttctgaaaaatcatgctgtttcaagtcacattgcttccatgctgtcaagccaagacctgaagatagtagtgggagcacttcagatggcagaaattttaatgcagaagttacctgatatttttagtgtttacttcagaagagaaggtgtaatgcatcaagtaaaacacttagcagaatcagagtctttgttgacaagtccaccaaaggcatgtacgaatggatcgggatccatgggatccacaacttcagtcagcagtgggacagccacagctgccactcatgctgcagctgacttgggatcacccagcttgcagcacagcagggatgattctttagatctcagccctcaaggtcgattaagtgatgttctaaagagaaaacgactgccaaaacgagggccaagaaggccaaagtactcacctccaagagatgatgacaaagtagacaatcaagctaaaagccccaccactactcagtcacctaaatcttctttcctggcaagcttgaatccaaaaacatggggaaggttaagtacacagtccaacagcaacaacattgagccagcacggactgcgggaggtagtggccttgccagggctgcctcaaaggataccatctccaataatagagaaaaaattaaaggttggattaaggagcaggcacataaatttgtagaacgttatttcagttctgagaatatggatggaagcaaccctgcattgaatgtccttcagagactttgtgctgcaaccgaacaactcaacctccaggtggatggtggagctgagtgccttgtagaaatccgtagcatagtctcagagtcagatgtttcatcatttgaaatccaacatagtggatttgtgaagcagctgttgctttatttgacatctaaaagtgaaaaggatgctgtgagcagagagatcagattaaagcgatttcttcatgtatttttttcttctccacttcctggagaagagcccattggaagagtggaaccagtgggtaatgcacctttgttggcattagttcacaagatgaacaactgcctcagccagatggaacaatttccagtcaaagtacatgatttccctagtggaaatgggacaggaggcagcttttctctcaacagaggatcacaggctttaaaatttttcaacacacatcaattaaaatgccagttacaaaggcatccagactgtgcaaatgtgaagcagtggaagggtggacctgtcaagattgaccctctggctttggtacaagccatcgagagataccttgtagttagagggtatggaagagtaagagaagatgatgaagacagcgatgacgatggatcagatgaggaaatagatgagtctctggctgctcagttcctaaattcaggaaatgtaagacacaggctgcagttttatattggagaacatttgctgccgtataacatgactgtgtatcaggcagtacggcagtttagtatacaggctgaagatgaaagagaatccacagatgatgagagcaatcctctaggcagagctggtatttggacaaagactcatacaatatggtataaacctgtgagagaggatgaagaaagtaataaagattgtgttggtggtaaaagaggaagagcccaaacagctccaacgaaaacttcccctagaaatgcaaaaaagcatgatgagttatggcacgatggagtgtgcccatcagtatcaaatcctttagaagtttacctcattcccacaccacctgaaaatataacatttgaagacccgtcattagatgtgatccttcttttaagagttttacatgctatcagtcgatactggtattacttgtatgataatgcaatgtgcaaggaaattattccaactagtgaatttattaacagtaagttaacagcaaaagcaaataggcaacttcaagatcctttagtaatcatgacaggaaacatcccaacatggcttactgagctaggaaaaacctgcccatttttctttccttttgatacccggcaaatgcttttttatgtaactgcatttgatcgggaccgagcaatgcaaagattacttgataccaacccagaaatcaaccagtctgattctcaagatagcagagttgcacctagattggatagaaaaaaacgtactgtgaaccgagaggagctgctgaaacaggcggagtctgtgatgcaggacctcggcagctcacgggccatgttagaaatccagtatgaaaatgaggttggtacaggtcttgggcctacactggagttttatgcgcttgtatctcaggaactacagagagctgacttgggtctttggagaggtgaagaagtaactcttagcaatccaaaagggagccaagaagggaccaagtatattcaaaacctccagggcctgtttgcgcttccctttggtaggacagcaaagccagctcatatcgcaaaggttaagatgaagtttcgcttcttaggaaaattaatggccaaggctatcatggatttcagattggtggaccttccccttggcttacccttttataaatggatgctacggcaagaaacttcactgacatcacacgatttgtttgacatcgacccagttgtagccagatcagtttatcacctagaagacattgtcagacagaagaaaagacttgaacaagataaatcccagaccaaagagagtctacagtatgcattagaaaccttgactatgaatggctgctcagttgaagatctaggactggatttcactctgccagggtttcccaatatcgaactgaagaaaggagggaaggatataccagtcactatccacaatttagaggagtatctaagactggttatattctgggcactaaatgaaggcgtttctaggcaatttgattcgttcagagatggatttgaatcagtcttcccactcagtcatcttcagtacttctacccggaggaactggatcagctcctttgtggcagtaaagcagacacttgggatgcaaagacactgatggaatgctgtaggcctgatcatggttatactcatgacagtcgggctgtgaagtttttgtttgagattctcagtagttttgataatgagcagcagaggttatttctccagtttgtgactggtagcccaagattgcctgttggaggattccggagtttgaatccacctttgacaattgtccgaaagacgtttgaatcaacagaaaacccagatgacttcttgccctctgtaatgacttgtgtgaactatcttaagttgccggactattcaagcattgagataatgcgtgaaaaactgttgatagcagcaagagaagggcagcagtcgttccatctttcctgattatagcaagaaatgcagtgtctgcctgttacagcaaaagaaacaaatcatgatttcttttctaatgttatcacctgagtcaaggaaacatgttacgccttcttgttgtaggaaaaacggcttgcagattataaagagacatttggttgatattcattaatggccccatggacttaaagtgatcaggccctaaaacgttgttgtgatgaggtttctttagcaagttcttgtttaaattatcatttatttgatgagtgaagtttttaacatgctttgctgtgtgaaatttaaaaaagggatgtttttccaggctggaacaataaatgtggctgtgcagttt

SEQ ID NO: 2294 - DNA, 4231 bp, Homo Sapiens
  NM_004244
atatgtagccttttcattttcatgaaagtgaagtgatttttagaattcttagttgttttctttagaagaacatttctagggaataatacaagaagatttaggaatcattgaagttataaatctttggaatgagcaaactcagaatggtgctacttgaagactctggatctgctgacttcagaagacattttgtcaacttgagtcccttcaccattactgtggtcttacttctcagtgcctgttttgtcaccagttctcttggaggaacagacaaggagctgaggctagtggatggtgaaaacaagtgtagcgggagagtggaagtgaaagtccaggaggagtggggaacggtgtgtaataatggctggagcatggaagcggtctctgtgatttgtaaccagctgggatgtccaactgctatcaaagcccctggatgggctaattccagtgcaggttctggacgcatttggatggatcatgtttcttgtcgtgggaatgagtcagctctttgggattgcaaacatgatggatggggaaagcatagtaactgtactcaccaacaagatgctggagtgacctgctcagatggatccaatttggaaatgaggctgacgcgtggagggaatatgtgttctggaagaatagagatcaaattccaaggacggtggggaacagtgtgtgatgataacttcaacatagatcatgcatctgtcatttgtagacaacttgaatgtggaagtgctgtcagtttctctggttcatctaattttggagaaggctctggaccaatctggtttgatgatcttatatgcaacggaaatgagtcagctctctggaactgcaaacatcaaggatggggaaagcataactgtgatcatgctgaggatgctggagtgatttgctcaaagggagcagatctgagcctgagactggtagatggagtcactgaatgttcaggaagattagaagtgagattccaaggagaatgggggacaatatgtgatgacggctgggacagttacgatgctgctgtggcatgcaagcaactgggatgtccaactgccgtcacagccattggtcgagttaacgccagtaagggatttggacacatctggcttgacagcgtttcttgccagggacatgaacctgctgtctggcaatgtaaacaccatgaatggggaaagcattattgcaatcacaatgaagatgctggcgtgacatgttctgatggatcagatctggagctaagacttagaggtggaggcagccgctgtgctgggacagttgaggtggagattcagagactgttagggaaggtgtgtgacagaggctggggactgaaagaagctgatgtggtttgcaggcagctgggatgtggatctgcactcaaaacatcttatcaagtgtactccaaaatccaggcaacaaacacatggctgtttctaagtagctgtaacggaaatgaaacttctctttgggactgcaagaactggcaatggggtggacttacctgtgatcactatgaagaagccaaaattacctgctcagcccacagggaacccagactggttggaggggacattccctgttctggacgtgttgaagtgaagcatggtgacacgtggggctccatctgtgattcggacttctctctggaagctgccagcgttctatgcagggaattacagtgtggcacagttgtctctatcctggggggagctcactttggagagggaaatggacagatctgggctgaagaattccagtgtgagggacatgagtcccatctttcactctgcccagtagcaccccgcccagaaggaacttgtagccacagcagggatgttggagtagtctgctcaagatacacagaaattcgcttggtgaatggcaagaccccgtgtgagggcagagtggagctcaaaacgcttggtgcctggggatccctctgtaactctcactgggacatagaagatgcccatgttctttgccagcagcttaaatgtggagttgccctttctaccccaggaggagcacgttttggaaaaggaaatggtcagatctggaggcatatgtttcactgcactgggactgagcagcacatgggagattgtcctgtaactgctctaggtgcttcattatgtccttcagagcaagtggcctctgtaatctgctcaggaaaccagtcccaaacactgtcctcgtgcaattcatcgtctttgggcccaacaaggcctaccattccagaagaaagtgctgtggcctgcatagagagtggtcaacttcgcctggtaaatggaggaggtcgctgtgctgggagagtagagatctatcatgagggctcctggggcaccatctgtgatgacagctgggacctgagtgatgcccacgtggtttgcagacagctgggctgtggagaggccattaatgccactggttctgctcattttggggaaggaacagggcccatctggctggatgagatgaaatgcaatggaaaagaatcccgcatttggcagtgccattcacacggctgggggcagcaaaattgcaggcacaaggaggatgcgggagttatctgctcagaattcatgtctctgagactgaccagtgaagccagcagagaggcctgtgcagggcgtctggaagttttttacaatggagcttggggcactgttggcaagagtagcatgtctgaaaccactgtgggtgtggtgtgcaggcagctgggctgtgcagacaaagggaaaatcaaccctgcatctttagacaaggccatgtccattcccatgtgggtggacaatgttcagtgtccaaaaggacctgacacgctgtggcagtgcccatcatctccatgggagaagagactggccagcccctcggaggagacctggatcacatgtgacaacaagataagacttcaggaaggacccacttcctgttctggacgtgtggagatctggcatggaggttcctgggggacagtgtgtgatgactcttgggacttggacgatgctcaggtggtgtgtcaacaacttggctgtggtccagctttgaaagcattcaaagaagcagagtttggtcaggggactggaccgatatggctcaatgaagtgaagtgcaaagggaatgagtcttccttgtgggattgtcctgccagacgctggggccatagtgagtgtgggcacaaggaagacgctgcagtgaattgcacagatatttcagtgcagaaaaccccacaaaaagccacaacaggtcgctcatcccgtcagtcatcctttattgcagtcgggatccttggggttgttctgttggccattttcgtcgcattattcttcttgactaaaaagcgaagacagagacagcggcttgcagtttcctcaagaggagagaacttagtccaccaaattcaataccgggagatgaattcttgcctgaatgcagatgatctggacctaatgaattcctcagaaaattcccatgagtcagctgatttcagtgctgctgaactaatttctgtgtctaaatttcttcctatttctggaatggaaaaggaggccattctgagccacactgaaaaggaaaatgggaatttataacccagtgagttcagcctttaagataccttgatgaagacctggactattgaatggagcagaaattcacctctctcactgactattacagttgcatttttatggagttcttcttctcctaggattcctaagactgctgctgaatttataaaaattaagtttgtgaatgtgactacttagtggtgtatatgagactttcaagggaattaaataaataaataagaatgttattgatttgagtttgctttaattacttgtccttaattctattaatttctaaatgggcttcctaattttttgtagagtttcctagatgtattataatgtgttttatttgacagtgtttcaatttgcatatacagtactgtatattttttcttatttggtttgaataattttcctattaccaaataaaaataaatttatttttactttagtttttctaagacaggaaaagttaatgatattgaagggtctgtaaataatatatggctaactttataaggcatgactcacaacgattctttaactgctttttgttactgtaattctgttcactagaataaaatgcagagccacacctggtgagggcacaaaaaaaaaaaaaaaaaaaaaaaaaaaaaaaaaaaaaaaaa

SEQ ID NO: 2295 - DNA, 4167 bp, Homo Sapiens
  NM_004247
atcctcagctctcaccctctttggagcagcccacgtcttgggctactcgtcttggggacccgctactccgccttgccagtccgcggcgggcatacctcggaactggtcctcaggcagagggttgtcctcccgggcagaaaggcgacagcggcgtctgcggggtccttcctggcggcgggcgcaggcgtttcctcggcgtggggcggaagcacgatctccggcagcggcctgggaactcttagctgagcaggcgagagcatcatggataccgacttatatgatgagtttgggaattatattggaccagagcttgattctgatgaagatgatgatgaattgggtagagagaccaaagatcttgatgagatggatgatgatgacgacgacgatgacgtaggagatcatgacgatgaccaccctgggatggaggtggtgctgcatgaggacaagaagtactacccaacagccgaggaggtgtatggtcctgaggtggagaccatagttcaagaggaagacactcagcctctcacagaacccattattaagccagtgaaaaccaagaaattcactctgatggagcagacattacctgttacggtgtatgagatggatttcttggcggatctgatggataactcagagctcatcagaaatgtgaccctttgtggacatctccaccatggcaagacatgttttgtggattgtttaattgaacagactcacccggaaatcagaaagcgctatgaccaagatctgtgctatactgacatcctcttcacagagcaagagagaggtgtaggcatcaaaagcactcctgtgacagtggtcttgccagacaccaaaggaaaatcttatctcttcaatatcatggacactccaggacatgtgaatttctctgatgaggtcacagctggcttgcgcatctcagatggagtggtccttttcattgatgctgctgagggggtgatgctgaacacagagcggctgatcaagcatgcggtgcaggagaggctggcagtcactgtgtgcatcaacaagattgaccggctgatcctggagctgaagctgcctccaactgatgcttattacaagctgcgccacattgtggatgaggtcaatggattaataagcatgtattccactgatgagaacctgatcctttccccactcctgggtaacgtctgcttctccagctcccagtacagcatctgcttcacgctgggctcctttgccaagatctatgccgacacctttggtgacattaattaccaagaatttgctaaaagactctggggtgacatctacttcaaccctaagacgcgaaagttcaccaaaaaggccccaactagcagctcccagagaagtttcgtggagtttatcttggagcctctttataagatcctcgcccaggttgtaggtgacgtggacaccagcctcccacggaccctagacgagcttggcatccacctgacgaaggaggagctgaagctgaacatccgccccttgctcaggctggtctgcaaaaagttctttggcgagttcacaggctttgtggacatgtgtgtgcagcatatcccttctccaaaggtgggcgccaagcccaagattgagcacacctacaccggtggtgtggactccgacctcggcgaggctatgagtgactgtgaccctgatggccccctgatgtgccacactactaagatgtacagcacagatgatggagtccagtttcacgcctttggccgggtgctgagtggcaccattcatgctgggcagcctgtgaaggtactgggggagaactacaccctggaggatgaggaagactcccagatatgcaccgtgggccgcctttggatctctgtggccaggtaccacatcgaggtgaaccgtgttcctgctggcaactgggttctgattgaaggtgttgatcaaccaattgtgaagacagcaaccataaccgaaccccgaggcaatgaggaggctcagattttccgacccttgaagttcaataccacatctgttatcaagattgctgtggagccagtcaacccctcagagctgcccaagatgcttgatggcctgcgcaaggtcaacaagagctatccatccctcaccaccaaggtggaggagtctggcgagcatgtgatcctgggcactggggagctctacctggactgtgtgatgcatgatttgcggaagatgtactcagagatagacatcaaggtggctgacccagttgtcacgttttgtgagacggtggtggaaacatcctccctcaagtgctttgctgaaacgcctaataagaagaacaagatcaccatgattgctgagcctcttgagaagggcctggcagaggacatagagaatgaggtggtccagattacgtggaacaggaagaagctgggagagttcttccagaccaagtacgattgggatctgctggctgcccgttccatctgggcttttggccctgatgcgactggccccaacattctggtggatgatactctgccctctgaggtggacaaggctcttcttggttcagtgaaggacagcatcgttcaaggtttccagtggggaaccagggagggccccctctgtgatgaattgattcggaatgtcaagtttaagatcctggatgcggtggttgcccaggagcccctgcaccggggcgggggccagatcatccccacagccaggagagtcgtctactctgccttcctcatggctactcctcgtctgatggagccttactactttgtagaggtccaggcccctgcagattgcgtctctgcagtttataccgtcctggccaggcgcagggggcacgtgactcaggatgcacccatcccaggctcccctctgtacaccatcaaagcttttatcccggccatcgactcttttggctttgagactgatctccggactcacacccagggacaagccttttctctgtctgtcttccaccactggcagattgtgcctggtgatcccctggacaagagcattgtcatccgccccttggagccacagccagctcctcacctggcccgggaattcatgatcaaaacccgccgtaggaagggcctcagtgaagatgtgagcatcagcaaattcttcgatgatcctatgttgctggaacttgccaaacaggatgttgtgctcaattaccccatgtgagtgcgtggactcctgggagctcctgctccctacagtgggctgcaactcctgtacttgaagctgagacctcatatgacgtggccttcgtgttgtcagagagtgtctggaagctgctgttgccatcttgaacaactcaccaacctccaacccagagccccagtgagagaggagcatttggcctcctgcttccttctgtggcctctgccgggctccattcccaaggaaaagagaggagcttgggctcacagaaagagaaggggatgaaaccccaaggggccctatctttgggatttacatggaattttattttctacaagtttgaccttagccatggtttgcaagtgaacagaacattctgacctctgtcttgctctgctcctttcatcctcgtctcccctgccccgtctggtgcttacattctgaatatatgtcatctcccaagaggcttcactgcctctgcttccagctgcagcctccttcctgcctgggtccccagggaagccgcctgccttttaattcagtgttcccatgagcgccaaggccccattattgcccccttgctcccactccatgctgcttctgggtggaacctaagatggcttgggagttgttgggttcctgcgatcagaagtctaccccaccacctcctcaggaaactgctgcctcccctaagaatcttccttgccctggagtagggggccagagcactttgatttccagccatttactccaagtcctctccccagctaccaccagtcccttactctgttctcccccagtgaaaaagagtctgttgattttcctcaaaactgctttattaggaatgtaccagggattgagttaggggagttggacagccccggctcctataggagtcctacttctctccagcatcctgtgccatcctcttgacgtaatcgctgtacattgtgtacacagcacctgtgtgagagaaaagaaataatgccccttggcatcaaacccttc

SEQ ID NO: 2296 - DNA, 2013 bp, Homo Sapiens
  NM_004252
gctcagacgccgcgcggggcggggattggtctgtggtcctctctcggctcctcgcggctcgcggcggccgacggttcctgggacacctgcttgcttggcccgtccggcggctcagggcttctctgctgcgctcccggttcgctggacgggaagaagggctgggccgtcccgtcccgtccccatcggaaccccaagtcgcgccgctgacccgtcgcagggcgagatgagcgcggacgcagcggccggggcgcccctgccccggctctgctgcctggagaagggtccgaacggctacggcttccacctgcacggggagaagggcaagttgggccagtacatccggctggtggagcccggctcgccggccgagaaggcggggctgctggcgggggaccggctggtggaggtgaacggcgaaaacgtggagaaggagacccaccagcaggtggtgagccgcatccgcgccgcactcaacgccgtgcgcctgctggtggtcgaccccgagacggacgagcagctgcagaagctcggcgtccaggtccgagaggagctgctgcgcgcccaggaagcgccggggcaggccgagccgccggccgccgccgaggtgcagggggctggcaacgaaaatgagcctcgcgaggccgacaagagccacccggagcagcgcgagcttcggcctcggctctgtaccatgaagaagggccccagtggctatggcttcaacctgcacagcgacaagtccaagccaggccagttcatccggtcagtggacccagactccccggctgaggcttcagggctccgggcccaggatcgcattgtggaggtgaacggggtctgcatggaggggaagcagcatggggacgtggtgtccgccatcagggctggcggggacgagaccaagctgctggtggtggacagggaaactgacgagttcttcaagaaatgcagagtgatcccatctcaggagcacctgaatggtcccctgcctgtgcccttcaccaatggggagatacagaaggagaacagtcgtgaagccctggcagaggcagccttggagagccccaggccagccctggtgagatccgcctccagtgacaccagcgaggagctgaattcccaagacagccccccaaaacaggactccacagcgccctcgtctacctcctcctccgaccccatcctagacttcaacatctccctggccatggccaaagagagggcccaccagaaacgcagcagcaaacgggccccgcagatggactggagcaagaaaaacgaactcttcagcaacctctgagcgccctgctgccacccagtgactggcagggccgagccagcattccaccccacctttttccttctccccaattactcccctgaatcaatgtacaaatcagcacccacatcccctttcttgacaaatgatttttctagagaactatgttcttccctgactttagggaaggtgaatgtgttcccgtcctcccgcagtcagaaaggagactctgcctccctcctcctcactgagtgcctcatcctaccgggtgtccctttgccaccctgcctgggacatcgctggaacctgcaccatgccaggatcatgggaccaggcgagagggcaccctcccttcctcccccatgtgataaatgggtccagggctgatcaaagaactctgactgcagaactgccgctctcagtggacagggcatctgttaccctgagacctgtggcagacacgtcttgttttcatttgatttttgttaagagtgcagtattgcagagtctagaggaatttttgtttccttgattaacatgattttcctggttgttacatccagggcatggcagtggcctcagccttaaacttttgttcctactcccaccctcagcgaactgggcagcacggggagggtttggctacccctgcccatccctgagccaggtaccaccattgtaaggaaacactttcagaaattcagctggttcctccaaacccttcaaaaaaaaaa

SEQ ID NO: 2297 - DNA, 2978 bp, Homo Sapiens
  NM_004257
gcgggccggagcggggcggcggggccccaggccgcggggcggcgcgggacggcgggcgccggcgccgcagatcagccagtagacatgatgagcatcaaagcctttacgcttgtctctgctgtggagcgggagctgctgatgggcgacaaggagcgcgtcaacatagagtgcgtggagtgctgcggcagggacctctacgtgggcaccaacgactgcttcgtctaccacttcctgttggaggagaggccagtgcctgctgggccagccacgttcactgccaccaaacagctgcagagacacttgggcttcaagaagcccgtgaacgagctgcgtgcggcctcagcactcaacaggctgctggtgctgtgtgacaactccatcagcctggtcaacatgctgaacctcgagccagtgccttcgggggcccgcatcaagggggcagccacgtttgcactgaacgagaaccctgtgagtggggaccccttctgtgtagaagtttgcatcatctctgtcaaacgcagaaccatccagatgtttctggtgtacgaggaccgggtgcagatcgtcaaggaggtgtcgactgccgagcagcccctcgctgtggctgtggacggccacttcctgtgtctggctctgaccactcagtacatcatccacaattacagcacaggcgtctcccaggacctgtttccctactgcagtgaggagaggccgccgatcgtcaagaggatagggagacaggagttcctgctggcgggccccggagggctgggcatgtttgccacagtcgcagggatatcccagcgcgcccccgtgcactggtcggagaatgtgattggggcggctgtgtcctttccatacgtcatagcgctcgatgacgaattcatcacagtccacagcatgttggatcagcaacagaagcagacgctgccctttaaggagggccatatcctacaggactttgaaggaagagtgatcgttgccacaagtaaaggagtttacatcttggttccattacctttggaaaaacaaatacaggatcttctagcaagccgcagagtagaagaggctttggttttagcaaaaggagcccggaggaacattccaaaggaaaaatttcaggtaatgtacagaaggattctgcagcaggcgggatttatacagtttgcacaacttcagttcctggaagctaaagagctcttcagaagcggccagcttgatgtccgggagctgatctctctctaccccttcctgttgcccacctcctcctccttcacccggtcccaccctcctcttcatgagtacgcagacctgaaccagctgacccagggggaccaggagaagatggccaagtgcaaacgcttcctcatgagctacctgaacgaggtccgcagcacagaggtagcaaatggctacaaggaggacatcgacacagccttgctcaaactgtatgcagaggctgaccacgacagcctgctggacctcctggtcactgagaacttctgtcttctgacggacagtgctgcctggctagagaagcacaaaaagtattttgcacttggactgctctatcattataataaccaagatgctgctgcagttcagttgtgggtgaacattgtgaatggcgatgtccaggactccacacgctcagacctgtatgaatacatcgtggattttcttacctactgcttagacgaggaactagtgtgggcctatgctgattgggtcctgcagaaaagtgaagaggtcggagttcaggttttcaccaagagacctttggatgaacagcagaagaacagttttaatccagacgacattatcaattgccttaaaaaataccctaaagcccttgtgaagtatctggaacatcttgtgatagacaagagactgcagaaagaagagtatcacacccacttagctgtgctgtacctggaagaggtgctgctgcagagggcctccgccagtggcaagggtgcagaggccaccgagacgcaggccaagctgcggcggctgctccagaaatctgatttataccgagtccactttcttctcgagaggctgcagggagctggcctgcccatggagagcgccatcctgcacgggaagctgggcgagcatgagaaggcgctgcatatcctggtgcacgagctgcaggactttgcagcggccgaggactactgcctgtggtgctccgagggccgagacccaccccaccgccagcaactctttcacacgctgctggccatctacctgcatgctggccccactgcccacgagctggccgtggctgccgtggacctgctgaaccgccacgccaccgaatttgatgcagcccaggtgctgcagatgctgcctgacacctggtcagtgcagctcctctgcccattcctgatgggggccatgagggacagcatccatgccaggaggaccatgcaggtggctctcggcctggccaggtccgaaaacttaatctacacctacgataagatgaagttgaaaggaagctcaatccaactctcagacaaaaagctttgtcagatatgccaaaatcccttttgtgagcctgtgtttgttagatacccaaatggtggtcttgtgcacacccactgtgccgccagcagacacacaaaccccagctcatccagtcctggcactcggacttgaaaagcttggcccaagggtgcgaggggaactccgagttctttctgagcctgctggacatgaagagcagatgaccaccatgctctgtgtcagccaggacgaagggagacatctgggtgccagggagccttccgtccatacgcaacaaggactcctcgctgctgaccaggctctatgaatgtacatggaatgaccaggctctatgaatgtacatggaaaacccctaaaaatccccaaaacagaaacatacaagagttcacctgtccaggtacatagtaatccaagacagaggtctactttgaaaaaaaaaaaaa

SEQ ID NO: 2298 - DNA, 4292 bp, Homo Sapiens
  NM_004263
ggctgagccggaccgagccgagaggacccgagtggggccgaggccagtagccccggggccctgagcagaggccgtagcttgcgccgcacccgcggccaggcggagccaaagatgccggcctctgctgcgcggccccgcccgggtcccgggcagcctacagcctcgcccttcccgctactgctgctggcggtgctgagcggcccggtatccggccgcgtcccccgctcggtgcccagaacctcgcttccaatctctgaggctgactcctgtctcacccggttcgcagtccctcacacatacaattactctgttctccttgtggatcctgcctcccacacactttatgttggcgcccgggacaccatcttcgctttatccctgcccttctcaggggagagaccccgcaggattgactggatggttcctgaggctcacagacagaactgtaggaagaaaggcaagaaagaggacgaatgtcacaattttgtccagattctcgccattgccaatgcctctcacctcctcacttgtggcaccttcgcttttgatccgaagtgcggggttattgatgtgtccaggttccagcaggttgaaagacttgagagtggccgggggaaatgtccttttgagccagctcagcggtcagcagctgtaatggctgggggggtcctctatgctgccactgtgaaaaactacctggggacggagccaattatcaccagagcagtgggtcgtgccgaggactggattcggacagataccttgccttcctggctgaacgccccagcctttgtcgcagccgtggccttgagcccagccgaatggggggatgaagatggagacgacgaaatctacttcttctttacggagacttcccgagcatttgactcatacgagcgcattaaagtcccacgggtggcccgtgtgtgtgcgggggacctcgggggccggaagaccctccagcagagatggacgacgtttttgaaagctgacctgctctgtccagggcctgagcatggccgggcctccagtgtcctgcaggatgttgctgtgcttcgacctgagcttggggcagggactcccatcttttatggcatcttttcttcccagtgggagggggctactatctctgctgtctgtgccttccgaccacaagacattcggacagtgctgaatggtcccttcagagaactaaaacatgactgcaacagaggactgcctgtcgtggacaatgatgtgccccagcccagacctggagagtgcatcaccaacaacatgaagctccggcactttggctcatctctctccctgcctgaccgcgtactcaccttcatccgggaccacccactcatggacaggccagtgtttccagctgatggccaccccctgctggtcactacagatacagcctatctcagagtcgtggcccacagggtgaccagcctctcagggaaagagtatgatgtgctctacctggggacagaggatggacacctccaccgagcagtgcggatcggagctcagctcagcgttcttgaagatctggccttattcccagagccacagccagttgagaacatgaaattgtaccacagctggctcctggttggctcccgtactgaggtgacacaagtgaatacaaccaactgtggccgtctccagagctgctcagagtgcatcctggcccaggacccagtctgtgcctggagcttccggctggatgagtgtgtggcccatgccggggagcaccgagggttggtccaagacatagagtcagcagatgtctcctctttgtgtcctaaagagcctggagaacgtccagtagtgtttgaagttcccgtggctacagctgcgcatgtggtcttgccatgttctccaagctcagcatgggcatcctgtgtgtggcaccagcccagtggagtgactgcactcaccccccggcgggatggactggaggtggtggtgaccccaggggccatgggcgcttatgcctgtgaatgtcaggagggtggggcagcccatgtggtagcagcttacagcttggtatggggcagccagcgagatgctccgagccgggcccacacagtgggggcgggactggctggcttcttcttggggattctcgcagcatccctgactctcattctgattggtcggcgtcagcagcgacggcgacagagggaacttctggctagagacaaggtgggcctggacctgggggctccaccttctgggaccacaagctacagccaagaccctccctccccctctcctgaagatgagcggttgccgctggccctggccaagaggggcagtggctttggtggattctcaccacccttcctgcttgatccttgcccaagcccagcccacattcggctaactggggctcctctagccacatgtgatgaaacatccatctagagctgggcaaatgaccactagtgtataagtgatcactggaacggagtgaccactgagatgctgggggtcactgggcctggaagaccatcccagcctctgagttctctttgagtatgagtgattacttggattttagtatctgttctctctgagcctggatgggcttggggccagacctttgcctgattcctgattcccatgagaaatcagaactgctttctgcagcaaatcagggcttccccctaacatctgaactcctgtaaaccttcatccctggccccctatcttgggcccattagttttggggatggggcacagggcatagctatgactttgctttctggttggagcctggccggaaggaagagccctggaggtggttgggggcaaatgtgccctgagtccttggggtggttctgcttattcttcaagtttatctgaatctgtggggagtgcatgatccccatgttgcaatatggagtctctgccctgagatcttccccatctcagttttccttccatgaaagagtacgtgtaaatacatagtgttcataagagacctggccacatgtgcatgaatgactgggccgatgcttaggaatatttatgagggatggggagggagacaattggaatgggggcgttgcctgcagaactttagaccctgtagccatagagggaatggcgttcctttctaaaaggaactgaaacactgcccctctccccattgccccacaaccttactctaaatttgagtagagaaaagctcctaaagtgaccttccgggtgggaagggcagcagtacacatgaccccatccttttctttgtttttaccccctggctgccaccactgccatgtcacagctgctttctctggctggagtgtaggctgtaccccatttccttggctcccattaaaaatcaacaacattctaatgattagggaacaacagaaggggaacagtcataggatatacgagcagtataaagatacgtttgcaatcagtgactactcagggtgacacccttgccctaaagcaggagtcccccctacctggggtccatggactccctgaaattgtatgcaaaatgttgtttgtacatgtgtgtctgtatgtctctgtggggaggttttatggcttttgtcagattttcaaggccttaacaaagttaaaggaccactgccctgaggttactgcactgaggccaagttaggatggcatcactctgtggcagctctccctggacttgccctgcctggaacagggtgatttgctggaatggagttaccactgagatgccaaaggttgctgggtctggaagactgttgtggcctctcagttctctttgagtctgactgactgtggccagtccctggactggtagctgctggaggccttcttgtttctccagtccctggaagctgagctctatgtgtatttgatgacattgtcagctcttaccaaacgtcaagacctcttcctgcttgaccactcgcacatggctctaggcttctcctgctgagtcctggtcttggcctgtgaatgtgcctcgttcatccctggtgcttgagcccctcaagctccagtcaatgatccagtccttcccctttgaagttttctgctctactttccttggcagcagcctgtgaactactcaaaagagtccccttgggtttggaattatcagtggctttgccactagtaaatgtgtgatcttcggcaagtaacctaacctagggacatcagtttactcatctgcgaagtggggataataaaacctacctcagggttgcttcaaggattaaatgagaaaatatgtcaacaataaagacctgtctgtaccaatgaaaaaaaaaaaaaaaaaa

SEQ ID NO: 2299 - DNA, 1404 bp, Homo Sapiens
  NM_004269
gagctgctgtggcggcggcaacatggcggacgtgataaatgtcagtgtgaacctggaggccttttcccaggccattagtgccatccaggcgctgcgctccagcgtgagcagggtgttcgactgcctgaaggatgggatgcggaacaaggagacgctggagggccgggagaaggcctttattgcgcacttccaggacaacttacattcggtcaaccgggacctcaatgagctggaacgtctgagcaatctggtaggcaagccatctgagaaccatcctcttcataacagtgggctgttaagcctggatcctgtgcaggacaaaactcctctctatagtcaactccttcaagcatataagtggtcaaacaagttgcagtaccatgcaggactagcatctggccttttaaatcagcagtcattgaagcgttccgctaatcagatgggagtatctgccaaacgtagaccaaaggctcagcccacaactcttgtcctaccacctcaatatgttgatgatgtgatcagccgcattgacaggatgtttcctgaaatgtccatccacttatccagacccaatggaacatcagcaatgcttctggtgaccttgggaaaggtgttgaaagtgatcgtcgtcatgcggagcctgttcattgatcgaacaatagtaaagggatataacgagaatgtctacacagaagatggcaagcttgatatatggtccaaatccaactatcaagtattccagaaggtgacagaccatgccaccactgccctgctccactatcagctgccccagatgccggatgtcgtggtccgatccttcatgacctggttaagaagttacataaagctgttccaggccccgtgccagcgctgcgggaagtttctgcaggacggccttcccccgacatggagggatttccgaaccctcgaagccttccatgacacctgccggcagtagcccccacgctggccccagcctcagaccccacccagcaccttcccagacacgcaggaagcccacagaaggctcagctggttcctcactgcccagatgtgtacagctgctcctccctttcataaagcagcgccatgtgtgcagaggccactcttgaagagcagactccctctgtggctgatgggactaattattcccactagccagcggactgaaggcaaagaagacctttctagaacctggtagaaggaagctgtgcagcatgctcctcgtccatgtgtgtcggcagtgctggtgtctgtcgtctccgcgagctgttactggaatgagcccttgtgttcatgggtatcgtcatgcggggttcttgtgttttgtggggcttgggttttggtaacttatttttataagcaataaaccttttgtatcctgaaaaaaaaaaaaaaaaaaaa

SEQ ID NO: 2300 - DNA, 1116 bp, Homo Sapiens
  NM_004270
gacagagtcggtggcttcttcccggaggagaccggaagttggtttcggctgcagaggggaaggcggctaccagtgtaaagccagagctgaggttcttgatagtccacaatgggtgaaccacagcaagtgagtgcacttccaccacctccaatgcaatatatcaaggaatatacggatgaaaatattcaagaaggcttagctcccaagcctccccctccaataaaagacagttacatgatgtttggcaatcagttccaatgtgatgatcttatcatccgccctttggaaagtcagggcatcgaacggcttcatcctatgcagtttgatcacaagaaagaactgagaaaacttaatatgtctatccttattaatttcttggaccttttagatattttaataaggagccctgggagtataaaacgagaagagaaactagaagatcttaagctgctttttgtacacgtgcatcatcttataaatgaataccgaccccaccaagcaagagagaccttgagagtcatgatggaggtccagaaacgtcaacggcttgaaacagctgagagatttcaaaagcacctggaacgagtaattgaaatgattcagaattgcttggcttctttgcctgatgatttgcctcattcagaagcaggaatgagagtaaaaactgaaccaatggatgctgatgatagcaacaattgtactggacagaatgaacatcaaagagaaaattcaggtcataggagagatcagattatagagaaagatgctgccttgtgtgtcctaattgatgagatgaatgaaagaccatgaaagatgtttctttttctttttttccttttgataatagcatcatatattagttcattttcttttggacagtcttaagagaagtttcactaaaaatgtaaacagctttaatcttgactccaaatttttcaattatgagatgtcataggcagtaatttcgctgtataacaagcatagacaaatgagtgtccctgcactaagaagaatcactttaaaaagcaaagtgttagctgctgttgtatgggacattcctatgttttagagttgcagtaaaactttgatgataacctcaaaaaaaaaaaaaaaaaa

SEQ ID NO: 2301 - DNA, 895 bp, Homo Sapiens
  NM_004271
ttatttttctgtgtgtcccatacaggcccccaccatgaagggtttcacagccactctcttcctctggactctgatttttcccagctgcagtggaggcggcggtgggaaagcctggcccacacacgtggtctgtagcgacagcggcttggaagtgctctaccagagttgcgatccattacaagattttggcttttctgttgaaaagtgttccaagcaattaaaatcaaatatcaacattagatttggaattattctgagagaggacatcaaagagctttttcttgacctagctctcatgtctcaaggctcatctgttttgaatttctcctatcccatctgtgaggcggctctgcccaagttttctttctgtggaagaaggaaaggagagcagatttactatgctgggcctgtcaataatcctgaatttactattcctcagggagaataccaggttttgctggaactgtacactgaaaaacggtccaccgtggcctgtgccaatgctactatcatgtgctcctgactgtggcctgtagcaaaaatcacagccagctgcatctcgtgggacctccaagctcctctgactgaacctactgtgggaggagaagcagctgatgacagagagaggctctacaaagaagcgcccccaaagagtgcagctgctaattttagtcccaggaccagacatccccagactccacagatgtaatgaagtccccgaatgtatctgtttctaaggagcctcttggcagtccttaagcagtcttgagggtccatcctttttctctaattggtcgcctcccaccagactcacctgcttttcaactttttaggagtgcttcctcacagttaccaagaataaagaaagctggccaccataaaaaaaaaaaaaaaa

SEQ ID NO: 2302 - DNA, 2478 bp, Homo Sapiens
  NM_004275
gtatttccggagtcccttctgagacagaaggttgtgttggggaactgaaggagtttctgtgggcggacagggaaccctgcgtttctactgtgtgattctgccaccttcctggcccgacgccatgggagtgacttgtgtgtcccagatgcctgtggccgagggcaagagtgttcagcaaaccgtagagctccttacccggaaattggagatgcttggggcagagaagcaaggaacattttgtgtggactgtgagacttaccatacggccgcctctacccttggcagccaaggtcagaccgggaagctgatgtatgtgatgcacaactcagagtacccattgagctgtttcgccctctttgagaatggcccttgccttattgctgacaccaactttgatgtgcttatggtgaagctcaagggctttttccagagtgctaaggccagcaagattgagacccggggcaccaggtaccagtactgtgacttcctggtgaaggtgggcacggtcacaatggggcccagtgcccggggcatctctgtggaggtggagtatggcccctgtgtggtagctagtgactgctggagtctgctgctcgagttcctacagagttttctaggcagccacacaccaggggctcccgcagtgtttgggaacagacatgatgcggtctacggcccagcagataccatggtccagtacatggaactcttcaacaagatccgcaagcagcagcaggtgccggtggctgggattcgttagtgatgagcagctgccagctgagctctgtcaccaggggtactccacaggaggagcaggtgctgactttcaggtccctggaccccagaaacccagggtagacatggactctactctccttctctggttctcagctgtggcttttgttctggggctgagtcccctccccaaccccctgactctcacacatagccccccatcagctgttttactccgtgccttactggatttggcctgtcctcaagaatggtaattatgaagagtggagaagtttggaccttgcctcctttaggggaaaggtaggacaggaatgtccctgcctggtactggtgggggaaatagtccgtatccccaactattaaggatttgtcccaggccaatggtgaacatgctgcattttatgtttggattgtgctgtaataagagcctcttccttccctcagaggatgtggctgggcttctatcctagagatggagtagaaggcacaactggtttgatagttactattttctgacctgtttgctgaagtgatttgcgaattgactttcctagggtgttgcctgagtcctttgaaatctccttctgacatctttcccttctgttgtgaaatatgttaagccacaggccaaactgctataagatcgaagtttgtttttttctcacctaataatagagaggtaatcagatggtctagggcagatttaactctacaaggttatcaggaactttgtttccttctgtcttattcagccattcccagtatgttttcttacccataagatcaaagcagactcatcagctccatatctgcattccactggggaaagagagagagaaaagagcagattttaaaaaaaagatatgactgagcattgctcagatcactgtggccacactttgctgaaagagatgctgggacatagaacctcttatctgggcagtcatgtgctgagttaaaactcagggattctgtgactacaagatgaaagacaatttggttgctgagatgcagttaatggcttctgttacatggagctcaatggacgtgcccaggaatgcttttggctgttattttgcagttaatacctcctgtaactaaagcatttgtttatgagttgacttgagagaagggctgatctcagagccgctttgagctaagttggattagtcacactaggaagttaattccacacctttcgtctaagtctcagtattgaggcctctccagttctcatgcaccctgatcttagggttagaatacttgaccctgatacctgcaccatgcttcatggttcctgagctctttctcctgtttcatttgagcctccaaactacatatttggtcatattgcctgcctaccccatgcctgctgcagaaatattcatccaggttaaccttgatatacacagagatggtcttggagaattgtgaatgtatgtactgtattgtcatcaaggatactgtcccttatttgaaggcatctaaagagaaactgttttcagatccaagtgctcagatctaaagcctctgcaacaagtcaggtggtggtcatgtttcccttctagttttggctgacaggaagctcagttcagtaccataactacagaacctgtcatctgtattttttgttctcaccccgtttttgttattttgtttctggttttttatattgaggtatgttttagatatagtttacaaaaataaaacgcacagatctta

SEQ ID NO: 2303 - DNA, 3939 bp, Homo Sapiens
  NM_004279
acatccttcatcctctaccttccttctagcagaaatggcggctgcggcggctcgagtggtgttgtcatccgcggcgcggcggcggctctggggtttcagcgagagtcttctaatccgaggcgctgcgggacggtcattatattttggagagaacagattaagaagtacacaggctgctacccaagttgttctgaatgttcctgaaacaagagtaacatgtttagaaagtggactcagagtagcttcggaagactctgggctctcaacatgcacagttggactctggattgatgctggaagtagatacgaaaatgagaagaacaatggaacagcacactttctggagcatatggctttcaagggcaccaagaagagatcccagttagatctggaacttgagattgaaaatatgggtgctcatctcaatgcctatacctccagagagcagactgtatactatgccaaagcattctctaaagacttgccaagagctgtagaaattcttgctgatataatacaaaacagcacattgggagaagcagagattgaacgtgagcgtggagtaatccttagagagatgcaggaagttgaaaccaatttacaagaagttgtttttgattatcttcatgccacagcttatcaaaatactgcacttggacggacaattttgggaccaactgaaaatatcaaatctataagtcgtaaggacttagtggattatataaccacacattataaggggccaagaatagtgcttgctgctgctggaggtgtttcccatgatgaattgcttgacttagcaaagtttcatttcggtgactctttatgcacacacaaaggagaaataccagctctgcctccctgcaaattcacaggaagtgagattcgtgtgagggatgacaagatgcctttggcgcaccttgcaatagctgttgaagctgttggttgggcacatccagatacaatctgtctcatggttgcaaacacgctgattggcaactgggatcgctcttttgggggaggaatgaatttatctagcaagctggcccagctcacttgtcatggcaatctttgccatagctttcagtctttcaacacttcctacacagatacaggattatggggactgtatatggtttgtgaatcatccactgttgcagacatgctacatgttgttcaaaaagaatggatgcgactctgtacaagtgtcacagaaagtgaggttgcacgagccagaaatcttctgaaaacaaacatgttgttgcagcttgatggttcaactccaatttgtgaagatattggtaggcaaatgttatgctataatagaaggattcccatccctgagcttgaagcaagaattgatgctgtgaatgctgagacaattcgagaagtatgtaccaaatacatttataataggagtccagctattgctgctgttggtcccattaagcaactaccagattttaaacagatacgcagtaacatgtgttggcttcgtgattaaaatgctcctaatcaagattgtttgaacacatgtatttataaaacagagctagagaaaaataaaaatgaacatgtatatacatttggaaatttgaattaaatactgtatcatactttcaaaggataaaaagactacccctctgaaggttgttttgtattaatggtcagtctttgttctctgagaaattatgttggaagcagcatactttcaaattattaccatgagtataattttaagaatgaaaatgtttacagtattttcagttttattataaaaatgcacacacaacaaagattgtcatttcttggctctacttgcattcagcacttgttcttgagcagctttctttgcttttaccatctcgacaagttcctaggaagggagaaaggtgtgatttaagaagttgcgatttaaaaacagacattttaatctagtgtttggtgtaaagaattcaagcaactaagatagatagtactaaatatactgatttcattatctgccagggcctagaaagtttctaaggttgctcatttcttcctcataatattgaccccataactactggttttgaaataagcactatattattaaccacttaatagacataaaatatgagctatatcacccaagctacaatttaaaatacaacaatctataaacgcttaagtctgcaaccttgtatcgtttcatgcagtccttctttgtcctgccaggcaccgcttctgctattttttcccatctttcaggtgtatttactgggtatgttttcaaagcttgttccaaaagcttctgttcttctgttgtccaaggggtgaagtctgtatatggacctgattaagaaaaatttttatttgaaaactgtctttgaacatgttctcagacaagtcttgtggtccacaagtattcgctaagtgcccatttcaatctgggatgtgtcattttgaaaataaacttgtagagatgagagatacatatagccctctgagtgttaataagagaaaaaatttcagatagctcacatcccagaaaataaaatctcaaaggcttttaaaacacaatagtaaagatctaccttgtactgtttatctcttaaaaatcaatgtaatacactcaccagactggtaaaaagccatatttaaatttatagtactgttggactcttggactcaaaaacacaaccacaattcattaagagttctgataaatctacttccttacagaataggtaaaagagcttcctcacagttaaacttttgctggatagaaaccctggaaatcattcttgttttacactgaaggaaacaaacctagcaaaattaagccaagtgcccaaggtaccagtgctggagaggcaagctgagattagattgtgttgtagtgtggtgttctcttcgtcacatctgctaaaatcttgggagccgatgctgaacacttccaataactgctattgtggttcttcaactaaaccttgtatatttcagaaaacatctaagatgtgtgtcagaaacaaatatgtttcttaaggatgttaagtattacacagtccacttgtgtaggtaaaagtagaatgttaagtggtagaaagctgatttggttaagttaatggacttctggcaatttagttatttcagactatgcagtgacaacacagactaatactaccagtagcctgactactactagaaactgcggcctgtgagatctgttaaaagttaagcctagaaaccaaagttccttcccaattaaagaaggaaaaacaaaacaaaacaaaacaaaaccaccacctattcaaaacaaagcagagaatttgtataatatttgatggtacctaaggtgcctaagaagcttttttgaaggtagcttttaagttctaggaagtcttttgttgaatttccttgtattggtttaaagccctaaataccatagattttatttcctctcttggaaaaaagatggaagtgacatggcagtatttcctgctgttctccagttacttcacaataccaaaataaattaaacgtactgttgcaaaactcctatgagaaatcactattcaaaaaatggtgccagcttgctgtttaatggtacaactgaagaggaaggagccttcccatttccataaaagaggcaaaggagtcatacccacatagcactactgccagtcactcttgccttcacagggtcacctctcctcacagaaagcagactggacaaatatcagggcccacctccctccaacatggaaacaagtccccctaagaaagagctgagactagtgtgctaatacctgttgtattttgtggagataaaggtgcaggagaataaactcctttataaagaagtgtctttcaggtgttctgaaaccctgccttgttacttacctttattaaaagaaccgaaataatgcctaactcaaaaaaaaaaaaaaaaaaaaa

SEQ ID NO: 2304 - DNA, 2608 bp, Homo Sapiens
  NM_004281
gcggagctccgcatccaaccccgggccgcggccaacttctctggactggaccagaagtttctagccggccagttgctacctccctttatctcctccttcccctctggcagcgaggaggctatttccagacacttccacccctctctggccacgtcacccccgcctttaattcataaaggtgcccggcgccggcttcccggacacgtcggcggcggagaggggcccacggcggcggcccggccagagactcggcgcccggagccagcgccccgcacccgcgccccagcgggcagaccccaacccagcatgagcgccgccacccactcgcccatgatgcaggtggcgtccggcaacggtgaccgcgaccctttgccccccggatgggagatcaagatcgacccgcagaccggctggcccttcttcgtggaccacaacagccgcaccactacgtggaacgacccgcgcgtgccctctgagggccccaaggagactccatcctctgccaatggcccttcccgggagggctctaggctgccgcctgctagggaaggccaccctgtgtacccccagctccgaccaggctacattcccattcctgtgctccatgaaggcgctgagaaccggcaggtgcaccctttccatgtctatccccagcctgggatgcagcgattccgaactgaggcggcagcagcggctcctcagaggtcccagtcacctctgcggggcatgccagaaaccactcagccagataaacagtgtggacaggtggcagcggcggcggcagcccagcccccagcctcccacggacctgagcggtcccagtctccagctgcctctgactgctcatcctcatcctcctcggccagcctgccttcctccggcaggagcagcctgggcagtcaccagctcccgcgggggtacatctccattccggtgatacacgagcagaacgttacccggccagcagcccagccctccttccaccaagcccagaagacgcactacccagcgcagcagggggagtaccagacccaccagcctgtgtaccacaagatccagggggatgactgggagccccggcccctgcgggcggcatccccgttcaggtcatctgtccagggtgcatcgagccgggagggctcaccagccaggagcagcacgccactccactccccctcgcccatccgtgtgcacaccgtggtcgacaggcctcagcagcccatgacccatcgagaaactgcacctgtttcccagcctgaaaacaaaccagaaagtaagccaggcccagttggaccagaactccctcctggacacatcccaattcaagtgatccgcaaagaggtggattctaaacctgtttcccagaagcccccacctccctctgagaaggtagaggtgaaagttccccctgctccagttccttgtcctcctcccagccctggcccttctgctgtcccctcttcccccaagagtgtggctacagaagagagggcagcccccagcactgcccctgcagaagctacacctccaaaaccaggagaagccgaggctcccccaaaacatccaggagtgctgaaagtggaagccatcctggagaaggtacaggggctggagcaggctgtagacaactttgaaggcaagaagactgacaaaaagtacctgatgatcgaagagtatttgaccaaagagctgctggccctggattcagtggaccccgagggacgagccgatgtgcgtcaggccaggagagacggtgtcaggaaggttcagaccatcttggaaaaacttgaacagaaagccattgatgtcccaggtcaagtccaggtctatgaactccagcccagcaaccttgaagcagatcagccactgcaggcaatcatggagatgggtgccgtggcagcagacaagggcaagaaaaatgctggaaatgcagaagatccccacacagaaacccagcagccagaagccacagcagcagcgacttcaaaccccagcagcatgacagacacccctggtaacccagcagcaccgtagcctctgccctgtaaaaatcagactcggaaccgatgtgtgctttagggaattttaagttgcatgcatttcagagactttaagtcagttggtttttattagctgcttggtatgcagtaacttgggtggaggcaaaacactaataaaagggctaaaaaggaaaatgatgcttttcttctatattcttactctgtacaaataaagaagttgcttgttgtttgagaagtttaaccccgttgcttgttgttctgcagccctgtctacttgggcacccccaccacctgttagctgtggttgtgcactgtcttttgtagctctggactggaggggtagatggggagtcaattacccatcacataaatatgaaacatttatcagaaatgttgccattttaatgagatgattttcttcatctcataattaaaatacctgactttagagagagtaaaatgtgccaggagccataggaatatctgtatgttggatgactttaatgctacattttaaaaaaagaaaataaagtaataatataactcaaaaaaaaaaaaaaaaaaaaaaaaaaaaaaaaaaaaaaaaa

SEQ ID NO: 2305 - DNA, 4290 bp, Homo Sapiens
  NM_004283
ccttcctccgccttctgggcggagcccgcgcgggatccgggtggctgcaggctgctggcttctgcggctgcggggtcggggtcgcggccagggccaagccgcagcgagttcacaggcggaacccctgcaggcggcgccccctacgcgaggtcacccctgggaaggagcgcagcccacccggcccctccgcatccgagcaggacgcccgtctcctctccctgaggatttcaggtctccctgtcccaggaggcttgtgccaagatggcatcagctggagacacccaggcaggcccacgggatgcagcagatcagaacttcgactatatgttcaaactgctactgataggcaacagcagtgtgggcaagacttccttcctgttccgatacgcggacgactccttcactcccgccttcgtcagtactgtgggcatcgatttcaaggtcaagaccgtctaccgccatgacaagaggatcaagctgcagatctgggacacagcgggccaggagcgctaccgcaccatcaccacggcctactaccggggagccatgggcttcctgctcatgtatgacatcgccaatcaggaatcctttgccgctgtgcaggactgggccacgcaaatcaagacctactcctgggacaacgcccaggtcatcctggtggggaacaagtgtgacctggaggacgaacgtgttgtgcctgctgaggatggccggaggctcgccgacgaccttggtttcgagttctttgaagccagtgccaaggagaacatcaatgtgaagcaggtcttcgagcgcctggtggatgtcatctgcgagaagatgaacgagtccctggaacccagctccagctcaggcagcaacgggaaaggcccggccgtgggggatgctccagccccccagcccagcagctgcagctgctagagatggcccccaaccccccacccacccctctcctgcctcggcagggactgtgatcgaggcgtgagccacagtggttatctccaagctcagggcaatcccttccctcctgtcaactgctccccgactcctgcatggctcattccttcacaatgtcgccgtggctgccaggttcctcaggcagccccggtgggaggctgcggaccatggggactcagctctgcatggcaggcagaggcccagggacactgacgtgcatgagcttgctgctttccagggtgtgttgagggtggccatgggtgacacgtcccactctttctgatggaggggcatccgtggtgccttctagcttagaaccattttccaggtctcttctgggttgggcaggactgatattcccaagctggtggaagatggttcatcttcctcgcacagtgtgggttcttggagttcatccagggaaggcggcgcctctttctcaggtcctgcaggctggtctctgagcctgcccccacgaactttctggattccaaggtgggatggtgatccctttgacccctgcagaccctctacttgcgaaaagcagcattgaagcagccttttcccattgtagaagggacagggagtcagatcccctcaaccccccggcttcagggaccccagaagtgccttccaagcttcccccaagatccacatcacccacgaccctgccactgtttttgctgtgttcaccacatctctgatcctgaagtgaattctggaactatggaccacattagactgggcagagattcgcccaacccctagcactccggctctgggctttcggccagaagttaattaacctcagagccaggagcctggggctggggcctccctcccaggccctgtttagctgtttagctggttgtgttttaagcaagttcttgcccaatcatgcatcctgctagaaaaggaaatgaagcaacgttcccagccaccgcaggcagttgtcggcgactttctgatgtaagcacctgggctccgacttgaggggggcccttcaagacccaatgtccatttcccaatccttgtcatcggcagggcccagggatgtgacaatttttgctaatggaggagtcacttctttttttttttttttctttttgagatggtctggctctgtcacccaggctggagtgcagtggtgcaatcatagctcaccacagcctcaaactaggggtcacttctaagggatgctgggggttgggcggaaggggtgaggaggtaggattgagtaacttgctgtcactgcttgtactttgtagacagcctgagagtggcaggaccttatgtgaatgggggggatggactgtgatcagtgccggggagtctctgaagctggggtccccacctccaggggcttctgctcagaggttacgtgtgcagtttgaagatgtacatcttgacctccggtttagaggcactttctgcccatcagattccaaactctaggggcgcagcaccttttctttgctcccaaacaccaaccaacaccccttcacaggaccagcactgttaggatggctaagtggatgttttatgttcccacgtccctgactctgtttcagaggttgtgtctgctctcccagcccctgaagccaaaatgacttcctgcagctttcatgagctcagcctcttccctggggtatgtgtgagggggaaagcctggttcaagtttagatttatttctagggagccctggtttcttcataccagaggctacccttagaactttggagtggggtatctttttttcatttgtttttttgatacagagtctcgctctattgcccaggctggagtgcggtggcacaatctcagcttactgcaacctccacctccagggttcaagcgattctcctgcctcagcctcccgagtagctggcattacaggcacctgccaccacacccggctaaattttgtatttttagtagagaaggggtttcaccatgttggtgaggcttgtctcaaactgacttcaagtgatccacttgcttcggcctcccaaagtgctgggattacaggcgtgagccatcacgcccagccgagggtatcttttataccaacaaattagatgactgaggtgtaatggacaaatcctatgcacaaagtgagggtatctgaatatgtgggcgggagtcaaaaatttttagctactttaacactaaagtcaaactaaagtagcttcaaaaagacttctcaagatgcagtatggcctgctgaggtttttttgttttttttttttttaagacagagagtcgctcgtcgcccaggccgcagtgcagtagcatgatctcagctcactgcaacctccacctcccgggttcaagcgattctcctgtctcagcctcctaagtagctgggactacaggcacctgccaccacgcccatctaagttttgcatttttagtagcgacggtttcaccttgttggccaggctggttttgttggccaattgtctctaaactgctgtcaaaaaaaggaatggatcagattgtcttgaatagggcagagctaacctgtaatcacctgtgtgatgagaaacagctttgactgcattttactcctgacctggcctaagctttctgtttacataagatttttcaagaattcaacttcaagtagcagccgagagagctgcctcaggattctctcaaaaactgggaataatatgggaacatttgtttcttctaaaaataaggcaaatgttacattgaatgatttggggggtgaggtttaattggaaatggtctctggggactgaaaactgatgtttttgcagattacctcagggaaacggaggtttgttgagtttacagacacattaaaccaaaggccgtgggaaaacccctctccagctccaggggattggtcaggaccacccactaaccagtgccttccttcttaacattcacttttagcagcttgtgtttattttacatgggcagttttgatgggaaattgccatgaccacaggggtttggagttctgctttttttttttcttcttctttttcgggggactgggggactcctcccaagatcacattttagcatctttctctcctactccatttagaaaaataagtaacaggtgaaatgtggtctcagtgttaacgggataattctgctaccggctcctccctgatgattctgaaatacactactgaacgagctctggctggtcctttctatcctggatgtggttcttctgtgtagcaattccttgatgtccagtttggaaagatgtactcttctcaacaagaaaaacttaaatccgtcgtgcccaaatatagttgtgcttttatttccaaaaaaaaaaaaaaaaaa

SEQ ID NO: 2306 - DNA, 3023 bp, Homo Sapiens
  NM_004284
gcgttgggaagttgggagggaggtgcgcgcttggccgcgcggggcggggcctctaccggcccgatggagcgcgcgggcgctactagccgcgggggccaagcgcctggcttcttactgcggcttcatactgagggccgagccgaggcggcgcgggtgcaggagcaggacttacggcagtgggggctgacagggattcacctacgctcttaccagctggagggagtaaactggctcgcccagcgcttccattgtcagaatggctgtatcctgggagatgagatgggcctggggaagacctgccagactattgctctcttcatttatttggcaggaagattaaatgatgaagggccatttctgattctttgtcccttgtctgttttgagcaactggaaagaagaaatgcagagatttgctccaggtctttcctgtgtaacatatgcaggcgacaaggaggaaagagcctgccttcagcaagacctgaaacaggagtcacgttttcatgtgctactgactacctatgagatttgcttgaaagatgcatcatttctaaaatcattcccttggagtgttcttgttgtggatgaagctcacaggttgaaaaaccaaagctccctgctgcataagaccttgtcagagttctcagtagtcttcagtctcctgttgaccggaactcccatccagaacagcctccaagagctctactccctcctcagttttgtggagcctgatctcttttccaaggaagaggtgggagattttattcaacgctaccaggatattgagaaagaatctgagtcagcaagtgaactgcacaaactcttgcagccatttctgctgaggcgagtgaaagctgaggtagctacagagcttcccaagaagacagaagtagtgatataccatggcatgtcagcattgcagaagaaatactacaaggccattttgatgaaagacctagatgcatttgaaaatgagacggcaaagaaagttaaactacagaacattttgtcccagcttcgaaagtgtgtggatcacccatatttgtttgatggtgtggagccggagccttttgaagttggagaccacctgactgaggctagtgggaagcttcacctgctggataagctactagcattcctgtattctgggggccatcgggttttacttttctcccaaatgacccagatgttggatattctccaagactatatggattacagaggctacagctatgagcgtgtggatggttctgtgagaggagaagagagacacttggccattaagaactttggacagcagcccattttcgtttttctcctgagtactagggcaggtggagttggcatgaacttaacagcagcagatactgtgatttttgttgacagtgactttaatcctcagaatgacttgcaagcagctgccagggctcatcgcattggccaaaacaagtctgttaaagttattcggctgattggtcgagacactgtggaagaaatagtctataggaaagcagcctccaaactgcagctcaccaacatgatcatagaaggaggccattttactctgggagcccagaaacccgctgccgatgctgacctccagttgagtgagatactcaaatttggtttggataaactgctggcctctgaggggagcaccatggatgaaatagacctggagtccatactgggagaaacaaaagatggccagtgggtctctgatgccttgcctgcagcagaaggagggagcagagatcaagaggaaggaaaaaatcatatgtacttatttgaaggtaaagattattctaaagagcccagtaaggaagacagaaaatcatttgaacaactggtaaaccttcagaaaacccttttggagaaagctagtcaagagggccgatcactccgaaataaaggcagtgttctcatcccaggccttgtggagggatctaccaaaaggaagcgggttctgagtccagaagagctggaggacagacagaagaaaagacaagaagcagctgccaagagaaggagactcatagaggagaagaagaggcaaaaggaagaggctgaacataagaaaaagatggcctggtgggaatccaacaattaccagtccttctgcctgccctctgaggagagcgagccagaggaccttgagaatggggaagagagctctgctgagctggattaccaagacccagatgctacttccctcaagtacgttagtggtgatgtcacccaccctcaggctggggccgaggatgctctcattgtgcactgcgtagatgactctggccactggggcagaggtggtttatttacagctctggaaaagcgatccgctgagccaagaaaaatatatgagctggctgggaaaatgaaagacctgagtttgggaggtgtccttttatttcctgttgatgataaagaatcaagaaacaaagggcaagatttgttggccttgattgtggctcagcatcgtgatcgttccaatgtcctgtctggcattaagatggcagccctagaagagggcctgaagaagatatttttagcagcaaaaaagaagaaagcaagtgttcatcttccacgtattggacatgccacgaaaggttttaactggtatggtactgagcgacttattcggaaacatctggctgcaagaggcatcccaacttacatatattattttcctagaagcaagtctgctgtccttcatgcacagtcttcatcttcctcctcaagacagctggtgccttaagaattggcccagcctcagatcctgtctttagcaaccagctaatatttacccagaggtactgcaatagagtatttcaaaatggaatcaggatctggtgggcctcagaaattgtctcttttctgagtttcaatttggttctcctggatgttttgctctgttttggtacctgtaatatagggaaacacaactttttttgggaaagccctttgaccccagcttgctagttgcataataataaattttctgttcctaaaaaaaaaaaaaaa

SEQ ID NO: 2307 - DNA, 5074 bp, Homo Sapiens
  NM_004286
tgtttcttagctagaggtacgtgtcacccagtacgcggctggagttttgcataaattattccgataaggagcggggcggggctctgtgcatagattagtcaaatgagcctgggagggagggaagccggctacgaattagcctaagttattaaagatggcgacggagcgcagtcgctccgcgatggactcgccggtcccggcctctatgttcgcccccgagcccagctccccgggggcggccagggccgcggcggccgccgcccgactccacggcggctttgactcggactgcagcgaggacggcgaggcgctcaacggcgagccagagctggacctcaccagcaagctggttctagtgagccctacatcagagcagtatgacagcctacttcggcagatgtgggagaggatggacgagggatgcggagagaccatatatgtcattgggcagggatcagatgggactgagtatgggctgagtgaagctgacatggaggcctcctacgccacagtgaagagcatggcggaacagatagaggccgatgtcatccttctgcgggaacggcaagaagctgggggccgcgtgcgtgattacctggtccggaaacgagtaggagacaatgacttcctggaggtcagggtagcagtggtgggcaacgtggatgctggcaaaagcacgcttctgggggtcctgacacatggggagctggacaatggccgaggctttgcccgccagaaactcttccgccacaaacatgaaattgaatctggtcgcaccagcagtgtgggcaacgacattctgggctttgacagtgaaggcaatgtagtgaacaagcctgacagccacggcggcagcctggagtggaccaagatctgtgagaagtccacgaaagtcattaccttcatcgacttggctggtcatgagaagtacctgaaaaccactgtcttcggcatgacaggccatctgcctgacttctgcatgctcatggtgggcagcaatgctggcatcgtggggatgaccaaagaacacctgggcttggcactggcactcaatgtacctgtctttgtggtagtcaccaagattgacatgtgtcctgccaacatcctgcaagaaaccctgaagctgttacagcgcctgctgaagtcaccaggctgccggaagatccccgtgctggtgcagagcaaagatgatgtgattgtcacagcctccaacttcagctctgaaaggatgtgcccgatattccagatctccaacgttacaggcgagaacctagatctgctgaagatgttcctcaacctcctctccccccgcaccagctacagggaggaggagcctgctgagtttcagattgatgacacctactccgtcccgggtgtggggacagtggtttcggggacaacactgagaggcctgatcaagctgaatgacacgctgctgctgggcccagaccccttgggtaacttcctgtccattgctgtcaaatccatccatcgcaagcgcatgcctgtcaaggaggtgcggggtggccagacagcatcctttgcgctgaagaagatcaagcgctcgtccatccggaagggcatggtgatggtttccccacgtttgaatccccaagcctcctgggagtttgaggccgagattctcgtcctccaccaccccaccacaattagcccgcgctaccaggccatggtgcactgtgggagcatcaggcagacagccaccattctgagcatggacaaggactgtctgcgcactggggacaaggccactgtacacttccgcttcatcaagacccctgagtacctgcacatagaccagcggctggtgttccgggaaggccgcaccaaggctgtcggcaccatcaccaagctcctccagaccaccaacaactccccaatgaactccaagccgcagcagattaaaatgcagtcgacgaaaaagggccccctgacgaaacgagacgaggggggcccgtctggtgggccagcagtaggagcacccccacctggagatgaagcctcctctgtaggggcagggcaaccagctgcgtccagcaatctccagcctcagcctaagcccagcagtggaggccggcgacgagggggccagcgccacaaggtgaagtcccagggggcctgtgtgactcctgccagcggctgctgaaccttcccctggcccaccctcaccacccaaggggtcatcatctctggccaccactccaccagatgggcagagcagctatgaccgccacccagccctcccgctcaggccacagccggagcctccgcattgcccccacccccattttccaggggggttgtaatttataagctgacgaaggtagccagacttccggaggactgaccatctctcactgtcctccccaccttcttcctcactcacacattttttgtacatctgggcccttagtttttattctgtttattatatgtctctgtctctctctattgtgtgtgtgtgtgtgtgtgtgtgtgtgtgtgtgtgtgtggtgcaggagtgccacccccagggccctgtcaacctctcttttctcctccatggctgtctgcctgcgtatctgtctctgagaatcctcggggcggtcaggggatgtcaggaggggaaggagccgccctccctatcttgctgctcctcttggcactcaggggcaccttccatggagccagaccgggtggaggggcttctgggatttggtgtctgctgctgccagagcaggaacccccagtctaggacttgggcattttaacagggagaaagtagtggcttcccttttctctctctcctcctttttccctttaagcccacagattcaggtcatgccaaaagctctctggttgtaacctggagacatgtggaggggaatggcgatgggattataggactctccccatctcgggccctgaccctgacccttgccaccaacccaaagacagctggtgggtttccccttggagacaatcctgcgtttgcctgggccggccctggctgccctcagctttcgctgatctgcccggcctggagcctcccatcaccccgcttcttgttgggcctcaggcactggttaccagaagggggtctgggtctgctcaggatcatgttttgtagcacctcctgttggaggggtggagggatgttcccctgagccaggctgagactagaaccccatcttccctgagccaggctgagactagaaccccatcttccccaccacgccacccctgtggctgctacaggagcacagtagtgaaggcctgagctccaggtttgaaagacccaactggagcgtggggcgggcaggcaggggttagtgaaaggacacttccagggttaggacagagcatttagccttctggaagaacccctgcctggggtgggactgtgcaggccagagaaggtggcatgggcctgaacccacctggactgacttctgcactgaagccacagatggagggtaggctggtgggtgggggtggttcgttctctagccggggcagacacccagctggctgggtccttcctcagccttgcctcctcctgtccccaaccctttcctttcctcctgcttgcggactgctggtcccctctccttccctccttccagctgtttctagttaccacctacccctggccgtggactgatcagaccagcattcaaaataaaagtttgttccaagttgacagtgtggtgctccctgcccagcccctccaggtggaggtgctgccacgggaacgcagttgctctgcctgccctggggcccctggcgacagctgggagcagggcagtgctgtgaggagcccagctttcccagtcaggcaggcatggcttccgtgttcaggctccctcaccagctggtgacacgggacaagcttacaaaccttctctgaacctcagttttctcatttacaagaggcaaagccatccatcaccttgtgtggattcagagaatgtgaggccctggggtgtcctacacaagggaaaggcttgctcagtgagcggtctgcacaccgttagccaccctgccacctctgtgccctgggcaggctccaaaggaaagctctggctgggactgccaggagtctcacacgctcctgttgacattcccagcagccgcccctgaggtcgatgtttgttctgtttttctttttcttttttgagacggagtctcgctgtgttgccaggctggagtgcagtggtgtgatctctgctcactgcaacctccgcctgccagtttcaagtgattctctgcctcagccttctgagtagctgggactacaggtgcacgccaccacgcccagctaactttttgtattttagtagagacagggtttcgccatgtcggccagggtggtcttgatctcctgacctcatgatccacccgcctcagcctcccaaagtgctgggattacaggtatgagccaccgcaccgggcctgttctatttttctagttaagggaactgaagctcagagaggtgtcaccagcaggtgttcattcccatgccagccttgccccccggcttttcccaggcaggctcctgcgtgcccactggctccagcctggtcctctgtctcttggctgcttcactcctgctctttgtcccgactctggccctgcttacaggggccactacctgctggtgcctccataacaagcgtctggcgttgagacccctggcatggcaggggctttggggtctggtttccacaaggcttagccatggcagaacctcgttttattttaactctttgcccctacaaacaaacagcagtacttgccagaaccattcttgggattcaggagctcgggcgactgccttggcctctggccgcacccaggagggtggggttggatctgtgtagttgccaggcccacacctgccagcagggggctgactggatccatgctttactgtgtttaatgggggtaacaggggtccctacagccctcccagctaaacatttggaacaaaacaccagcccttttgtagtggatgcagaataaaattgttaatccaatcacctccaaaaaaaaaaaaaaaaaaaaaaaaaaaaa

SEQ ID NO: 2308 - DNA, 3319 bp, Homo Sapiens
  NM_004287
aaccggaaggggggctgtgaggacgtgttccgaggaagccagagccggagccgtggcctgcggggccggcgacatggatcccctgttccagcaaacgcacaagcaggtccacgagatccagtcttgcatgggacgcctggagacggcagacaagcagtctgtgcacatagtagaaaacgaaatccaagcaagcatagaccagatattcagccgtctagaacgtctggagattttgtccagcaaggagccccctaacaaaaggcaaaatgccagacttcgggttgaccagttaaagtatgatgtccagcacctgcagactgcgctcagaaacttccagcatcggcgccatgcaagggagcagcaggagagacagcgagaagagcttctgtctcgaaccttcaccactaacgactctgacaccaccataccaatggacgaatcactgcagtttaactcctccctccagaaagttcacaacggcatggatgacctcattttagatgggcacaatattttagatggactgaggacccagagactgaccttgaaggggactcagaagaagatccttgacattgccaacatgctgggcttgtccaacacagtgatgcggctcatcgagaagcgggctttccaggacaagtactttatgataggtgggatgctgctgacctgtgtggtcatgttcctcgtggtgcagtacctgacatgagccagccacgctcagtggctgaacagcattcccacagcctgcaagtgtgtgtgtgtgtgaaagagagaggggggcccagaggccgccttttgaaatgtttgcctgtctgaactgtgaagacacttgggagtgattgtggtctaatttccaacctgctctgttttctgtgacatcttggagggggagctagtgccaccaccatgcgcggtgcttaggaaatgaaagaagtcccgggtctgtctctctcactctcgctctcactgggggagggaaagaatggctttggtggctttgttcacatagctgatgcgtgccctgggaaggtgtccacagtgagccctgtgtgcaggactgtccacacggttcacaccttgtcaccatcaggcctttctggctcctgatagggtggagcaaaagtggaaaggaaaggaaagaggccttttctcacagccattatattaaatagtaggtcgattcacatcctcgtgctcctggccaccctcccctgtgcctcagtgacatgtagatgactgactgccaatacttgtcaccattccctggaagcagctacctaggggaaacaagatgtagtgctattgccgataacaagtaagattttccacactacagctgggtgtttctcttttctaaagtgaggccagtgttatttcccgggagtgttcagtcttgaccctagtcactgattttttctagttgttaatagagtggttggcttttaaggttcagagactgtggcttggcacctgcgcccaggctttgtgggcctttgccccttagaaagtagctgtaggcaaagatttgtgattttccaattacagtctcagctctagttttagtatctctaattctttggttcccttctcttccctgaaatatattagcacctgccagccaggccctcattttgcccagccagtgtgggcagatcccaccgtggagacatctgtagtgtgtatgtccttgtaacactctgttttcagggactacaacctttttccttctgtgaccagccccggattcaggctgtactaataccaggtatattgtggaatttagtataaaggccaatctgtcctgaagtccatctaatgtggtgaatcactgaaagtctcagaaagacctggttagtgtatgttctcatttaccacaggcctaccagccctgggcacagcagcttcatggcaagacataaaatgacactcaaaatccttcagatctggaaaccggctcagtattaaccctacctttggttgtcctgccctacctgctctgttagtttcttgttgcttgaactgtcttctgtcttatttcccttcctttctgtgttcctcttcacctctcttgttcccctccccgctgctctgtagtcatgttggtcctttcaggcacctctgtggcatagctcccctttggtaagttttcttaattgtcatagattaactgagtttcctggatgctaatttcacactttcggttggaggagatctccattgttcctacccctccgggccaaatgggccccaggtttccaaggaaggagcaatctgtgactcctaaaatgggttggggccctgccagagttaaagcagtgactggagggtggactggggggttgcagcatctttagacctagatctgtctaactctggggaggcacattgacatttccattacacacagcactgctgcggtgccagggacctagcgcaggacttttggtaatccataaaatggattctgagactgcgacggcaaggctgtcctgtcccccaggcacccaaggatcctgccagacagcacactttggaggaaggtctgcagggagcagctgagccatttgttcttgaactctgggaggcagaagtccccgcacccatcatgcgtggactgataggacatcttttcgtggtgtgcaccagtgctttccacacttgacagtggttggctttgatgaaccctcatgctgcaccttcagagccagtcctctagtttggaataaaaattgcagaggtggtttttgggtctttaccacctgcggctggtggacagcagccagtgtgtctggacacccaggggcattgagactgcatgttgtcacatgaccacttctcttcacacatctgctttcagtgcctggtgaaaaatagaccttggcctaacagtgtgactctctccaccgcctcagtgtagggaagggtccaggccagggaaggagcaccctctagtggaggcgggggtgaattcttaggtcgagctgatgcaagaaactccggtagccagcctctgtgaccttgtacatgagtttggtgtgcctattgtgatttaaaacaggtgggttatcaagaggaacttgagatctctttattacatggacatttacttcagggggaccactgtaagaaaagccaaactccaagaccaagtaagttagaggagtcttgattttttagacttcactgcggagttctgtacaccctttgccctgatgaatttgaatgggtttgatttgcaaatttggatttacacccattgttttggaagcacatcagctgaataaagttgaggtttattttatttagaaaatca

SEQ ID NO: 2309 - DNA, 3720 bp, Homo Sapiens
  NM_004289
cggctgggcgaacgggctcggcgctcaggtggctccttcttcgcttctcccgatccccggcggtgccaggcacggtgccggctgccgagggaacgcctttgtgcccggtgctgggaacccgcgacggccgccacgcgccccggtccattgtttcgcttatctgggttccaggcaggtgcgggcggcgcgcggggtccgcacgtgtcaccccggcggctggggcgccgggacccgcgggcgccggcaggggcgttcccgggcgcgcggcggcgatgaagcacctgaagcggtggtggtcggccggcggcggcctcctgcacctcaccctcctgctgagcttggcggggctccgcgtagacctagatctttacctgctgctgccgccgcccaccctgctgcaggacgagctgctgttcctgggcggcccggccagctccgcctacgcgctcagccccttctcggcctcgggagggtgggggcgcgcgggccacttgcaccccaagggccgggagctggaccctgccgcgccgcccgagggccagctgctccgggaggtgcgcgcgctcggggtccccttcgtccctcgcaccagcgtggatgcatggctggtgcacagcgtggctgccgggagcgcggacgaggcccacgggctgctcggcgccgccgccgcctcgtccaccggaggagccggcgccagcgtggacggcggcagccaggctgtgcaggggggcggcggggacccccgagcggctcggagtggccccttggacgccggggaagaggagaaggcacccgcggaaccgacggctcaggtgccggacgctggcggatgtgcgagcgaggagaatggggtactaagagaaaagcacgaagctgtggatcatagttcccagcatgaggaaaatgaagaaagggtgtcagcccagaaggagaactcacttcagcagaatgatgatgatgaaaacaaaatagcagagaaacctgactgggaggcagaaaagaccactgaatctagaaatgagagacatctgaatgggacagatacttctttctctctggaagacttattccagttgctttcatcacagcctgaaaattcactggagggcatctcattgggagatattcctcttccaggcagtatcagtgatggcatgaattcttcagcacattatcatgtaaacttcagccaggctataagtcaggatgtgaatcttcatgaggccatcttgctttgtcccaacaatacatttagaagagatccaacagcaaggacttcacagtcacaagaaccatttctgcagttaaattctcataccaccaatcctgagcaaacccttcctggaactaatttgacaggatttctttcaccggttgacaatcatatgaggaatctaacaagccaagacctactgtatgaccttgacataaatatatttgatgagataaacttaatgtcattggccacagaagacaactttgatccaatcgatgtttctcagctttttgatgaaccagattctgattctggcctttctttagattcaagtcacaataatacctctgtcatcaagtctaattcctctcactctgtgtgtgatgaaggtgctataggttattgcactgaccatgaatctagttcccatcatgacttagaaggtgctgtaggtggctactacccagaacccagtaagctttgtcacttggatcaaagtgattctgatttccatggagatcttacatttcaacacgtatttcataaccacacttaccacttacagccaactgcaccagaatctacttctgaaccttttccgtggcctgggaagtcacagaagataaggagtagataccttgaagacacagatagaaacttgagccgtgatgaacagcgtgctaaagctttgcatatccctttttctgtagatgaaattgtcggcatgcctgttgattctttcaatagcatgttaagtagatattatctgacagacctacaagtctcacttatccgtgacatcagacgaagagggaaaaataaagttgctgcgcagaactgtcgtaaacgcaaattggacataattttgaatttagaagatgatgtatgtaacttgcaagcaaagaaggaaactcttaagagagagcaagcacaatgtaacaaagctattaacataatgaaacagaaactgcatgacctttatcatgatatttttagtagattaagagatgaccaaggtaggccagtcaatcccaaccactatgctctccagtgtacccatgatggaagtatcttgatagtacccaaagaactggtggcctcaggccacaaaaaggaaacccaaaagggaaagagaaagtgagaagaaactgaagatggactctattatgtgaagtagtaatgttcagaaactgattatttggatcagaaaccattgaaactgcttcaagaattgtatctttaagtactgctacttgaataactcagttaacgctgttttgaagcttacatggacaaatgtttaggacttcaagatcacacttgtgggcaatctgggggagccacaacttttcatgaagtgcattgtatacaaaattcatagttatgtccaaagaataggttaacatgaaaacccagtaagactttccatcttggcagccatcctttttaagagtaagttggttacttcaaaaagagcaaacactggggatcaaattattttaagaggtatttcagttttaaatgcaaaatagccttattttcatttagtttgttagcactatagtgagcttttcaaacactattttaatctttatatttaacttataaattttgctttctatggaaataaattttgtatttgtattaaaaattaacttttcccttttatacagaatctgaaccaaatttaccttactttccttccaaaatatccacattcaggaatataggtgaataacaaataaggcagcatagcaaactgctcagactcaagccaaattgaggtcaacatagtatgccaaatccatagtaaggcaaatccacccccctaccccaatacttaacacacagaatactatgtgatatagaatgcactgaagacctacggtcactggtagtttgagccacaggccttcctcatgtaaccagagacagaatgggctacttgcaaaaacgtaactccttgtgtgtatattaaatccataaaatctctggcagtaaagccagcctgaagggatggcctcaccatcttagaatactgagatctcaccagaacactgtaagccatataaacagtagggaaagagtcagcaacagtgaaaccatctgtttaaaatgggcaaaagcgattaagggaaaaaaaacaggtgaatttgaaaataaaccagggtaaggtaaattctagaaataatagcatttgaaatgaaaacctcacttaagttcactagaacagtaaacaggagattgctgaattttttgaagacagcaatgacctcacctagatgactcaagtttggggaacatcaagattttgacgggtactataatgcttaatatgtccaaattttcaaaatgaagtttctcagatattatttctgccataggagctacagtgtagagtatcacataagtatcttgggctagagaaatgcagtttatatataccgttggatttttataataaagtttcccaagacctgttattttgccagaaaaaaaaaaaa

SEQ ID NO: 2310 - DNA, 2698 bp, Homo Sapiens
  NM_004292
gtggacacacaagagttaactggcgggtgtgacaggcggaccgccctcaggaagtgttactcactggggatgtgcgtgccttgccttgggactggattctcttcctgaagcgaaggagctcccagccatggaaagccctggagagtcaggcgcgggctctcctggagcccccagcccgtccagcttcactactgggcacctggcgagagaaaagccagcccaggacccactgtatgacgtgcccaatgccagcggcgggcaggcaggcgggccgcagcggccggggcgcgttgtgagcctgcgggagcgcctgctgctcacccggcccgtgtggctgcagctgcaagccaacgcagcggccgcactgcacatgctgaggaccgagcccccggggacgttcctcgtgcggaaatctaacacccgccagtgccaggccctgtgcatgcggttgcctgaagccagtggcccctccttcgtctccagccactacatcctggagagccctggcggcgtctccttggagggctcggagctcatgttcccagacctagtccagctcatctgtgcctactgccacacccgggacatccttctcctcccgctgcagctccccagagccatccaccacgcagccactcacaaagagctggaggccatctcccatctgggcattgagttctggagctcctccctcaacatcaaggctcagcggggcccggctggaggcccagtgttgccccagctgaaggcccggtcccctcaagagctggaccagggcaccggagccgccttgtgcttcttcaaccccctgttcccgggggacctagggcccaccaagcgggagaaattcaagagaagcttcaaagtgcgcgtgtccacagagacctccagccccctgtctccacctgccgtgccacctccccccgtccccgtgctgccaggggcagtccccagccagacagagcggctgcccccttgccagctgctacggagggagagctcagtggggtaccgcgtgccagcaggcagtggccctagccttccgcctatgccctccctccaagaggtggactgcggctcccccagcagctccgaggaggagggggtgccagggtcccgggggagcccagcgacctcaccccacctgggccgccgacgacctctgcttcggtccatgagcgccgccttctgctccctactggcaccggagcggcaggtgggccgggctgcggcagcactgatgcaggaccgacacacagccgcgggccagctggtgcaggacctactgacccaggtgcgggctgggcccgagccccaggagctgcagggcatccgtcaggcgctgagccgggcccgggccatgctgagtgcggagctgggccctgagaagctgctgtcgcctaagaggctggaacatgtcctggagaagtcattgcattgctctgtgctcaagcctctccggcccatcctggcagcccgcctgcggcgccggcttgccgcagacggctccctgggccgcctagctgagggcctccgcctggcccgggcccagggccccggagccttcgggtcccacctgagcctgccctccccagtagagttggagcaagtgcgccagaagctgctgcagctgctccgcacctactcacccagcgcccaggtcaagcggctcctgcaggcctgcaagctgctctacatggccctgaggacccaggaaggggagggcgcgggtgccgacgagttcctgcctctgctgagcctcgtcttggcccactgtgaccttcctgagctgctgctggaggccgagtacatgtcggagctgctggagcccagcctgcttactggagagggtggctactacctgaccagcctctctgccagcctggccctgctgagtggcctgggtcaggcccacaccctcccactgagccccgtgcaggagctacggcgctccctcagcctctgggagcagcgccgcctgcctgccacccactgcttccagcacctcctccgagtagcctatcaggatcccagcagtggctgcacctccaagaccctggccgtgcccccagaagcctcgattgccaccctgaaccagctctgtgccaccaagttccgagtgacccagcccaacacttttggcctcttcctgtacaaggagcagggctaccaccgcctgccccctggggccctggcccacaggctgcccaccactggctacctcgtctaccgccgggcggagtggcctgagacccagggggctgtgacagaggaggagggcagtgggcagtcagaggcaagaagcagaggggaggagcaagggtgccagggagatggggatgctggggtcaaagccagccccagggacattcgggaacagtctgagacaactgctgaagggggccagggtcaagcccaggaaggccctgctcagccaggggaaccagaggcagagggaagccgggcagcagaggagtagcttgaagtggccagaagggtcattcggggcgggagaccctgagcctgctgagaaatccttttagcgccagcaagccccacccagggccctgtcctgtgtctgccaccacctttgtctgatacttgtttccagggaagctgggggaactgccacatctgaggaactggaataaagatgagggggcttcgggggcccccagactgtgaaaaaaaaaaaaaa

SEQ ID NO: 2311 - DNA, 2174 bp, Homo Sapiens
  NM_004294
cgtgatctcgggtttgtcgggctgaaatgtggcgggtctcggaaggttccgacctcagtaaagagagctaacgtgtattcttctttttcttagatgctgagatgaatcgtcacctgtgtgtttggctttttagacatccatctcttaatggttacctccagtgtcacatccagctccattctcatcaatttagacagatacatcttgatacaaggctgcaagtttttagacaaaacaggaattgcattcttcatctgttaagtaagaattggtccaggagatattgccatcaagacaccaagatgctctggaagcataaagcactacagaaatatatggagaacctgagtaaggagtaccaaacacttgagcaatgtctgcagcatatccctgtgaatgaggaaaaccgaaggtccttgaacagaaggcatgctgagttggcacctcttgcagccatttaccaagaaattcaggagactgaacaagcaattgaagaattagaatcaatgtgtaaaagcctaaataaacaagatgaaaagcagttacaagaacttgcactggaagaaaggcaaaccattgatcaaaaaatcaacatgttgtacaatgagcttttccagagccttgtgccaaaggagaaatatgacaaaaatgatgttattttagaggtgacagctggaaggactactggaggtgacatctgccaacaatttacccgagaaatatttgacatgtaccagaattattcgtgctataaacactggcaatttgaacttctgaattatacaccagcagattatggtggactacatcatgcagccgcccgaatttccggtgacggtgtctataagcatttgaagtatgagggtgggattcaccgagttcagcgcatccccgaggtgggcctgtcctcaaggatgcagcgcattcacacaggaacgatgtcggttattgtccttcctcagccagatgaggtggatgtgaaattggaccccaaggatttgcgaatagatacatttcgagccaaaggagcaggagggcagcatgttaataaaactgatagtgccgtcagacttgtccacatccccacagggctagtagtagaatgccaacaagaaagatcacagataaaaaataaagaaatagcctttcgtgtgttgagagctagactctaccagcagattattgagaaagacaagcgtcagcaacaaagtgctagaaaactgcaggtgggaacaagagcccagtcagagcgaattcggacatataatttcacccaggatagagtcagtgaccacaggatagcatatgaagttcgtgatattaaggaatttttatgtggtgggaagggcctggatcagctaattcagagactgcttcaatcagcagatgaagaagccattgctgaacttttggatgaacaccttaaatcagcaaaataaatactaacttattattatttatgattatataaatgaaatggacctatatcaagaggcagactgaagcttggaaatcattatgaatatttgtaaattacagctttaagaacacattacacataaatatatgttttgtaattaatcgaagtcacatttcctgacctaagaatttattttaggtttcctgtaaagtacaatccaactcatcaagtagaaaataagcatgcatcattgaaaagagaaagtattgagaattgattgtgtcatttaggacaagtcacttgttctctttatatgccttttttccccagccatctatgaattaatttaaatatatttttaatctactacttcaggaaaatatggtaaaatttagtaaaatatgaattttagacttccttataaaccttttatttaaatacaaagtaccttggcctatagtggatgcttatgcctgtaatcccagtgctttgaagggccaaagggggaagatctcttgaggtaagaatttgagaccagcctgggcaaaatagaccccatgtctacaaaaaaactcaaaacataaagaaaaaccataatactgttaatcatgttaaagttaagacttagactgcaacttttaaataaaaattatgaagaatatgagtcattcaataacaatgagcatctgggtacagacagtaaagccctttgattgctgtatgaattccacactatataaacaataagctgata

SEQ ID NO: 2312 - DNA, 2404 bp, Homo Sapiens
  NM_004299
ctcggttcctctttcctcgctcaagatggcgctgctcgcgatgcattcttggcgctgggcggccgcggcggctgctttcgaaaagcgccggcactccgcgattctgatccggcctttagtctctgttagcggctcaggtccgcagtggaggccacatcaactcggcgccttgggaaccgctcgagcctaccagcagattccagagtcattaaaaagtatcacatggcagagattgggaaaaggcaattcaggacagttcttagatgctgcaaaggctctccaggtatggccactgatagaaaagaggacatgttggcatggtcatgcaggaggaggactccacacagacccaaaagaagggttaaaagatgttgatactcggaaaatcataaaagcaatgctttcttatgtgtggcccaaagacaggccagatctacgagctagagttgccatttcgctgggatttttgggtggtgcaaaggccatgaatattgtggttcccttcatgtttaaatatgctgtagacagcctcaaccagatgtcgggaaacatgctgaacctgagtgatgcaccaaatacagttgcaaccatggcaacagcagttctgattggctatggtgtatcaagagctggagctgctttttttaacgaagttcgaaatgcagtatttggcaaggtagcccagaattcaatccgaagaatagccaaaaatgtctttctccatcttcacaacctggatctgggttttcacctgagcagacagacgggagctttatctaaggctattgacagaggaacaaggggtatcagttttgtcctgagtgctttggtatttaatcttcttcccatcatgtttgaagtgatgcttgtcagtggtgttttgtattacaaatgcggtgcccagtttgctttggtaacccttggaacacttggtacatacacagcattcacagttgcagtcacacggtggagaactagatttagaatagaaatgaacaaagcagataatgatgcaggtaatgctgctatagactcactgctgaattatgaaactgtgaagtattttaataatgaaagatatgaagcacagagatatgatggatttttgaagacgtatgagactgcttcattgaaaagtacctctactctggctatgctgaactttggtcaaagtgctattttcagtgtcggtttaacagctataatggtgctcgccagtcagggaattgtggcaggtacccttactgttggagatctagtaatggtgaatggactgctttttcagctttcattacccctgaactttctgggaactgtatatagagagactagacaagcactcatagatatgaacaccttgtttactctactcaaggtagacacccaaattaaagacaaagtgatggcatctccccttcagatcacaccacagacagctaccgtggcctttgataatgtgcattttgaatacattgagggccagaaagtccttagtggaatatcctttgaagtccctgcaggaaagaaagtggccattgtaggaggtagtgggtcagggaaaagcacaatagtgaggctattatttcgcttctatgagcctcaaaagggtagcatttatcttgctggtcaaaatatacaagatgtgagcctggaaagccttcggagggcagtgggagtggtacctcaggatgctgtcctcttccataatactatttattacaacctcttatatggaaacatcagtgcttcacctgaggaagtgtatgcagtggcaaaattagctggacttcatgatgcaattcttcgaatgccacatggatatgacacccaagtaggggaacgaggactcaagctttcaggaggagaaaagcaaagagtagcaattgcaagagccattttgaaggaccccccagtcatactctatgatgaagctacttcatcgttagattcgattactgaagagactattcttggtgccatgaaggatgtggtcaaacacagaacttctattttcattgcacacagattgtcaacagtggttgatgcagatgaaatcattgtcttggatcagggtaaggtagccgaacgtggtacccaccatggtttgcttgctaaccctcatagtatctattcagaaatgtggcatacacagagcagccgtgtgcagaaccatgataaccccaaatgggaagcaaagaaagaaaatatatccaaagaggaggaaagaaagaaactacaagaagaaattgtcaatagtgtgaaaggctgtggaaactgttcgtgctaagtcacataagacattttctttttttgttgttttggactacatatttgcactgaagcagaattgttttattaaaaaaatcatacattcccattttctataaaaaaaaaaaaaaaaaaa

SEQ ID NO: 2313 - DNA, 1908 bp, Homo Sapiens
  NM_004301
gccagcaagtgtggctgagctccggggtgtgtggacgccgctttgttgcctgaggtgggtggcggtggaagttaagggagtcaggggctatcgctcctcgagactcgcagtcgcggccactgcagtcacttcgccagttagcccttagggtaggagtcgcgccggcagcagccatgagcggcggcgtgtacgggggagatgaagttggagcccttgtttttgacattggatcctatactgtgagagctggttatgctggtgaggactgccccaaggtggattttcctacagctattggtatggtggtagaaagagatgacggaagcacattaatggaaatagatggcgataaaggcaaacaaggcggtcccacctactacatagatactaatgctctgcgtgttccgagggagaatatggaggccatttcacctctaaaaaatgggatggttgaagactgggatagtttccaagctattttggatcatacctacaaaatgcatgtcaaatcagaagccagtctccatcctgttctcatgtcagaggcaccgtggaatactagagcaaagagagagaaactgacagagttaatgtttgaacactacaacatccctgccttcttcctttgcaaaactgcagttttgacagcatttgctaatggtcgttctactgggctgattttggacagtggagccactcataccactgcaattccagtccacgatggctatgtccttcaacaaggcattgtgaaatcccctcttgctggagactttattactatgcagtgcagagaactcttccaagaaatgaatattgaattggttcctccatatatgattgcatcaaaagaagctgttcgtgaaggatctccagcaaactggaaaagaaaagagaagttgcctcaggttacgaggtcttggcacaattatatgtgtaattgtgttatccaggattttcaagcttcggtacttcaagtgtcagattcaacttatgatgaacaagtggctgcacagatgccaactgttcattatgaattccccaatggctacaattgtgattttggtgcagagcggctaaagattccagaaggattatttgacccttccaatgtaaaggggttatcaggaaacacaatgttaggagtcagtcatgttgtcaccacaagtgttgggatgtgtgatattgacatcagaccaggtctctatggcagtgtaatagtggcaggaggaaacacactaatacagagttttactgacaggttgaatagagagctgtctcagaaaactcctccaagtatgcggttgaaattgattgcaaataatacaacagtggaacggaggtttagctcatggattggcggctccattctagcctctttgggtacctttcaacagatgtggatttccaagcaagaatatgaagaaggagggaagcagtgtgtagaaagaaaatgcccttgagaaagagttcccaagcttctaccttccttttgtcaccttacgtttcatagctttagtatactcaggaaaagaatgaccatcttttgtagaatgtttatacatttttgcatatttcaatttccacttaaattttttaaagctttaactggctctataaattaagtttgtgctttccttgaaatgcacttattcttattacaagcattttataattttgtataaatgtctattttctctaaatattttgctttcagtaaaatgctttccaactctgtttagtgtattaattaccagtggattggtagaactgctttttattgactagtaaaagttactgcctatgctttttaccttaggcttacagaattaaataaaaattagccattccagaaataaaaaaaaaaaaaaaaaaaaaaaaaaaaaaaaaaagaaaaaaaaaaaaaaa

SEQ ID NO: 2314 - DNA, 4564 bp, Homo Sapiens
  NM_004302
ggggaggcgccgggggcgcgcgcgcgcgcgctgggcgctgctgggctgcggcggcggcggcggcggcggtggttactatggcggagtcggccggagcctcctccttcttcccccttgttgtcctcctgctcgccggcagcggcgggtccgggccccggggggtccaggctctgctgtgtgcgtgcaccagctgcctccaggccaactacacgtgtgagacagatggggcctgcatggtttccattttcaatctggatgggatggagcaccatgtgcgcacctgcatccccaaagtggagctggtccctgccgggaagcccttctactgcctgagctcggaggacctgcgcaacacccactgctgctacactgactactgcaacaggatcgacttgagggtgcccagtggtcacctcaaggagcctgagcacccgtccatgtggggcccggtggagctggtaggcatcatcgccggcccggtgttcctcctgttcctcatcatcatcattgttttccttgtcattaactatcatcagcgtgtctatcacaaccgccagagactggacatggaagatccctcatgtgagatgtgtctctccaaagacaagacgctccaggatcttgtctacgatctctccacctcagggtctggctcagggttacccctctttgtccagcgcacagtggcccgaaccatcgttttacaagagattattggcaagggtcggtttggggaagtatggcggggccgctggaggggtggtgatgtggctgtgaaaatattctcttctcgtgaagaacggtcttggttcagggaagcagagatataccagacggtcatgctgcgccatgaaaacatccttggatttattgctgctgacaataaagataatggcacctggacacagctgtggcttgtttctgactatcatgagcacgggtccctgtttgattatctgaaccggtacacagtgacaattgaggggatgattaagctggccttgtctgctgctagtgggctggcacacctgcacatggagatcgtgggcacccaagggaagcctggaattgctcatcgagacttaaagtcaaagaacattctggtgaagaaaaatggcatgtgtgccatagcagacctgggcctggctgtccgtcatgatgcagtcactgacaccattgacattgccccgaatcagagggtggggaccaaacgatacatggcccctgaagtacttgatgaaaccattaatatgaaacactttgactcctttaaatgtgctgatatttatgccctcgggcttgtatattgggagattgctcgaagatgcaattctggaggagtccatgaagaatatcagctgccatattacgacttagtgccctctgacccttccattgaggaaatgcgaaaggttgtatgtgatcagaagctgcgtcccaacatccccaactggtggcagagttatgaggcactgcgggtgatggggaagatgatgcgagagtgttggtatgccaacggcgcagcccgcctgacggccctgcgcatcaagaagaccctctcccagctcagcgtgcaggaagacgtgaagatctaactgctccctctctccacacggagctcctggcagcgagaactacgcacagctgccgcgttgagcgtacgatggaggcctacctctcgtttctgcccagccctctgtggccaggagccctggcccgcaagagggacagagcccgggagagactcgctcactcccatgttgggtttgagacagacaccttttctatttacctcctaatggcatggagactctgagagcgaattgtgtggagaactcagtgccacacctcgaactggttgtagtgggaagtcccgcgaaacccggtgcatctggcacgtggccaggagccatgacaggggcgcttgggaggggccggaggaaccgaggtgttgccagtgctaagctgccctgagggtttccttcggggaccagcccacagcacaccaaggtggcccggaagaaccagaagtgcagcccctctcacaggcagctctgagccgcgctttcccctcctccctgggatggacgctgccgggagactgccagtggagacggaatctgccgctttgtctgtccagccgtgtgtgcatgtgccgaggtgcgtcccccgttgtgcctggttcgtgccatgcccttacacgtgcgtgtgagtgtgtgtgtgtgtctgtaggtgcgcacttacctgcttgagctttctgtgcatgtgcaggtcgggggtgtggtcgtcatgctgtccgtgcttgctggtgcctcttttcagtagtgagcagcatctagtttccctggtgcccttccctggaggtctctccctcccccagagcccctcatgccacagtggtactctgtgtctggcaggctactctgcccaccccagcatcagcacagctctcctcctccatctcagactgtggaaccaaagctggcccagttgtccatgacaaaagaggcttttgggccaaaatgtgagggtggtgggtgggatgggcagggaaggaatcctggtggaagtcttgggtgttagtgtcagccatgggaaatgagccagcccaagggcatcatcctcagcagcatcgaggaagggccgaggaatgtgaagccagatctcgggactcagattggaatgttacatctgtctttcatctcccagatcctggaaacagcagtgtatatttttggtggtggtgggtttggggtggggaagggaagggcgggcaaggagtggggagggagtctggggtgggagggaggcatctgcatgggtcttcttttactggactgtctgatcagggtggagggaaggtgagaggtttgcatccacttcaggagccctactgaagggaacagcctgagccgaacatgttatttaacctgagtatagtatttaacgaagcctagaagcacggctgtgggtggtgatttggtcagcatatcttaggtatataataactttgaagccataacttttaactggagtggtttgatttctttttttaattttattgggagggtttggattttaactttttttaatgttgttaaatattaagtttttgtaaaaggaaaaccatctctgtgattacctctcaatctatttgtttttaaagaaatccctaaaaaaaaaaattatccaattgaacgcacatagctcaatcacactggaaatgtttgtccttgcacctgagcctgttcccactcagcagtgagagttcctctttgccctgaggctcagtctctctcgtattttgtccccacccccaattccttgagtggtttttgctctagggccctttcttgcactgtccagctggttgtaccctctccaggcatttattcaacaaatgtgggtgaagtgcctgctgggtgccaggtgctgggaatacatctgtggacaagacatgcttgggtcctactcctggagcactgtaaaaagagctgattcaagtaagtagatgcctgttttgagaccagaaggtttcataattggttctacgacccttttgagcctagaattattgttcttatataagatcactgaagaaagaggaacccccacaaccccctccacaaagagaccaggggcgggtgatgagacctggggtttagaaccccaggtgagacctcaaatcactgcattcattctgagcccccttcctgtccccaggggaggtgtattgtgtatgtagccttagagcatctctgcctccaacccagcagttctctgccaaagcttgtggaggagggagagccctgtccctgccctcaggctccccagtgctcctggcccttctatttatttgactgattattgcttctttccttgcattaaaggagatcttcccctaacctttgggccaatttactggccactaatttcgtttaaataccattgtgtcattggggggaccgtctttacccctgctgacctcccacctatccgccctgcagcagaaccttggcggtttataggtaatgatggaacttagactcctcttcccagagtcacaagtagcctctgggatctgccaacacacgtccactcccaagccactagcccactccccagttggcccttctgcccttaccccacacacagtccaactcttccacctctggggaagatggagcaggtctttgggaagctcccacacccacctctgccactcttaacactaagtgagagttggggagaaactgaagccgtgtttttggccccccgaggctaaccctgatccatagtgctacctgcacctctggattctggattcacagaccaagtccaagcccgttcttacgtcgccataaaggcccccgaacggcattctcggtacttctgtttgtttttgtacattttattagaaaggactgtaaaatagccacttagacactttacctcttcagtatgcaaatgtaaataaattgtaatataggaaatcttttgttttaatataagaatgagcctgtccaatttctgctgtacattattaaaagttttattcacagag

SEQ ID NO: 2315 - DNA, 3891 bp, Homo Sapiens
  NM_004311
gcgcactctggggaaagcggagctgcaccccgccccgtattgctgctcagctcctcagctgtgcgtgcgagggacgtcgggggtggcgccgcagcagttgcccctggtaacgggggaggcagcaggaggaggaggaggaggagggactcggcgggaggatgggcttgctctcaattttgcgcaagttgaaaagtgcaccagaccaggaggtgagaatacttctcctgggcttggataatgctggcaagaccactcttctgaagcagcttgcatctgaagacatcagccacatcacacctacacagggtttcaacatcaaaagtgtacaatcacaaggttttaaactgaatgtatgggacattggtggacagaggaaaatcagaccatactggaagaattattttgaaaataccgatattcttatatatgtaatcgacagtgcagacagaaaaagatttgaagagacgggtcaggaactagcggaattactggaggaagaaaaactaagttgtgtgccagtgctcatctttgctaataagcaggatttgctcacagcagcccctgcctctgaaattgcagaaggactgaacctgcataccatccgcgaccgagtctggcagatccagtcttgctcagctctcacaggagagggcgttcaggatggcatgaactgggtctgcaaaaatgtcaatgcaaagaagaaataaaatctagacgaatggagatgcaggagctgcgggagccgaattcggtcctgaaaaacactaatttgctgctttctgaccaaatgtttttccatctgtgtacagctccagctgtttgaagagagggaacaacacggtttagaaagaatccccattccagcagtagatttaactgatctctgaggttcagtatcatttttcaaataaaggaattatattatttcctctgcataattgaaatagtattaaatgtctcaaagcacatgattagaaaatgagatcttttaaatgagcaagagattgcattgcagtttagacaattccagtgggcttttttttcctctcaaaaaaaaaaaaagaaaaagaaaaagaggaagaagcagctttgctgagttcatttatttactgacccgtcccttgcattccctccatggttttgaaaccacagacagtgtttgctggtgctgtcagtgatttttaccgtcactagcccagccaggcttcagtctgtccgacaggaagctgctgggtgggggtggggggagaaaaggcagataattaaaccatctcatcgtcttgcaggtcggagactacgtatgtaatcctcactctttggacagaaaaaaaaaaaaaagtctttcttgcagacaagtcactacagaaacataccccatcccacccacccctgcctctgccccagccagccacacagagaagcaaattcttatgacttttgactgtaatgacatctggaatgtaaggagaggtgggaggtttaattccagaaaaattacaaggtccttaaaaagctctcacatcgagggctcaggctagcgtaaacaggctttctccagctcagtggagcagtgagcagccgactctgagattagctggcttctccacggccgtcctatagacaggatttctaaagctcaaagaattctgtgtttaaacgatcacaataggccgctgctatcagattttagaaataaatgcagctttaccatgaacctgctccactgagaaaagccaggcagatcgatttttagatcaatttttacagtgctggcaacttggtggtgtgggatgctcctggatggagagggtttgctgctggggaggacatgggtgtgtgtgtgactgcaggggtcgtgtccaaggaatcaagagtcaccccagctgctgggctcctctgcctctctgcagcagaatgtccgtcctctgttgattgattggagaggaatagcagaacatttctcctgcccctcgttgcaaaacgagcttgtttccctgaacctcagaaatcctcagcttcaaacatggggaaacaggccagagcattgcccggctcctgaattaaactctgttctggtgcctgagctcaggggttttcagagaatgaataagagactgtccagtgactggtgggtccctgggggccagctgccttctcatcctgggaggtggcccttcccaagcccatcagggcgtgtgagcagactgaaggggccgctgcagcccctggccctcaatacccagctgcttctggctaagagtgcagcagagactgaggcatagccagcttcaaaagcgatctgacatgaaagtcattaacaaagccagccgtgaaaaggtgccccagagttgctgtggacagacctgtaaggacttgcaaaacaaaagaaagtgaggggtttttttaacctcagagctagctgctctctgcagcctcctccactggcttctctggctcacccaagctctcccttacagaggcaacacagaattataaggaatcagaaatcccccttctaccaggctgcaaatgtggctctagcacttgcaaattgttttttcttccgaatagttcagcagggacaagttatctgaggggcaaaatgcctgcttggaggtctgcaattttggaacactgcagtatggaactttggcattggagggtctgtaaaatatttttgttcttttaccaccaacttaggggactgttttaaagagccatcccaaggcctctcctagcaggcagaagccactcctctgataacggcctctgtaaatgttctgatttgctctcagctgcagagacacagagacactgcagatgtcacacgctttcatcttccctttgagcccttttgaaccctcctggggctctggggtagatgagagaagcctgaaaaaggcagagtttgaaagctcccatttaaaaacaaaatactttttaaagccctcttgcctcttccctgcccactcctgccccctgaccagaagacagaatttgaagctggaaagggaagaccccttttcccctcctcctgtccccagtgagtcttagcgagacttttgccctgcgcacaattgcatctgaatgtgcgggggagagggctgggggccggagggcaggcaaggcctggggggtgctcgtgatatgtgctcaagccagttgtgggaaaaactcgagtcctcccctcctcccgacctaccccgtgtggctgcttttggctggattccctgcacccagtgcaacacaccctttccccttcactctcccttggttactatggaaacaagggtgtcattgatgtgggctgagctggggaacatgtcggtgcacagctgaaagtcagcgattatgccggcggttagaaatgtgccagggttaaaggagtccgcagctcccacggctgctgggaggacatggtcctgcccccttccttcctccctccctccgtctccacttctctctccttgcttttgacaaatttctttattcccctctggactaaagtagtggctatttttgtgccactctgcgccccaccctcactgttggccgctccttatccggcctggcctggagggtgacaccatgtcaccctcaccaggactcgtctctccattcccgtcagagtttgctttgatttccctttcctttccttctcggggaccagttcttacttccttttatttttagctctgcactccatgtggtttcagggttcagtctgatccatcaaaaggttctttttttataatcccttttgaaaatgataatcaaaggaagagatgtggtgtttggtcatgtggaaaactcaatgtataatttagacgtctgtcaaaaatccgacaaataaaatttagctggaacgaaggcaaaaaaaaaaaaaaaaaa

SEQ ID NO: 2316 - DNA, 5349 bp, Homo Sapiens
  NM_004318
ggggcgtggccgtcgggcggcgagccgcgcgctctcgccccgggagggagtcacaggttcgtacacgcgaggccgggcgcgcgcagccggcaggcgggtgaagtcttcccaggtgctgcaggcggtgctgaggcacagggtctgctgcaggagcagcggcccgaacccgctccagcggcccgccgccgccagcggttcccgcgtcgcgtgtgtacccccgcgcactgaaggaggtccgccagccctcaccagcccccgcggaccgtgcaatggcccagcgtaagaatgccaagagcagcggcaacagcagcagcagcggctccggcagcggtagcacgagtgcgggcagcagcagccccggggcccggagagagacaaagcatggaggacacaagaatgggaggaaaggcggactctcaggaacttcattcttcacgtggtttatggtgattgcattgctgggcgtctggacatctgtagctgtcgtttggtttgatcttgttgactatgaggaagttctaggaaaactaggaatctatgatgctgatggtgatggagattttgatgtggatgatgccaaagttttattaggacttaaagagagatctacttcagagccagcagtcccgccagaagaggctgagccacacactgagcccgaggagcaggttcctgtggaggcagaaccccagaatatcgaagatgaagcaaaagaacaaattcagtcccttctccatgaaatggtacacgcagaacatgttgagggagaagacttgcaacaagaagatggacccacaggagaaccacaacaagaggatgatgagtttcttatggcgactgatgtagatgatagatttgagaccctggaacctgaagtatctcatgaagaaaccgagcatagttaccacgtggaagagacagtttcacaagactgtaatcaggatatggaagagatgatgtctgagcaggaaaatccagattccagtgaaccagtagtagaagatgaaagattgcaccatgatacagatgatgtaacataccaagtctatgaggaacaagcagtatatgaacctctagaaaatgaagggatagaaatcacagaagtaactgctccccctgaggataatcctgtagaagattcacaggtaattgtagaagaagtaagcatttttcctgtggaagaacagcaggaagtaccaccagaaacaaatagaaaaacagatgatccagaacaaaaagcaaaagttaagaaaaagaagcctaaacttttaaataaatttgataagactattaaagctgaacttgatgctgcagaaaaactccgtaaaaggggaaaaattgaggaagcagtgaatgcatttaaagaactagtacgcaaataccctcagagtccacgagcaagatatgggaaggcgcagtgtgaggatgatttggctgagaagaggagaagtaatgaggtgctacgtggagccatcgagacctaccaagaggtggccagcctacctgatgtccctgcagacctgctgaagctgagtttgaagcgtcgctcagacaggcaacaatttctaggtcatatgagaggttccctgcttaccctgcagagattagttcaactatttcccaatgatacttccttaaaaaatgaccttggcgtgggatacctcttgataggagataatgacaatgcaaagaaagtttatgaagaggtgctgagtgtgacacctaatgatggctttgctaaagtccattatggcttcatcctgaaggcacagaacaaaattgctgagagcatcccatatttaaaggaaggaatagaatccggagatcctggcactgatgatgggagattttatttccacctgggggatgccatgcagagggttgggaacaaagaggcatataagtggtatgagcttgggcacaagagaggacactttgcatctgtctggcaacgctcactctacaatgtgaatggactgaaagcacagccttggtggaccccaaaagaaacgggctacacagagttagtaaagtctttagaaagaaactggaagttaatccgagatgaaggccttgcagtgatggataaagccaaaggtctcttcctgcctgaggatgaaaacctgagggaaaaaggggactggagccagttcacgctgtggcagcaaggaagaagaaatgaaaatgcctgcaaaggagctcctaaaacctgtaccttactagaaaagttccccgagacaacaggatgcagaagaggacagatcaaatattccatcatgcaccccgggactcacgtgtggccgcacacagggcccacaaactgcaggctccgaatgcacctgggcttggtgattcccaaggaaggctgcaagattcgatgtgccaacgagaccaagacctgggaggaaggcaaggtgctcatctttgatgactcctttgagcacgaggtatggcaggatgcctcatctttccggctgatattcatcgtggatgtgtggcatccggaactgacaccacagcagagacgcagccttccagcaatttagcatgaattcatgcaagcttgggaaactctggagagaggctgcctttctggttccatctccttgggtgtgaggatagaatttcgaacaccaagagtcaattcccttgacttgcagcccgagtaattcaaagcctcctcctagggtcagaagacactaaagggaatatttgcctcgctgcaattcatttaggaaacaccctgctgtgtgtcatctcatgacagcactggtcttctgccagtatttaaggtgaacatttgatagcttctaccttaccagccaaagatattttttccacatagaataggtctaattcaatgtataatgagaacatatgtagaaactgtgaatggattgctttagtttgtaatttttctatgcagttatatttttctagtgtagctagactattttgtcatcatgtaccactacatttttgtttattttaatgacaagctgtataaatgctttacttctagctatttaatggtagcattactggggaactcagacttccctcttttaattcttcttagtaaaagatactcatgaaaaaagcagttttattttcctaacaaaaaagaaagagctcattatgtcagtgtctatgaactgtacccatcccaactctcaaatcgtttggttttttttatcttgattgagatcctcttctcactatgctagtggtggagatattgacaaaatcctatttctttcaaagaggaacttttcacaccgaaaaaagagcatggaattattttatattgttataaaaatcccagatgcaaatttttttaatgccaattattagagcttctggggaaaaagtatagttcacggaaataaaactatgttctttcagggttgggtggataggtggctgctagggtgtctggctcctggcggctttgccatccatgaggcaagggctgggaacacagtgtctttgcctatggtagatccatgtgaatgtcaggaagccagctcttcagtcttggagatgatttctgctacaattctgtagaaagattaaggatggcagagtaaaaggttaccaagaatgccaggatgtttttcttgggcgtaggaggtccagattactttcctttttgatgaaagagtttggaagactgtcccatctctctggcttgagaaatctctgccattttaaacatcactgtgaaatagcaattattatcatctgtatttagttttaacattacccacaacatagaaataataggtaaaaatcgtcttgcctactcattccaaagatgatcaagtcattaatctagcaaagtattcatgtatcagattttgtatattttgaatcaaagctaactaggaatgttagatataagaatgtaatgatattcatgcactgaattctaagccaatatgaacaaaaatgctgcatgaatggcacatataggtcaccaaagttcattcacaggtagaaaaaacttgtgctttcttttccatctaaaaacaaaaggagactttctttatctcatttaaagaacagctctttgaaattgaaattgaccctttttgcttgaccttaaggagattagcttccagtagatgagtttgcaaaatacttttcctgttcttttgttttgctggtattgaaaacatcccactaaatcagatgaagaggcatgggaggaaaaatatccaaattaattactaaaatcgagaagagaaggcaaactcttgaaaagtaaaaaggtgtttgtgaccttcagtatttattgaacagaggaaataactgacaagggcaatacaattcaatgttcatgtagtaacattcatgtcacttgttgaatttggttctcatatgtatattgcatacacataaattcaaactataagtcgtcatttttgagccatcatcttacattcatgtaatgaaattatggaagagagtaaaaactagctcttaacttagtaaatataatatggtatttaaaatcaggtcactacagtaaggttctaagtattgccaattgaaaagctagaaatggtattactgttgcaaagtgttgtcaataattgactccaatagcattgtaaatacttgtatcccacaactattttaaacccaagcaataaaatggattttctaattcacttcaattctttatttctcttacctatctatgtcttggtacataagaaaagtgtttccatcactgcattggtagaattatttcagtgttattatttttgtgatttcgtatgtctacacaaaaatgaattagtttaatttatattgtgatacagttgtttgagaaatatttttaattctgtttcaactttatttctccaagtgtataatataaaaattacttctgttattgttctctaccaataggggaaaaaattaaaacattagatccattgagaaagagatgatgtaataaataattaagattagtaataatattatcaggggtgattatgaccagttgaataatctctttcccttgaattatttagctaacaaattaactctcccaaatatttaaaataatgtaaaatcatattttactgcccattattaactaaaatatttttgtttgactttgagcaccaactggtaatactaataaatacccatgtcatgcagatggctgggcgaataagagatgtctaaaaatatgcactggtcttggaaaacatggcacaagtaaggatatcatatatgatgtctgtttattttatgtctgatttcttttgaatgagtagttggggactccatttctaaggagactaggtaaataaaatgacctttgacatttca

SEQ ID NO: 2317 - DNA, 6278 bp, Homo Sapiens
  NM_004326
cttccatgtgtgaaagctacttggcatgaatgcctgggccgtaccaagtgtcaccgcagcaagagggggagtcagaagaaaaacagatcagaccagagcagacaataggcccctaaagtgttccccctaagttgctttgatgttgtcctggtgtcttgataccaggaggccagggattgcaggaaaagggtcttttttgtcttcattcactttcccccctcagtttctgaaatgattctccagaatttctcctcataaaaaaggactgaatgtgggcccagttggcgtcattctgctttgacctaaacattcccatctgattgggtggcagagatcatttttggaaagttcttccgtgtcccgatgtagaagaaatagcaaattggacatattgaaagacaagggtcatctttgagaagggggttcctggactcctcacctccaggatgagcactgcagtgtcgtgacccttggggttttgtatgccctggagatgcgagattttcctctggcagcaggaggcacgcacccagagaatgctggagctgcaaggggaaaggacccacttccacagcagagaaaaacaaagaggaaaaaggcatacaggcagcgagcgctaagggacgcacccagcaagcagtgggccagtgccactgcccccagcagctgtttctgctgcaacccgagaggaactcggtgagcctgtcccgtttgtgactgcaagctcaggatttcaatcaatgcattccagtaaccctaaagtgaggagctctccatcaggaaacacacagagtagccctaagtcaaagcaggaggtgatggtccgtccccctacagtgatgtccccatctggaaacccccagctggattccaaattctccaatcagggtaaacaggggggctcagccagccaatcccagccatccccctgtgactccaagagtgggggccatacccctaaagcactccctggcccaggtgggagcatggggctgaagaatggggctggaaatggtgccaagggcaaggggaaaagggagcgaagtatttccgccgactcctttgatcagagagatcctgggactccaaacgatgactctgacattaaagaatgtaattctgctgaccacataaagtcccaggattcccagcacacaccacactcgatgaccccatcaaatgctacagcccccaggtcttctaccccctcccatggccaaactactgccacagagcccacacctgctcagaagactccagccaaagtggtgtacgtgttttctactgagatggccaataaagctgcagaagctgttttgaagggccaggttgaaactatcgtctctttccacatccagaacatttctaacaacaagacagagagaagcacagcgcctctgaacacacagatatctgcccttcggaatgatccgaaacctctcccacaacagcccccagctccggccaaccaggaccagaattcttcccagaataccagactgcagccaactccacccattccggcaccagcacccaagcctgccgcacccccacgtcccctggaccgggagagtcctggggtagaaaacaaactgattccttctgtaggaagtcctgccagctccactccactgcccccagatggtactgggcccaactcaactcccaacaatagggcagtgacccctgtctcccaggggagcaatagctcttcagcagatcccaaagcccctccgcctccaccagtgtccagtggcgagccccccacactgggagagaatcccgatggcctatctcaggagcagctggagcaccgggagcgctccttacaaactctcagagatatccagcgcatgctttttcctgatgagaaagaattcacaggagcacaaagtgggggaccgcagcagaatcctggggtattagatgggcctcagaaaaaaccagaagggccaatacaggccatgatggcccaatcccaaagcctaggtaagggacctgggccccggacagacgtgggagctccatttggccctcaaggacatagagatgtacccttttctccagatgaaatggttccaccttctatgaactcccagtctgggaccataggacccgaccaccttgaccatatgactcccgagcagatagcgtggctgaaactgcagcaggagttttatgaagagaagaggaggaagcaggaacaagtggttgtccagcagtgttccctccaggacatgatggtccatcagcacgggcctcggggagtggtccgaggacccccccctccataccagatgacccctagtgaaggctgggcacctgggggtacagagccattttctgatggtatcaacatgccacattctctgcccccgaggggcatggctccccaccccaacatgccagggagccagatgcgcctccctggatttgcaggcatgataaactctgaaatggaagggccgaatgtccccaaccctgcatctagaccaggtctttctggagtcagttggccagatgatgtgccaaaaatcccagatggtcgaaattttcctcctggccagggcattttcagcggtcctggccgaggggaacgcttcccaaacccccaaggattgtctgaagagatgtttcagcagcagctggcagagaaacagctgggtctccccccagggatggccatggaaggcatcaggcccagcatggagatgaacaggatgattccaggctcccagcgccacatggagcctgggaataaccccattttccctcgaataccagttgagggccctctgagtccttctaggggtgactttccaaaaggaattcccccacagatgggccctggtcgggaacttgagtttgggatggttcctagtgggatgaagggagatgtcaatctaaatgtcaacatgggatccaactctcagatgatacctcagaagatgagagaggctggggcgggccctgaggagatgctgaaattacgcccaggtggctcagacatgctgcctgctcagcagaagatggtgccactgccatttggtgagcacccccagcaggagtatggcatgggccccagaccattccttcccatgtctcagggtccaggcagcaacagtggcttgcggaatctcagagaaccaattgggcccgaccagaggactaacagccggctcagtcatatgccaccactacctctcaacccttccagtaaccccaccagcctcaacacagctcctccagttcagcgcggcctggggcggaagcccttggatatatctgtggcaggcagccaggtgcattccccaggcattaaccctctgaagtctcccacgatgcaccaagtccagtcaccaatgctgggctcgccctcggggaacctcaagtccccccagactccatcgcagctggcaggcatgctggcgggcccagctgctgctgcttccattaagtccccccctgttttggggtctgctgctgcttcacctgtccacctcaagtctccatcacttcctgccccgtcacctggatggacctcttctccaaaacctccccttcagagtcctgggatccctccaaaccataaagcacccctcaccatggcctccccagccatgctgggaaatgtagagtcaggtggccccccacctcctacagccagccagcctgcctctgtgaatatccctggaagtcttccctctagtacaccttataccatgcctccagagccaaccctttcccagaacccactctctattatgatgtctcgaatgtccaagtttgcaatgcccagttccaccccgttataccatgatgctatcaagactgtggccagctcagatgacgactcccctccagctcgttctcccaacttgccatcaatgaataatatgccaggaatgggcattaatacacagaatcctcgaatttcaggtccaaaccccgtggttccgatgccaaccctcagcccaatgggaatgacccagccactttctcactccaatcagatgccctctccaaatgccgtgggacccaacatacctcctcatggggtcccaatggggcctggcttgatgtcacacaatcctatcatggggcatgggtcccaggagccaccgatggtacctcaaggacggatgggcttcccccagggcttccctccagtacagtctcccccacagcaggttccattccctcacaatggccccagtggggggcagggcagcttcccaggagggatgggtttcccaggagaaggcccccttggccgccccagcaacctgccccaaagttcagcagatgcagcactttgcaagcctggaggccccgggggtcctgactccttcactgtcctggggaacagcatgccttcggtgtttacagacccagatctgcaggaggtcatccgacctggagccaccggaatacctgagtttgatctatcccgcattattccatctgagaagcccagccagacgctgcaatatttccctcgaggggaagttccaggccgtaaacagccccagggtcctggacctgggttttcacacatgcaggggatgatgggcgaacaagcccccagaatgggactagcattacctggcatgggaggtccagggccagtgggaactccggacatccctcttggtacagctccatccatgccaggccacaaccccatgagaccaccagcctttctccaacaaggcatgatgggacctcaccatcggatgatgtcaccagcacaatctacaatgcccggccagcccaccctgatgagcaatccagctgctgccgtgggcatgattcctggcaaggatcgggggcctgccgggctctacacccaccctgggcctgtgggctctccaggcatgatgatgtccatgcagggcatgatgggaccccaacagaacatcatgatccccccacagatgaggccccggggcatggctgctgacgtgggcatgggtggatttagccaaggacctggcaacccaggaaacatgatgttttaagctgctaagatgggatgtgccgatccttgtcaaaatgagattccaggtcctgagagctgctttgaggcagttccaggagtacttactattggtcatgcaataggagaacagagacccgagggctgctttgggggaggggggaactcgagaatgtatggatttacctgaaaacaaattattcatttaatcaacaggtgtgttttttttaagatttattttttaaaaattatttttgtggacttgggtatcaatgatggcacctacttttgggaatctgtagctgtgctttgagaattgccatcggtcatgtgttgcaccgttctctgtatgtttacgtcctttggactggcttctcccaggattcttttctgtttttgtttttttgatttgggctttatttttttctgtgtactgtactatattgtaaaagggattttagcagagactttagtctttggggcaagaggagaacaggaatgctgggctgtttactttaggtggagaatccatcttcagacctttggactattttctttcaactgcagtgtatagaaaaaccaaactacgacctcagagcagagtattaatgaaaagcacaaaaaaaggaactaagttcagcgaggggtggggggaggggggagatttttcttttgaaaaataatgactcttaggacatttgtttttcagttcaagtgctcttcagcactgtcttgtctcccaatataccaacccactggcacatttttctcttgttttctctctccgattttgctctgtctcctcagttaagtgtttccttcctttgtgccccccgctggtgaccctctgcttccctctctctttccctttggcagctgcaatacacagtgttattctggggaaataaatctagcaaagcctcgccttccatgccgagcgtcctcttggctctgagagggaaaggtctgtccttgggatgctctctggtcttttttccccctaagtctttctctttcccatcatacccttccctgcccaccttgttttctgttctccttttattaggaattcccaagtgaattttattaatgtgggagtggaacagatgctaaaagctatccaggattttgtttctgtttgttttaaattttgtggttccttccctttcctccccctcccatgcgtaagacgttctgtgtaacctccattaaatttggtacaaaaccactcgccagagctgtggtgtcagaaaaataaaatatattgtttcttacaaaa

SEQ ID NO: 2318 - DNA, 3631 bp, Homo Sapiens
  NM_004329
gcggccgctgcagagattggaatccgcctgccgggcttggcgaaggagaagggaggaggcaggagcgaggagggaggagggccaagggcgggcaggaaggcttaggctcggcgcgtccgtccgcgcgcggcgaagatcgcacggcccgatcgaggggcgaccgggtcggggccgctgcacgccaagggcgaaggccgattcgggccccacttcgccccggcggctcgccgcgcccacccgctccgcgccgagggctggaggatgcgttccctggggtccggacttatgaaaatatgcatcagtttaatactgtcttggaattcatgagatggaagcataggtcaaagctgtttggagaaaatcagaagtacagttttatctagccacatcttggaggagtcgtaagaaagcagtgggagttgaagtcattgtcaagtgcttgcgatcttttacaagaaaatctcactgaatgatagtcatttaaattggtgaagtagcaagaccaattattaaaggtgacagtacacaggaaacattacaattgaacaatgcctcagctatacatttacatcagattattgggagcctatttgttcatcatttctcgtgttcaaggacagaatctggatagtatgcttcatggcactgggatgaaatcagactccgaccagaaaaagtcagaaaatggagtaaccttagcaccagaggataccttgccttttttaaagtgctattgctcagggcactgtccagatgatgctattaataacacatgcataactaatggacattgctttgccatcatagaagaagatgaccagggagaaaccacattagcttcagggtgtatgaaatatgaaggatctgattttcagtgcaaagattctccaaaagcccagctacgccggacaatagaatgttgtcggaccaatttatgtaaccagtatttgcaacccacactgccccctgttgtcataggtccgttttttgatggcagcattcgatggctggttttgctcatttctatggctgtctgcataattgctatgatcatcttctccagctgcttttgttacaaacattattgcaagagcatctcaagcagacgtcgttacaatcgtgatttggaacaggatgaagcatttattccagttggagaatcactaaaagaccttattgaccagtcacaaagttctggtagtgggtctggactacctttattggttcagcgaactattgccaaacagattcagatggtccggcaagttggtaaaggccgatatggagaagtatggatgggcaaatggcgtggcgaaaaagtggcggtgaaagtattctttaccactgaagaagccagctggtttcgagaaacagaaatctaccaaactgtgctaatgcgccatgaaaacatacttggtttcatagcggcagacattaaaggtacaggttcctggactcagctctatttgattactgattaccatgaaaatggatctctctatgacttcctgaaatgtgctacactggacaccagagccctgcttaaattggcttattcagctgcctgtggtctgtgccacctgcacacagaaatttatggcacccaaggaaagcccgcaattgctcatcgagacctaaagagcaaaaacatcctcatcaagaaaaatgggagttgctgcattgctgacctgggccttgctgttaaattcaacagtgacacaaatgaagttgatgtgcccttgaataccagggtgggcaccaaacgctacatggctcccgaagtgctggacgaaagcctgaacaaaaaccacttccagccctacatcatggctgacatctacagcttcggcctaatcatttgggagatggctcgtcgttgtatcacaggagggatcgtggaagaataccaattgccatattacaacatggtaccgagtgatccgtcatacgaagatatgcgtgaggttgtgtgtgtcaaacgtttgcggccaattgtgtctaatcggtggaacagtgatgaatgtctacgagcagttttgaagctaatgtcagaatgctgggcccacaatccagcctccagactcacagcattgagaattaagaagacgcttgccaagatggttgaatcccaagatgtaaaaatctgatggttaaaccatcggaggagaaactctagactgcaagaactgtttttacccatggcatgggtggaattagagtggaataaggatgttaacttggttctcagactctttcttcactacgtgttcacaggctgctaatattaaacctttcagtactcttattaggatacaagctgggaacttctaaacacttcattctttatatatggacagctttattttaaatgtggtttttgatgcctttttttaagtgggtttttatgaactgcatcaagacttcaatcctgattagtgtctccagtcaagctctgggtactgaattgcctgttcataaaacggtgctttctgtgaaagccttaagaagataaatgagcgcagcagagatggagaaatagactttgccttttacctgagacattcagttcgtttgtattctacctttgtaaaacagcctatagatgatgatgtgtttgggatactgcttattttatgatagtttgtcctgtgtccttagtgatgtgtgtgtgtctccatgcacatgcacgccgggattcctctgctgccatttgaattagaagaaaataatttatatgcatgcacaggaagatattggtggccggtggttttgtgctttaaaaatgcaatatctgaccaagattcgccaatctcatacaagccatttactttgcaagtgagatagcttccccaccagctttattttttaacatgaaagctgatgccaaggccaaaagaagtttaaagcatctgtaaatttggactgttttccttcaaccaccattttttttgtggttattatttttgtcacggaaagcatcctctccaaagttggagcttctattgccatgaaccatgcttacaaagaaagcacttcttattgaagtgaattcctgcatttgatagcaatgtaagtgcctataaccatgttctatattctttattctcagtaacttttaaaagggaagttatttatattttgtgtataatgtgctttatttgcaaatcacccactcctttacaaccatactttatatatgtacatacattcatactgtagaaaccagctcatgtgtacctcatatcccatccttaagagaagaaatgttataaagtagaactaaatataaattttcagaattaatgcattcaaagtaatatatcaaatccaggactttgttaacttcaggtaaaaacttcattagggtaatatcatctcaattttttcaaatgaaaggattctctaattagaaatttatatgtcagagctgttataaatttatcaactgtcaaatatgttctggacagctaaatcatttgagatttttggttttttgatttctattccctaacttgtgaagacaatgaaaaatcaggcagaaatatttagtatctagtcagtatctgtagctacactgtataactgttcttcaataaaatggttcatattttatagaaaaaaaaaaaaaaaa

SEQ ID NO: 2319 - DNA, 2533 bp, Homo Sapiens
  NM_004330
gggatgctgtgtgggtttcaagaagacgccacgcctccgccgccgccacgcccccgccgcctccaccgccggctgccgcgcccggaggaggtcgggatgttatcacttccgccggggcttctcactgtgtccgggtcagctgctgccgccgacgccgtaccgctgcggccgggggattgggccggggtctccaccgccgaccgaggggagcgggctccgctcggccctgctttttgcgacctggccgtcagccccacgtcgccggcctggaggggcgaagaggacgagggggccaaggcttcctccggggacattggctccctggattatcaagagtttgtagttgacattgaatccaggctgaggatggaaggtgtggaacttaaagaagaatggcaagatgaagattttccgatacctttaccagaagatgatagtattgaagcagatatactagctataactggaccagaggaccagcctggctcactagaagttaatggaaataaagtgagaaagaaactaatggctccagacattagcctgacactggatcctagtgatggctctgtattgtcagatgatttggatgaaagtggggagattgacttagatggcttagacacaccgtcagagaatagtaatgagtttgagtgggaagatgatcttccaaaacccaagactactgaagtaattaggaaaggctcaattactgaatacacagcagcagaggaaaaagaagatggacgacgctggcgtatgttcaggattggagaacaggaccacagggttgatatgaaggcaattgaaccctataaaaaagttatcagccatgggggatattatggggatggattaaatgccattgttgtgtttgctgtctgtttcatgcctgaaagtagtcagcctaactatagatacctgatggacaatctttttaaatatgttattggcactttggagctattagtagcagaaaactacatgatagtttatttaaatggtgcaacaactcgaagaaaaatgcccagtctgggatggctcaggaaatgttatcagcaaattgatagaaggttacggaaaaatctaaaatccctaatcattgtacatccttcttggtttatcagaacacttctggctgttacaagaccatttattagctcgaaattcagccaaaaaattagatacgtgtttaatttggcagaactagcagaacttgtccccatggaatacgttggcataccagaatgcataaaacaagttgatcaagaacttaatggaaaacaagatgaaccgaaaaatgaacagtaagtttggcatctagtccaaacaagactgaagaatgtgctgatggagcagtgctgtttctgcattcataatgcatttattggcccatatttttatgtaacctgttacaaaatagacttgactttttcataatggacttttgtattatacaagggactgttcactgctgtactggtttgcaaatttcttgaatttagctctttaatagctaactgtattattatcgttttatattttatattgctaaatagagaaccacactttatataaagtagtttttgcatttgtttattgaatgatgcatcttcttcggtgaaatatttatatgcataaatggcaaaggaaagaaataatatatatttttatgtcattgagcaatattttttaatgtgtacctgtcttatggaagaaatatgcaggtatataagaccacgattttctaaagtgcatattagaatttttgtttttgtaaatggttaaatacatttcctgggtaacttaggaaattaagtttttcataaggcaacagatggttaaactgattgtcatgaatacccaaagatcatgtatataatcgaagtgtattagtaccatcccaaggtttttttctcatttaacatatttgtttcataattcagcaagtacagatgcaagcgcattgcacactttttcctttctaaacttaaagacaagtcaaaaagccattcttagaactagaggatttaagagggtaggaattagggtttgtatatatgtatatatgggacattttatcttctggcccaaagtcagaactttataaaaatcttgagtttgttcactaatgtgaaataagctatgtgtccagggtattgctcccctgagtgtatatgagtgctgagtagtattgcagagaatgtgatgagttattcactgtcacaactttttctatagaaaacaggggctgctttttaaactctcactatgggcactttaccaaaatacttccatatcaattatttgaactcggtagttgtttgacctagttagatgtggtgtttattcaagtttgtatgaaatcatgtttgacaatactgtaaattaggttaattttgtaagtcttagcatcatcatattgtgctgttttggataacacgtttgttacaagcatttaaactgtttcatttggtagtacctttacattgaaataaattgtgtttgtgcctccaaaaaaaaaaaaaaaaaa

SEQ ID NO: 2320 - DNA, 3505 bp, Homo Sapiens
  NM_004331
cgtcaggggcaggggagggacggcgcaggcgcagaaaagggggcggcggactcggcttgttgtgttgctgcctgagtgccggagacggtcctgctgctgccgcagtcctgccagctgtccgacaatgtcgtcccacctagtcgagccgccgccgcccctgcacaacaacaacaacaactgcgaggaaaatgagcagtctctgcccccgccggccggcctcaacagttcctgggtggagctacccatgaacagcagcaatggcaatgataatggcaatgggaaaaatggggggctggaacacgtaccatcctcatcctccatccacaatggagacatggagaagattcttttggatgcacaacatgaatcaggacagagtagttccagaggcagttctcactgtgacagcccttcgccacaagaagatgggcagatcatgtttgatgtggaaatgcacaccagcagggaccatagctctcagtcagaagaagaagttgtagaaggagagaaggaagtcgaggctttgaagaaaagtgcggactgggtatcagactggtccagtagacccgaaaacattccacccaaggagttccacttcagacaccctaaacgttctgtgtctttaagcatgaggaaaagtggagccatgaagaaagggggtattttctccgcagaatttctgaaggtgttcattccatctctcttcctttctcatgttttggctttggggctaggcatctatattggaaagcgactgagcacaccctctgccagcacctactgagggaaaggaaaagcccctggaaatgcgtgtgacctgtgaagtggtgtattgtcacagtagcttatttgaacttgagaccattgtaagcatgacccaacctaccaccctgtttttacatatccaattccagtaactctcaaattcaatattttattcaaactctgttgaggcattttactaaccttataccctttttggcctgaagacattttagaatttcctaacagagtttactgttgtttagaaatttgcaagggcttcttttccgcaaatgccaccagcagattataattttgtcagcaatgctattatctctaattagtgccaccagactagacctgtatcattcatggtataaattttactcttgcaacataactaccatctctctcttaaaacgagatcaggttagcaaatgatgtaaaagaagctttattgtctagttgttttttttcccccaagacaaaggcaagtttccctaagtttgagttgatagttattaaaaagaaaacaaaacaaaaaaaaaaggcaaggcacaacaaaaaaatatcctgggcaataaaaaaaatattttaaaccagctttggagccacttttttgtctaagcctcctaatagcgtcttttaatttataggaggcaaactgtataaatgataggtatgaaatagaataagaagtaaaatacatcagcagattttcatactagtatgttgtaatgctgtcttttctatggtgtagaatctttctttctgataaggaacgtctcaggcttagaaatatatgaaattgctttttgagatttttgcgtgtgtgtttgatattttttacgataattagctgcatgtgaatttttcatgaccttctttacattttttattttttatttctttatttttttttctctaagaagaggctttggaatgagttccaatttgtgatgttaatacaggcttcttgttttaggaagcatcacctatactctgaagcctttaaactctgaagagaattgtttcagagttattccaagcacttgtgcaacttggaaaaacagacttgggttgtgggaacagttgacagcgttctgaaaagatgccatttgtttccttctgatctctcactgaataatgtttactgtacagtcttcccaaggtgattcctgcgactgcaggcactggtcattttctcatgtagctgtcttttcagttatggtaaactcttaaagttcagaacactcaacagattccttcagtgatatacttgttcgttcatttctaaaatgtgaagctttaggaccaaattgttagaaagcatcaggatgaccagttatctcgagtagattttcttggatttcagaacatctagcatgactctgaaggataccacatgttttatatataaataattactgtttatgatatagacattgatattgactatttagagaaccgttgttaattttaaaactagcaatctataaagtgcaccaggtcaacttgaataaaaacactatgacagacaggtttgccagtttgcagaaactaactcttttctcacatcaacatttgtaaaattgatgtgttatagtggaaaataacatatagattaaacaaaatttttatcttttttcaagaatatagctggctatctttaagaaagatgatatatcctagttttgaaagtaattttcttttttctttctagcatttgatgtctaaataattttggacatctttttcctagaccatgtttctgtcttactcttaaacctggtaacacttgatttgccttctataacctatttatttcaagtgttcatatttgaatttctttgggaagaaagtaaatctgatggctcactgatttttgaaaagcctgaataaaattggaaagactggaaagttaggagaactgactagctaaactgctacagtatgcaatttctattacaattggtattacaggggggaaaagtaaaattacactttacctgaaagtgacttcttacagctagtgcattgtgctctttccaagttcagcagcagttctatcagtggtgccactgaaactgggtatatttatgatttctttcagcgttaaaaagaaacatagtgttgccctttttcttaaagcatcagtgaaattatggaaaattacttaaaacgtgaatacatcatcacagtagaatttattatgagagcatgtagtatgtatctgtagccctaacacatgggatgaacgttttactgctacacccagatttgtgttgaacgaaaacattgtggtttggaaaggagaattcaacaattaatagttgaaattgtgaggttaatgtttaaaaagctttacacctgtttacaatttggggacaaaaaggcaggcttcatttttcatatgtttgatgaaaactggctcaagatgtttgtaaatagaatcaagagcaaaactgcacaaacttgcacattggaaagtgcaacaagttcccgtgattgcagtaaaaatatttactattctaaaaaaatgagaattgaagacttagccagtcagataagttttttcatgaacccgttgtggaaattattggaattaactgagccaaagtgattatgcattcttcatctattttagttagcactttgtatcgttatatacagtttacaatacatgtataacttgtagctataaacattttgtgccattaaagctctcacaaaactttaaaaa

SEQ ID NO: 2321 - DNA, 1548 bp, Homo Sapiens
  NM_004332
gcttggtcttagcgcatgcgcactcccggcagctacgcgacctgtgaccatggtggctgtgctgggcggccggggcgtgttgcgcctgcggctgcttctctcagcgctgaagcccgggatccacgtcccacgggccggacccgcggccgcgttcggcacctcggtaacctctgccaaagtggctgtgaatggcgttcagctgcattaccagcagactggagagggagatcacgcagtcctgctacttcctgggatgttaggaagtggagagactgattttggacctcagctcaagaacctcaataagaagctcttcacggtggtcgcctgggatcctcgaggctatggacattccaggcccccagatcgcgatttcccagcagacttttttgaaagggatgcaaaagatgctgttgatttgatgaaggcgctgaagtttaagaaggtttctctgctggggtggagtgatgggggcataaccgcactcattgctgctgcaaaatatccatcttacatccacaagatggtgatctggggcgccaacgcctacgtcactgacgaagacagcatgatatatgagggcatccgagatgtttccaaatggagtgagagaacaagaaagcctctagaagccctctatgggtatgactactttgccagaacctgtgaaaagtgggtggatggcataagacagtttaaacatctcccagatggtaacatctgccggcacctgctgccccgggtccagtgccccgccttgattgtgcacggtgagaaggatcctctggtcccacggtttcatgccgacttcattcataagcacgtgaaaggctcacggctgcatttgatgccagaaggcaaacacaacctgcatttgcgttttgcagatgaattcaacaagttagcagaagacttcctacaatgagaatgcacactccagtcttggtggttccttcgtgtggggcttgatcgtgttgctgcctgttaacatgatgcctttgaaactctccgcctttgaaactttctacccctcccttcaatcttatcctaaccaaatgagaataatgacatattgaaaacagcctctagcttcaggctgggcacggtggctcacagctataatctcagcactttgggaggctgaggtgggagaattgcctgagcccaggagttcaagaccagcttgtgcaatatagggagactccggctctacaaaaaagagtttttcaaaattagccaggcgaagtggcacacatctgtggtcccaggtgctcaggaagctgaggtgggaggatcacttgagcccaattcaaagctgcagtgagctgtaattgcatcactgcactccaacctgggcaacagagtaagaccttgtcttaaaaaaaaataaaaacataaaaaaaaataaaaaaggaataaagcctctaacttcaatagctatgaaaattaaatccgattttctaagatgaagttgtgacaagttataccattgtcttaacaggtgaattcctgccataatttattttcaaataaattttaggtggagaa

SEQ ID NO: 2322 - DNA, 2949 bp, Homo Sapiens
  NM_004333
cgcctcccttccccctccccgcccgacagcggccgctcgggccccggctctcggttataagatggcggcgctgagcggtggcggtggtggcggcgcggagccgggccaggctctgttcaacggggacatggagcccgaggccggcgccggcgccggcgccgcggcctcttcggctgcggaccctgccattccggaggaggtgtggaatatcaaacaaatgattaagttgacacaggaacatatagaggccctattggacaaatttggtggggagcataatccaccatcaatatatctggaggcctatgaagaatacaccagcaagctagatgcactccaacaaagagaacaacagttattggaatctctggggaacggaactgatttttctgtttctagctctgcatcaatggataccgttacatcttcttcctcttctagcctttcagtgctaccttcatctctttcagtttttcaaaatcccacagatgtggcacggagcaaccccaagtcaccacaaaaacctatcgttagagtcttcctgcccaacaaacagaggacagtggtacctgcaaggtgtggagttacagtccgagacagtctaaagaaagcactgatgatgagaggtctaatcccagagtgctgtgctgtttacagaattcaggatggagagaagaaaccaattggttgggacactgatatttcctggcttactggagaagaattgcatgtggaagtgttggagaatgttccacttacaacacacaactttgtacgaaaaacgtttttcaccttagcattttgtgacttttgtcgaaagctgcttttccagggtttccgctgtcaaacatgtggttataaatttcaccagcgttgtagtacagaagttccactgatgtgtgttaattatgaccaacttgatttgctgtttgtctccaagttctttgaacaccacccaataccacaggaagaggcgtccttagcagagactgccctaacatctggatcatccccttccgcacccgcctcggactctattgggccccaaattctcaccagtccgtctccttcaaaatccattccaattccacagcccttccgaccagcagatgaagatcatcgaaatcaatttgggcaacgagaccgatcctcatcagctcccaatgtgcatataaacacaatagaacctgtcaatattgatgacttgattagagaccaaggatttcgtggtgatggaggatcaaccacaggtttgtctgctaccccccctgcctcattacctggctcactaactaacgtgaaagccttacagaaatctccaggacctcagcgagaaaggaagtcatcttcatcctcagaagacaggaatcgaatgaaaacacttggtagacgggactcgagtgatgattgggagattcctgatgggcagattacagtgggacaaagaattggatctggatcatttggaacagtctacaagggaaagtggcatggtgatgtggcagtgaaaatgttgaatgtgacagcacctacacctcagcagttacaagccttcaaaaatgaagtaggagtactcaggaaaacacgacatgtgaatatcctactcttcatgggctattccacaaagccacaactggctattgttacccagtggtgtgagggctccagcttgtatcaccatctccatatcattgagaccaaatttgagatgatcaaacttatagatattgcacgacagactgcacagggcatggattacttacacgccaagtcaatcatccacagagacctcaagagtaataatatatttcttcatgaagacctcacagtaaaaataggtgattttggtctagctacagtgaaatctcgatggagtgggtcccatcagtttgaacagttgtctggatccattttgtggatggcaccagaagtcatcagaatgcaagataaaaatccatacagctttcagtcagatgtatatgcatttggaattgttctgtatgaattgatgactggacagttaccttattcaaacatcaacaacagggaccagataatttttatggtgggacgaggatacctgtctccagatctcagtaaggtacggagtaactgtccaaaagccatgaagagattaatggcagagtgcctcaaaaagaaaagagatgagagaccactctttccccaaattctcgcctctattgagctgctggcccgctcattgccaaaaattcaccgcagtgcatcagaaccctccttgaatcgggctggtttccaaacagaggattttagtctatatgcttgtgcttctccaaaaacacccatccaggcagggggatatggtgcgtttcctgtccactgaaacaaatgagtgagagagttcaggagagtagcaacaaaaggaaaataaatgaacatatgtttgcttatatgttaaattgaataaaatactctctttttttttaaggtgaaccaaagaacacttgtgtggttaaagactagatataatttttccccaaactaaaatttatacttaacattggatttttaacatccaagggttaaaatacatagacattgctaaaaattggcagagcctcttctagaggctttactttctgttccgggtttgtatcattcacttggttattttaagtagtaaacttcagtttctcatgcaacttttgttgccagctatcacatgtccactagggactccagaagaagaccctacctatgcctgtgtttgcaggtgagaagttggcagtcggttagcctgggttagataaggcaaactgaacagatctaatttaggaagtcagtagaatttaataattctattattattcttaataatttttctataactatttctttttataacaatttggaaaatgtggatgtcttttatttccttgaagcaataaactaagtttctttttataaaaa

SEQ ID NO: 2323 - DNA, 1497 bp, Homo Sapiens
  NM_004334
aaagtgctgggattacaggcatgagccgccgcgccccgccccacgctcagtcttgaaattgtctggaacgggaaacggcaaacagcgagatatccgagcgagagtcccgccctgcatcagtttgcggaaccgccttggtagaaggagagaaggggagtggaggaagcacgggactggagggaccaaagttccccgatggcggcccaggggtgcgcggcatcgcggctgctccagctgctgctgcagcttctgcttctactgttgctgctggcggcgggcggggcgcgcgcgcggtggcgcggggagggcaccagcgcacacttgcgggacatcttcctgggccgctgcgccgagtaccgcgcactgctgagtcccgagcagcggaacaagaactgcacagccatctgggaagcctttaaagtggcgctggacaaggatccctgctccgtgctgccctcagactatgacctttttattaacttgtccaggcactctattcccagagataagtccctgttctgggaaaatagccacctccttgttaacagctttgcagacaacacccgtcgttttatgcccctgagcgatgttctgtatggcagggttgcagatttcttgagctggtgtcgacagaaaaatgactctggactcgattaccaatcctgccctacatcagaagactgtgaaaataatcctgtggattccttttggaaaagggcatccatccagtattccaaggatagttctggggtgatccacgtcatgctgaatggttcagagccaacaggagcctatcccatcaaaggtttttttgcagattatgaaattccaaacctccagaaggaaaaaattacacgaatcgagatctgggttatgcatgaaattgggggacccaatgtggaatcctgcggggaaggcagcatgaaagtcctggaaaagaggctgaaggacatggggttccagtacagctgtattaatgattaccgaccagtgaagctcttacagtgcgtggaccacagcacccatcctgactgtgccttaaagtcggcagcagccgctactcaaagaaaagccccaagtctttatacagaacaaagggcgggtcttatcattcccctctttctggtgctggcttccaggactcaactgtaactggaaactgtgttgctctaaccctcctccagccctgcagcctccccttgcagtcatcattcgtgttctgtgtataccaaatgattctgttatctaaagaagctttttgctgggaaaacgatgtcctgaaaatggtatttcaatgaggcatatgttcaggatttcagaaacaagaagttagttctatttagcaggttaaaaaatgctgcattagaattaaagcaagttattttcttatttgtataatgacacaaagcattgggagtcagactgcttgtatattatcaaacattttaagagaattctaataaagctgtattttacatcaaaaaaaaaaaaaaaaaa

SEQ ID NO: 2324 - DNA, 3509 bp, Homo Sapiens
  NM_004336
ggcgccctgaaacgttcggcgagccgactgcggctgcgcggggtattcgaatcggcggcggcttctagtttgcggttcaggtttggccgctgccggccagcgtcctctggccatggacaccccggaaaatgtccttcagatgcttgaagcccacatgcagagctacaagggcaatgaccctcttggtgaatgggaaagatacatacagtgggtagaagagaattttcctgagaataaagaatacttgataactttactagaacatttaatgaaggaatttttagataagaagaaataccacaatgacccaagattcatcagttattgtttaaaatttgctgagtacaacagtgacctccatcaattttttgagtttctgtacaaccatgggattggaaccctgtcatcccctctgtacattgcctgggcggggcatctggaagcccaaggagagctgcagcatgccagtgctgtccttcagagaggaattcaaaaccaggctgaacccagagagttcctgcaacaacaatacaggttatttcagacacgcctcactgaaacccatttgccagctcaagctagaacctcagaacctctgcataatgttcaggttttaaatcaaatgataacatcaaaatcaaatccaggaaataacatggcctgcatttctaagaatcagggttcagagctttctggagtgatatcttcagcttgtgataaagagtcaaatatggaacgaagagtgatcacgatttctaaatcagaatattctgtgcactcatctttggcatccaaagttgatgttgagcaggttgttatgtattgcaaggagaagcttattcgtggggaatcagaattttcctttgaagaattgagagcccagaaatacaatcaacggagaaagcatgagcaatgggtaaatgaagacagacattatatgaaaaggaaagaagcaaatgcttttgaagaacagctattaaaacagaaaatggatgaacttcataagaagttgcatcaggtggtggagacatcccatgaggatctgcccgcttcccaggaaaggtccgaggttaatccagcacgtatggggccaagtgtaggctcccagcaggaactgagagcgccatgtcttccagtaacctatcagcagacaccagtgaacatggaaaagaacccaagagaggcacctcctgttgttcctcctttggcaaatgctatttctgcagctttggtgtccccagccaccagccagagcattgctcctcctgttcctttgaaagcccagacagtaacagactccatgtttgcagtggccagcaaagatgctggatgtgtgaataagagtactcatgaattcaagccacagagtggagcagagatcaaagaagggtgtgaaacacataaggttgccaacacaagttcttttcacacaactccaaacacatcactgggaatggttcaggcaacgccatccaaagtgcagccatcacccaccgtgcacacaaaagaagcattaggtttcatcatgaatatgtttcaggctcctacacttcctgatatttctgatgacaaagatgaatggcaatctctagatcaaaatgaagatgcatttgaagcccagtttcaaaaaaatgtaaggtcatctggggcttggggagtcaataagatcatctcttctttgtcatctgcttttcatgtgtttgaagatggaaacaaagaaaattatggattaccacagcctaaaaataaacccacaggagccaggacctttggagaacgctctgtcagcagacttccttcaaaaccaaaggaggaagtgcctcatgctgaagagtttttggatgactcaactgtatggggtattcgctgcaacaaaaccctggcacccagtcctaagagcccaggagacttcacatctgctgcacaacttgcgtctacaccattccacaagcttccagtggagtcagtgcacattttagaagataaagaaaatgtggtagcaaaacagtgtacccaggcgactttggattcttgtgaggaaaacatggtggtgccttcaagggatggaaaattcagtccaattcaagagaaaagcccaaaacaggccttgtcgtctcacatgtattcagcatccttacttcgtctgagccagcctgctgcaggtggggtacttacctgtgaggcagagttgggcgttgaggcttgcagactcacagacactgacgctgccattgcagaagatccaccagatgctattgctgggctccaagcagaatggatgcagatgagttcacttgggactgttgatgctccaaacttcattgttgggaacccatgggatgataagctgattttcaaacttttatctgggctttctaaaccagtgagttcctatccaaatacttttgaatggcaatgtaaacttccagccatcaagcccaagactgaatttcaattgggttctaagctggtctatgtccatcaccttcttggagaaggagcctttgcccaggtgtacgaagctacccagggagatctgaatgatgctaaaaataaacagaaatttgttttaaaggtccaaaagcctgccaacccctgggaattctacattgggacccagttgatggaaagactaaagccatctatgcagcacatgtttatgaagttctattctgcccacttattccagaatggcagtgtattagtaggagagctctacagctatggaacattattaaatgccattaacctctataaaaatacccctgaaaaagtgatgcctcaaggtcttgtcatctcttttgctatgagaatgctttacatgattgagcaagtgcatgactgtgaaatcattcatggagacattaaaccagacaatttcatacttggaaacggatttttggaacaggatgatgaagatgatttatctgctggcttggcactgattgacctgggtcagagtatagatatgaaactttttccaaaaggaactatattcacagcaaagtgtgaaacatctggttttcagtgtgttgagatgctcagcaacaaaccatggaactaccagatcgattactttggggttgctgcaacagtatattgcatgctctttggcacttacatgaaagtgaaaaatgaaggaggagagtgtaagcctgaaggtctttttagaaggcttcctcatttggatatgtggaatgaattttttcatgttatgttgaatattccagattgtcatcatcttccatctttggatttgttaaggcaaaagctgaagaaagtatttcaacaacactatactaacaagattagggccctacgtaataggctaattgtactgctcttagaatgtaagcgttcacgaaaataaaatttggatatagacagtccttaaaaatcacactgtaaatatgaatctgctcactttaaacctgtttttttttcatttattgtttatgtaaatgtttgttaaaaataaatcccatggaatatttccatgtaaaaaaaaa

SEQ ID NO: 2325 - DNA, 2843 bp, Homo Sapiens
  NM_004339
atccgcgccgcgcaggcgcactgagcctcagccgctctcctcgctaccaggctcctttcctctatcgcgcaggcgcactgaacctcagccgcgccgggaggcgagcccgttggcgaggggcggggcagatggcgagggagcggggcgagctgctttttgaggctgcgcactcgcatggccccacctcgcaggtccacttccggcgccgcggctgttccgggcggagaccgcttgtgctggagtcggagttgtaacgctccactgactgatagagcgaccggccgaccatggcgcccggagtggcccgcgggccgacgccgtactggaggttgcgcctcggtggcgccgcgctgctcctgctgctcatcccggtggccgccgcgcaggagcctcccggagctgcttgttctcagaacacaaacaaaacctgtgaagagtgcctgaagaacgtctcctgtctttggtgcaacactaacaaggcttgtctggactacccagttacaagcgtcttgccaccggcttccctttgtaaattgagctctgcacgctggggagtttgttgggtgaactttgaggcgctgatcatcaccatgtcggtagtcgggggaaccctcctcctgggcattgccatctgctgctgctgctgctgcaggaggaagaggagccggaagccggacaggagtgaggagaaggccatgcgtgagcgggaggagaggcggatacggcaggaggaacggagagcagagatgaagacaagacatgatgaaatcagaaaaaaatatggcctgtttaaagaagaaaacccgtatgctagatttgaaaacaactaaagcgctccagcacatcagtcccgacgcttcctgtgaggtgcacgctccgcagcccagcccagccgggagaccacgtggccattgcggtctcctgaccttggccagtgaacctgccagccttccaggacaggcggccggagagctgcccctgaaggacagtcctctcgtcttgcagactggtgaccttctattccctgttcatctctgtttctagatttagtcacttgaaataagaaatctttggggtttgggcttttttatactcttctcagtttgtgaaacgctaactgcacacgaagccgcctgacggcacccagcgctgtggctgtcattctcccagggcagaaccctgcgtttctctctgtccactaacaagcttcacacgcaacacagggaagtcggtttgacttttgtcatgaggagaactgaccagccctcatcattccccataaaaccacggacagcgtctgtgtgcgcatcttgagtcttcacacctgttgactcacacggcttttgctgatgacacggggctccagtacacagtctgataaggacttaacgtcctaacctcaattgtattaaatagcattggggaatagctaaacctttttaaaaaaatttattggattttcctccctgcttaaaagatttcaccagaaaaccttcatataaaaattcaggccctttttggacaatttttaaaatttgtatctttactagaacatgagaatctttttcccttggaagcttgaattataaatgtggtgtttggcctgcctcagcagcaccagttgactgctcgtgtgccagcggtgtggggaggacggggcaggacgctgcagctctctccagccctgttggcatcctcagtgcctgcaggcctctcgctgcctgttgggctgtctggggggtggccatttagggatcgtggggacggggtccaccccaagaagaaagaaaggcccgtccacaggcccggctctgggccacgtgccccggaagcaggtgtgtccagagtcagctgagggctctccccacaccacccagcaggcgctggtgctccttctgcctcatgggaccagtccagcttccagccgctctggctcgagggtggtctgaccacttccttctgagtgggcttctctgggagctctccagtggcactgctggacctgcccacgtttctgtaaaatcaggatacgtggctttagtaagcagaccaagcgcttcgtggcagggaaagcagcgtgcggggaagtcactgaaaagtgctgcctaaggaagtttggaaatagtccctgttccagattgccttgaattttaaaacattttgctttgggaaagtaggtcagcagcacctaagatcaaggatgcgttccattttcacacttcacagtcatgaaaactgagaagactgtcttcagcgtgaactaaagttcacaggcagatcactgatccagaacacttcaagaactcgtcaaacagctcgataagcctttttgactgtgtacatctgtaccgggaataacattcctaggctgaaatttccacaaagaatagaacctgtacccagttcttcaggctgatttccctgacctcttgggcatttgtatttgtagtaaagtattgcagagattcctaagtattttatagcagccatcaaaattggactttgtattgtttattcataaaagacacttggtaatagacttcagtgaactctgtatgaatgcagtagtgtgtgtgcaaaatccgcttcctgagcgtagggtgctgagctggcgctagggctcggttgtgaaatacagcgtagtcagcccttgcgctcagtgtagaaacccacgtctgtaaggtcggtcttcgtccatctgcttttttctgaaatacactaagagcagccacaaaactgtaacctcaaggaaaccataaagcttggagtgccttaatttttaaccagtttccaataaaacggtttactacctgcgtgtgtttagtaaaaaaaaaaaaaaaaaa

SEQ ID NO: 2326 - DNA, 7108 bp, Homo Sapiens
  NM_004341
gcgcgcccgaggctcctacgctgccgcgcccggcttctctccagcgccccgcgccgttagccacgtggaccgactccggcgcgccgtcctcacgtggttccagtggagtttgcagtccttcccgcttctccgtactcgcccccgcctctgagctcccttcccatggcggccctagtgttggaggacgggtcggtcctgcggggccagccctttggggccgccgtgtcgactgccggggaagtggtgtttcaaaccggcatggtcggctaccccgaggccctcactgatccctcctacaaggcacagatcttagtgctcacctatcctctgatcggcaactatggcatccccccagatgaaatggatgagttcggtctctgcaagtggtttgaatcctcgggcatccacgtagcagcactggtagtgggagagtgctgtcctactcccagccactggagtgccacccgcaccctgcatgagtggctgcagcagcatggcatccctggcttgcaaggagtagacactcgggagctgaccaagaagttgcgggaacaggggtctctgctggggaagctggtccagaatggaacagaaccttcatccctgccattcttggaccccaatgcccgccccctggtaccagaggtctccattaagactccacgggtattcaatacagggggtgcccctcggatccttgctttggactgtggcctcaagtataatcagatccgatgcctctgccagcgtggggctgaggtcactgtggtaccctgggaccatgcactagacagccaagagtatgagggtctcttcttaagtaatgggcctggtgaccctgcctcctatcccagtgtcgtatccacactgagccgtgttttatctgagcctaatccccgacctgtctttgggatctgcctgggacaccagctattggccttagccattggggccaagacttacaagatgagatatgggaaccgaggccataaccagccctgcttgttggtgggctctgggcgctgctttctgacatcccagaaccatgggtttgctgtggagacagactcactgccagcagactgggctcctctcttcaccaacgccaatgatggttccaatgaaggcattgtgcacaacagcttgcctttcttcagtgtccagtttcacccagagcaccaagctggcccttcagatatggaactgcttttcgatatctttctggaaactgtgaaagaggccacagctgggaaccctgggggccagacagttagagagcggctgactgagcgcctctgtccccctgggattcccactcccggctctggacttccaccaccacgaaaggttctgatcctgggctcagggggcctctccattggccaagctggagaatttgactactcgggctctcaggcaattaaggccctgaaggaggaaaacatccagacgttgctgatcaaccccaatattgccacagtgcagacctcccaggggctggccgacaaggtctattttcttcccataacacctcattatgtaacccaggtgatacgtaatgaacgccccgatggtgtgttactgacttttgggggccagactgctctgaactgtggtgtggagctgaccaaggccggggtgctggctcggtatggggtccgggtcctgggcacaccagtggagaccattgagctgaccgaggatcgacgggcctttgctgccagaatggcagagatcggagagcatgtggccccgagcgaggcagcaaattctcttgaacaggcccaggcagccgctgaacggctggggtaccctgtgctagtgcgtgcagcctttgccctgggtggcctgggctctggctttgcctctaacagggaggagctctctgctctcgtggccccagcttttgcccataccagccaagtgctagtagacaagtctctgaagggatggaaggagattgagtacgaggtggtgagagacgcctatggcaactgtgtcacggtgtgtaacatggagaacttggacccactgggcatccacactggtgagtccatagtggtggcccctagccagacactgaatgacagggagtatcagctcctgaggcagacagctatcaaggtgacccagcacctgggaattgttggggagtgcaatgtgcagtatgccttgaaccctgagtctgagcagtattacatcattgaagtgaatgccaggctctctcgcagctctgccctggccagtaaggccacaggttatccactggcttatgtggcagccaagctagcattgggcatccctttgcctgagctcaggaactctgtgacagggggtacagcagcctttgaacccagcgtggattattgtgtggtgaagattcctcgatgggaccttagcaagttcctgcgagtcagcacaaagattgggagctgcatgaagagcgttggtgaagtcatgggcattgggcgttcatttgaggaggccttccagaaggccctgcgcatggtggatgagaactgtgtgggctttgatcacacagtgaaaccagtcagcgatatggagttggagactccaacagataagcggatttttgtggtggcagctgctttgtgggctggttattcagtggaccgcctgtatgagctcacacgcatcgaccgctggttcctgcaccgaatgaagcgtatcatcgcacatgcccagctgctagaacaacaccgtggacagcctttgccgccagacctgctgcaacaggccaagtgtcttggcttctcagacaaacagattgcccttgcagttctgagcacagagctggctgttcgcaagctgcgtcaggaactggggatctgtccagcagtgaaacagattgacacagttgcagctgagtggccagcccagacaaattacctatacctaacgtattggggcaccacccatgacctcacctttcgaacacctcatgtcctagtccttggctctggcgtctaccgtattggctctagcgttgaatttgactggtgtgctgtaggctgcatccagcagctccgaaagatgggatataagaccatcatggtgaactataacccagagacagtcagcaccgactatgacatgtgtgatcgactctactttgatgagatctcttttgaggtggtgatggacatctatgagctcgagaaccctgaaggtgtgatcctatccatgggtggacagctgcccaacaacatggccatggcgttgcatcggcagcagtgccgggtgctgggcacctcccctgaagccattgactcggctgagaaccgtttcaagttttcccggctccttgacaccattggtatcagccagcctcagtggagggagctcagtgacctcgagtctgctcgccaattctgccagaccgtggggtacccctgtgtggtgcgcccctcctatgtgctgagcggtgctgctatgaatgtggcctacacggatggagacctggagcgcttcctgagcagcgcagcagccgtctccaaagagcatcccgtggtcatctccaagttcatccaggaggctaaggagattgacgtggatgccgtggcctctgatggtgtggtggcagccatcgccatctctgagcatgtggagaatgcaggtgtgcattcaggtgatgcgacgctggtgacccccccacaagatatcactgccaaaaccctggagcggatcaaagccattgtgcatgctgtgggccaggagctacaggtcacaggacccttcaatctgcagctcattgccaaggatgaccagctgaaagttattgaatgcaacgtacgtgtctctcgctccttccccttcgtttccaagacactgggtgtggacctagtagccttggccacgcgggtcatcatgggggaagaagtggaacctgtggggctaatgactggttctggagtcgtgggagtaaaggtgcctcagttctccttctcccgcttggcgggtgctgacgtggtgttgggtgtggaaatgaccagtactggggaggtggccggctttggggagagccgctgtgaggcatacctcaaggccatgctaagcactggctttaagatccccaagaagaatatcctgctgaccattggcagctataagaacaaaagcgagctgctcccaactgtgcggctactggagagcctgggctacagcctctatgccagtctcggcacagctgacttctacactgagcatggcgtcaaggtaacagctgtggactggcactttgaggaggctgtggatggtgagtgcccaccacagcggagcatcctggagcagctagctgagaaaaactttgagctggtgattaacctgtcaatgcgtggagctgggggccggcgtctctcttcctttgtcaccaagggctaccgcacccgacgcttggccgctgacttctccgtgcccctaatcatcgatatcaagtgcaccaaactctttgtggaggccctaggccagatcgggccagcccctcctttgaaggtgcatgttgactgtatgacctcccaaaagcttgtgcgactgccgggattgattgatgtccatgtgcacctgcgggaaccaggtgggacacataaggaggactttgcttcaggcacagccgctgccctggctgggggtatcaccatggtgtgtgccatgcctaatacccggccccccatcattgacgcccctgctctggccctggcccagaagctggcagaggctggcgcccggtgcgactttgcgctattccttggggcctcgtctgaaaatgcaggaaccttgggcaccgtggccgggtctgcagccgggctgaagctttacctcaatgagaccttctctgagctgcggctggacagcgtggtccagtggatggagcatttcgagacatggccctcccacctccccattgtggctcacgcagagcagcaaaccgtggctgctgtcctcatggtggctcagctcactcagcgctcagtgcacatatgtcacgtggcacggaaggaggagatcctgctaattaaagctgcaaaggcacggggcttgccagtgacctgcgaggtggctccccaccacctgttcctaagccatgatgacctggagcgcctggggcctgggaagggggaggtccggcctgagcttggctcccgccaggatgtggaagccctgtgggagaacatggctgtcatcgactgctttgcctcagaccatgctccccataccttggaggagaagtgtgggtccaggcccccacctgggttcccagggttagagaccatgctgccactactcctgacggctgtaagcgagggccggctcagcctggacgacctgctgcagcgattgcaccacaatcctcggcgcatctttcacctgcccccgcaggaggacacctatgtggaggtggatctggagcatgagtggacaattcccagccacatgcccttctccaaggcccactggacaccttttgaagggcagaaagtgaagggcaccgtccgccgtgtggtcctgcgaggggaggttgcctatatcgatgggcaggttctggtacccccgggctatggacaggatgtacggaagtggccacagggggctgttcctcagctcccaccctcagcccctgccactagtgagatgaccacgacacctgaaagaccccgccgtggcatcccagggcttcctgatggccgcttccatctgccgccccgaatccatcgagcctccgacccaggtttgccagctgaggagccaaaggagaagtcctctcggaaggtagccgagccagagctgatgggaacccctgatggcacctgctaccctccaccaccagtaccgagacaggcatctccccagaacctggggacccctggcttgctgcacccccagacctcacccctgctgcactcattagtgggccaacatatcctgtccgtccagcagttcaccaaggatcagatgtctcacctgttcaatgtggcacacacactgcgtatgatggtgcagaaggagcggagcctcgacatcctgaaggggaaggtcatggcctccatgttctatgaagtgagcacacggaccagcagctcctttgcagcagccatggcccggctgggaggtgctgtgctcagcttctcggaagccacatcgtccgtccagaagggcgaatccctggctgactccgtgcagaccatgagctgctatgccgacgtcgtcgtgctccggcacccccagcctggagcagtggagctggccgccaagcactgccggaggccagtgatcaatgctggggatggggtcggagagcaccccacccaggccctgctggacatcttcaccatccgtgaggagctgggaactgtcaatggcatgacgatcacgatggtgggtgacctgaagcacggacgcacagtacattccctggcctgcctgctcacccagtatcgtgtcagcctgcgctacgtggcacctcccagcctgcgcatgccacccactgtgcgggccttcgtggcctcccgcggcaccaagcaggaggaattcgagagcattgaggaggcgctgcctgacactgatgtgctctacatgactcgaatccagaaggaacgatttggctctacccaggagtacgaagcttgctttggtcagttcatcctcactccccacatcatgacccgggccaagaagaagatggtggtgatgcacccgatgccccgtgtcaacgagataagcgtggaagtggactcggatccccgcgcagcctacttccgccaggctgagaacggcatgtacatccgcatggctctgttagccaccgtgctgggccgtttctagggcctggcttcctcagcctcttctctttaggcccagctgctgggcaaggaattccagtgcctcctacgggggcagcacacttagatattcctggacatccagatagctcacatgtgctgaccacacttcaggctctggactggagctctctggcatgggggtggggcctcagatgctggggcccagtctgccccatcttcattcctgcaccttaaacctgtacagtcatttttctactgacttaataaacagccgagctgtcccttga

SEQ ID NO: 2327 - DNA, 739 bp, Homo Sapiens
  NM_004345
taaagcaaaccccagcccacaccctggcaggcagccagggatgggtggatcaggaaggctcctggttgggcttttgcatcaggctcaggctgggcataaaggaggctcctgtgggctagagggaggcagacatggggaccatgaagacccaaagggatggccactccctggggcggtggtcactggtgctcctgctgctgggcctggtgatgcctctggccatcattgcccaggtcctcagctacaaggaagctgtgcttcgtgctatagatggcatcaaccagcggtcctcggatgctaacctctaccgcctcctggacctggaccccaggcccacgatggatggggacccagacacgccaaagcctgtgagcttcacagtgaaggagacagtgtgccccaggacgacacagcagtcaccagaggattgtgacttcaagaaggacgggctggtgaagcggtgtatggggacagtgaccctcaaccaggccaggggctcctttgacatcagttgtgataaggataacaagagatttgccctgctgggtgatttcttccggaaatctaaagagaagattggcaaagagtttaaaagaattgtccagagaatcaaggattttttgcggaatcttgtacccaggacagagtcctagtgtgtgccctaccctggctcaggcttctgggctctgagaaataaactatgagagcaatttcaaaaaaaaaaaaaaaaaaaaaaaaa

SEQ ID NO: 2328 - DNA, 1449 bp, Homo Sapiens
  NM_004347
agtgctgtacaaagagacagaggctgttagctatggctgaagacagtggcaaaaaaaaaaggcgtaagaattttgaagctatgttcaaaggtatccttcagagtggattggataacttcgtgataaaccacatgctaaagaacaacgtggctggacaaacatctatccagaccctagtacctaatacggatcaaaagtcgaccagtgtaaaaaaagacaaccacaaaaaaaaaacagttaagatgttggaatacctgggcaaagatgttcttcatggtgtttttaattatttggcaaaacacgatgttctgacattgaaggaagaggaaaagaaaaaatattatgataccaaaattgaagacaaggccctgatcttggtagactctttgcgaaagaatcgcgtggctcatcaaatgtttacccaaacacttctcaatatggaccaaaagatcaccagtgtaaaacctcttctgcaaatcgaggctggaccacctgagtcagcagaatctacaaatatactcaaactttgtcctcgtgaagaattcctgagactgtgtaaaaaaaatcatgatgagatctatccaataaaaaagagagaggaccgcagacgcctggctctcatcatatgcaatacaaagtttgatcacctgcctgcaaggaatggggctcactatgacatcgtggggatgaaaaggctgcttcaaggcctgggctacactgtggttgacgaaaagaatctcacagccagggatatggagtcagtgctgagggcatttgctgccagaccagagcacaagtcctctgacagcacgttcttggtactcatgtctcatggcatcctagagggaatctgcggaactgcgcataaaaagaaaaaaccggatgtgctgctttatgacaccatcttccagatattcaacaaccgcaactgcctcagtctaaaggacaaacccaaggtcatcattgtccaggcctgcagaggtgaaaaacatggggaactctgggtcagagactctccagcatccttggcactcatctcttcacagtcatctgagaacctggaggcagattctgtttgcaagatccacgaggagaaggacttcattgctttctgttcttcaacaccacataacgtgtcctggagagaccgcacaaggggctccatcttcattacggaactcatcacatgcttccagaaatattcttgctgctgccacctaatggaaatatttcggaaggtacagaaatcatttgaagttccacaggctaaagcccagatgcccaccatagaacgagcaaccttgacaagagatttctacctctttcctggcaattgaaaatgaaaccacaggcagcccagccctcctctgtcaacatcaaagagcacatttaccagtatagcttgcatagtcaatatttggtatttcaataaaagtaaagactgtatct

SEQ ID NO: 2329 - DNA, 4270 bp, Homo Sapiens
  NM_004350
cccgccacttgattctggaggatttgttctggggctgcggccgcggagtcggggcggccgcgggcgagcttcggggcgggaggcggcggcagcggcacagccccgcgcgggccccgccgcggcccaggcagccgggacagccacgaggggcggccgcacgcggggccgcgcgccgaggatgcgggactagccgggcaggctgcgggcggccgtcgggccagcgaggcctcgcagcgggcgggccctggcgagtagtggccgggcgccgccccctgcgccctgaggcccgggccccgccgcttctgctttcccgcttctcgcggcagcggcggccgaggaggcgcccgcgccggccgcccccgggggaagccgcgccgtctccgcctgcccggcgccctgacggccgctgttatgcgtattcccgtagacccaagcaccagccgccgcttcacacctccctccccggccttcccctgcggcggcggcggcggcaagatgggcgagaacagcggcgcgctgagcgcgcaggcggccgtggggcccggagggcgcgcccggcccgaggtgcgctcgatggtggacgtgctggcggaccacgcaggcgagctcgtgcgcaccgacagccccaacttcctctgctccgtgctgccctcgcactggcgctgcaacaagacgctgcccgtcgccttcaaggtggtggcattgggggacgtgccggatggtacggtggtgactgtgatggcaggcaatgacgagaactactccgctgagctgcgcaatgcctcggccgtcatgaagaaccaggtggccaggttcaacgaccttcgcttcgtgggccgcagtgggcgagggaagagtttcaccctgaccatcactgtgttcaccaaccccacccaagtggcgacctaccaccgagccatcaaggtgaccgtggacggaccccgggagcccagacggcaccggcagaagctggaggaccagaccaagccgttccctgaccgctttggggacctggaacggctgcgcatgcgggtgacaccgagcacacccagcccccgaggctcactcagcaccacaagccacttcagcagccagccccagaccccaatccaaggcacctcggaactgaacccattctccgacccccgccagtttgaccgctccttccccacgctgccaaccctcacggagagccgcttcccagaccccaggatgcattatcccggggccatgtcagctgccttcccctacagcgccacgccctcgggcacgagcatcagcagcctcagcgtggcgggcatgccggccaccagccgcttccaccatacctacctcccgccaccctacccgggggccccgcagaaccagagcgggcccttccaggccaacccgtccccctaccacctctactacgggacatcctctggctcctaccagttctccatggtggccggcagcagcagtgggggcgaccgctcacctacccgcatgctggcctcttgcaccagcagcgctgcctctgtcgccgccggcaacctcatgaaccccagcctgggcggccagagtgatggcgtggaggccgacggcagccacagcaactcacccacggccctgagcacgccaggccgcatggatgaggccgtgtggcggccctactgaccgccctggtggactcctcccgctggaggcggggaccctaacaaccttcaagaccagtgatgggccggctccgaggctccgggcgggaatgggacctgcgctccagggtggtctcggtcccagggtggtcccagctggtgggagcctctggctgcatctgtgcagccacatccttgtacagaggcataggttaccacccccaccccggcccgggatactgcccccggcccagatcctggccgtctcatcccatacttctgtggggaatcagcctcctgccacccccccggaaggacctcactgtctccagctatgcccagtgctgcatgggacccatgtctcctgggacagaggccatctctcttccagagagaggcagcattggcccacaggataagcctcaggccctgggaaacctcccgacccctgcaccttcgttggagcccctgcatcccctgggtccagccccctctgcatttacacagatttgagtcagaactggaaagtgtcccccacccccaccaccctcgagcggggttcccctcattgtacagatggggcaggacccagcacgctgctggcagagatggtttgagaacacatccaagccagtccccccagcccagcttcccctccgttcctaactgttggctttcccccagccgcacgggtcccaggccccagagaagatgagtctatggcatcaggttcttaaacccaggaaagcacctacagaccggctcctccatgcactttaccagctcaacgcatccactctctgttctcttggcagggcgggggaggggggataggaggtcccctttcccctaggtggtctcataattccatttgtggagagaacaggagggccagatagataggtcctagcagaaggcattgaggtgagggatcattttgggtcagacatcaatgtccctgtcccccctgggtccagccaagctgtgccccatcccccaagcctcctgggaggatccagccaaatcttgcgactcctggcacacacctgtctgtaacctgttttgtgctctgaaagcaaatagtcctgagcaaaaaaaaaaaaaaaacaaaaaaacaaaaaaaaaacaaaacagtttttaaaactgattttagaaaaagaagcttaatctaacgttttcaaacacaaggtctcttacaggtatagttccgtgattatgatagctctgtgattataagcaacatccccgccccctctcccccccgcggacccccagctgcctcctgagggtgtggggttattagggtctcaatactttctcaaggggctacactccccatcaggcagcatcccaccagcctgcaccacaggctcccctgggaggacgagggaaacgctgatgagacgctgggcatctctcctctgtggctctaggacatctgtccaggaggctgggcggaggtgggcaggatgtgagaggtggggagtactggctgtgcgtggcaggacagaagcactgtaaagggctctccagccgcagctcagctgcactgcgttccgaggtgaagtcttgcccctgaattttgcaaaatgggaaagtgggcgcttgcccaagggccaggctgcatggattctcacatcagagttctctggccctagaaaggcttagaaaaggcgtaagggaactcataaaggctagcagcatgcggtattttaactttctgcctcggcctctgtggatgcagaaatctgccctacaaaatgctcttcattggttgtctctgtgagagcactgtccccacccaacctgtcacaacggccagaaccatacaccagagacacactggcaggttaggcagtccttctggtgatcctattccattccctcctgctgcggtttctcttggcctgtcctcactggaaaaacagtctccatctcctcaaaatagttgctgactccctgcacccaaggggcctctccatgccttcttaggaagcagctatgaatccattgtccttgtagtttcttccctcctgttctctggttatagctggtcccaggtcagcgtgggaggcacctttgggttcccagtgcccagcactttgtagtctcatcccagattactaacccttcctgatcctggagaggcagggatagtaaataaattgctcttcctaccccatcccccatcccctgacaaaaagtgacggcagccgtactgagtctgtaaggcccaaagtgggtacagacagcctgggctggtaaaagtaggtccttatttacaaggctgcgttaaagttgtactaggcaaacacactgatgtaggaagcacgaggaaaggaagacgttttgatatagtgttactgtgagcctgtcagtagtgggtaccaatcttttgtgacatattgtcatgctgaggtgtgacacctgctgcactcatctgatgtaaaaccatcccagagctggcgagaggatggagctgggtggaaactgctttgcactatcgtttgcttggtgtttgtttttaacgcacaacttgcttgtacagtaaactgtcttctgtactatttaactgtaaaatggaattttgactgatttgttacaataatataactctgagatgtgtggaagga

SEQ ID NO: 2330 - DNA, 1327 bp, Homo Sapiens
  NM_004355
cagggtcccagatgcacaggaggagaagcaggagctgtcgggaagatcagaagccagtcatggatgaccagcgcgaccttatctccaacaatgagcaactgcccatgctgggccggcgccctggggccccggagagcaagtgcagccgcggagccctgtacacaggcttttccatcctggtgactctgctcctcgctggccaggccaccaccgcctacttcctgtaccagcagcagggccggctggacaaactgacagtcacctcccagaacctgcagctggagaacctgcgcatgaagcttcccaagcctcccaagcctgtgagcaagatgcgcatggccaccccgctgctgatgcaggcgctgcccatgggagccctgccccaggggcccatgcagaatgccaccaagtatggcaacatgacagaggaccatgtgatgcacctgctccagaatgctgaccccctgaaggtgtacccgccactgaaggggagcttcccggagaacctgagacaccttaagaacaccatggagaccatagactggaaggtctttgagagctggatgcaccattggctcctgtttgaaatgagcaggcactccttggagcaaaagcccactgacgctccaccgaaagagtcactggaactggaggacccgtcttctgggctgggtgtgaccaagcaggatctgggcccagtccccatgtgagagcagcagaggcggtcttcaacatcctgccagccccacacagctacagctttcttgctcccttcagcccccagcccctcccccatctcccaccctgtacctcatcccatgagaccctggtgcctggctctttcgtcacccttggacaagacaaaccaagtcggaacagcagataacaatgcagcaaggccctgctgcccaatctccatctgtcaacaggggcgtgaggtcccaggaagtggccaaaagctagacagatccccgttcctgacatcacagcagcctccaacacaaggctccaagacctaggctcatggacgagatgggaaggcacagggagaagggataaccctacacccagaccccaggctggacatgctgactgtcctctcccctccagcctttggccttggcttttctagcctatttacctgcaggctgagccactctcttccctttccccagcatcactccccaaggaagagccaatgttttccacccataatcctttctgccgacccctagttccctctgctcagccaagcttgttatcagctttcagggccatggttcacattagaataaaaggtagtaattagaaaaaaaaaaaaaaaaaa

SEQ ID NO: 2331 - DNA, 1497 bp, Homo Sapiens
  NM_004356
gagcgagcgcgcaacggcggcgacggcggcgaccccaccgcgcatcctgccaggcctccggcgcccagcgccccacgcgcccccgcgcccccgcgcccccgcgcccctttcttcgcgcccccgcccctcggcccgccaggcccccttgccggccacccgccaggccccgcgccggcccgcccgccgcccaggaccggcccgcgccccgcaggccgcccgccgcccgcgccgccatgggagtggagggctgcaccaagtgcatcaagtacctgctcttcgtcttcaatttcgtcttctggctggctggaggcgtgatcctgggtgtggccctgtggctccgccatgacccgcagaccaccaacctcctgtatctggagctgggagacaagcccgcgcccaacaccttctatgtaggcatctacatcctcatcgctgtgggcgctgtcatgatgttcgttggcttcctgggctgctacggggccatccaggaatcccagtgcctgctggggacgttcttcacctgcctggtcatcctgtttgcctgtgaggtggccgccggcatctggggctttgtcaacaaggaccagatcgccaaggatgtgaagcagttctatgaccaggccctacagcaggccgtggtggatgatgacgccaacaacgccaaggctgtggtgaagaccttccacgagacgcttgactgctgtggctccagcacactgactgctttgaccacctcagtgctcaagaacaatttgtgtccctcgggcagcaacatcatcagcaacctcttcaaggaggactgccaccagaagatcgatgacctcttctccgggaagctgtacctcatcggcattgctgccatcgtggtcgctgtgatcatgatcttcgagatgatcctgagcatggtgctgtgctgtggcatccggaacagctccgtgtactgaggccccgcagctctggccacagggacctctgcagtgccccctaagtgacccggacacttccgagggggccatcaccgcctgtgtatataacgtttccggtattactctgctacacgtagcctttttacttttggggttttgtttttgttctgaactttcctgttaccttttcagggctgacgtcacatgtaggtggcgtgtatgagtggagacgggcctgggtcttggggactggagggcaggggtccttctgccctggggtcccagggtgctctgcctgctcagccaggcctctcctgggagccactcgcccagagactcagcttggccaacttggggggctgtgtccacccagcccgcccgtcctgtgggctgcacagctcaccttgttccctcctgccccggttcgagagccgagtctgtgggcactctctgccttcatgcacctgtcctttctaacacgtcgccttcaactgtaatcacaacatcctgactccgtcatttaataaagaaggaacatcaggcatgctaccaggcctgtgcagtccctcag

SEQ ID NO: 2332 - DNA, 3659 bp, Homo Sapiens
  NM_004358
gcagccagtcgcggaggcggggaggctgcgcggtcagaggcgcctggagcgagcgaatcctggcccaccgcctgcccaaccgcgtgaccttgattgagttaatgaacttcacgcctcagcgtccaggtctgtaaaatggggtgtctaacgcagaccgtacagcccagctgggtttagcaaacttccgggagccagttggagcctctccccatccctagcggtgatcccaggtgacgacatgccgcggggggtcctgcggaggccaccctagggcgttgctgctgcctttgggagtgtggagctccaaaccatgtcgcgagaggcggattttgggaggccgggatcctcgcgccagggggatgtgcgagggtgtgggataaatcttaattcctccggcccacccaaagcctggaaatccagcctccgcgcctcttgccctgcgggccccgccctcagtcccgccctcatctaacccgctaccccattggtggcgtccggcggcgcggctgctgttatttttcgaatatataaggaggtggaagtggcagctgcaactagaggcttccctggctggtgcctgagcccggcgtccctcgccccccgccctccccgcatccctctcctccctcgcgcctggccctgtggctcttcctccctccctccttccccccccccccacccctcgcccgctgcctccctcggcccagccagctgtgccggcgtttgttggctgccctgcgcccggccctccagccagccttctgccggccccgccgcgatggaggtgccccagccggagcccgcgccaggctcggctctcagtccagcaggcgtgtgcggtggcgcccagcgtccgggccacctcccgggcctcctgctgggatctcatggcctcctggggtccccggtgcgggcggccgcttcctcgccggtcaccaccctcacccagaccatgcacgacctcgccgggctcggcagccgcagccgcctgacgcacctatccctgtctcgacgggcatccgaatcctccctgtcgtctgaatcctccgaatcttctgatgcaggtctctgcatggattcccccagccctatggacccccacatggcggagcagacgtttgaacaggccatccaggcagccagccggatcattcgaaacgagcagtttgccatcagacgcttccagtctatgccggtgaggctgctgggccacagccccgtgcttcggaacatcaccaactcccaggcgcccgacggccggaggaagagcgaggcgggcagtggagctgccagcagctctggggaagacaaggagaatgatggatttgtcttcaagatgccatggaagcccacacatcccagctccacccatgctctggcagagtgggccagccgcagggaagcctttgcccagagacccagctcggcccccgacctgatgtgtctcagtcctgaccggaagatggaagtggaggagctcagccccctggccctaggtcgcttctctctgacccctgcagagggggatactgaggaagatgatggatttgtggacatcctagagagtgacttaaaggatgatgatgcagttcccccaggcatggagagtctcattagtgccccactggtcaagaccttggaaaaggaagaggaaaaggacctcgtcatgtacagcaagtgccagcggctcttccgctctccgtccatgccctgcagcgtgatccggcccatcctcaagaggctggagcggccccaggacagggacacgcccgtgcagaataagcggaggcggagcgtgacccctcctgaggagcagcaggaggctgaggaacctaaagcccgcgtcctccgctcaaaatcactgtgtcacgatgagatcgagaacctcctggacagtgaccaccgagagctgattggagattactctaaggccttcctcctacagacagtagacggaaagcaccaagacctcaagtacatctcaccagaaacgatggtggccctattgacgggcaagttcagcaacatcgtggataagtttgtgattgtagactgcagatacccctatgaatatgaaggcgggcacatcaagactgcggtgaacttgcccctggaacgcgacgccgagagcttcctactgaagagccccatcgcgccctgtagcctggacaagagagtcatcctcattttccactgtgaattctcatctgagcgtgggccccgcatgtgccgtttcatcagggaacgagaccgtgctgtcaacgactaccccagcctctactaccctgagatgtatatcctgaaaggcggctacaaggagttcttccctcagcacccgaacttctgtgaaccccaggactaccggcccatgaaccacgaggccttcaaggatgagctaaagaccttccgcctcaagactcgcagctgggctggggagcggagccggcgggagctctgtagccggctgcaggaccagtgaggggcctgcgccagtcctgctacctcccttgcctttcgaggcctgaagccagctgccctatgggcctgccgggctgagggcctgctggaggcctcaggtgctgtccatgggaaagatggtgtgggtgtcctgcctgtctgccccagcccagattcccctgtgtcatcccatcattttccatatcctggtgccccccacccctggaagagcccagtctgttgagttagttaagttgggttaataccagcttaaaggcagtattttgtgtcctccaggagcttcttgtttccttgttagggttaacccttcatcttcctgtgtcctgaaacgctcctttgtgtgtgtgtcagctgaggctgggggagagccgtggtccctgaggatgggtcagagctaaactccttcctggcctgagagtcagctctctgccctgtgtacttcccgggccagggctgcccctaatctctgtaggaaccgtggtatgtctgccatgttgcccctttctcttttcccctttcctgtcccaccatacgagcacctccagcctgaacagaagctcttactctttcctatttcagtgttacctgtgtgcttggtctgtttgactttacgcccatctcaggacacttccgtagactgtttaggttcccctgtcaaatatcagttacccactcggtcccagttttgttgccccagaaagggatgttattatccttgggggctcccagggcaagggttaaggcctgaatcatgagcctgctggaagcccagcccctactgctgtgaaccctggggcctgactgctcagaacttgctgctgtcttgttgcggatggatggaaggttggatggatgggtggatggccgtggatggccgtggatgcgcagtgccttgcatacccaaaccaggtgggagcgttttgttgagcatgacagcctgcagcaggaatatatgtgtgcctatttgtgtggacaaaaatatttacacttagggtttggagctattcaagaggaaatgtcacagaagcagctaaaccaaggactgagcaccctctggattctgaatctcaagatgggggcagggctgtgcttgaaggccctgctgagtcatctgttagggccttggttcaataaagcactgagcaagttgagaaaaaaaaaaaaaaaaaaaaaaaaaaaaa

SEQ ID NO: 2333 - DNA, 2591 bp, Homo Sapiens
  NM_004364
cggaggtgcgcgggcgcgggcgagcagggtctccgggtgggcggcggcgacgccccgcgcaggctggaggccgccgaggctcgccatgccgggagaactctaactcccccatggagtcggccgacttctacgaggcggagccgcggcccccgatgagcagccacctgcagagccccccgcacgcgcccagcagcgccgccttcggctttccccggggcgcgggccccgcgcagcctcccgccccacctgccgccccggagccgctgggcggcatctgcgagcacgagacgtccatcgacatcagcgcctacatcgacccggccgccttcaacgacgagttcctggccgacctgttccagcacagccggcagcaggagaaggccaaggcggccgtgggccccacgggcggcggcggcggcggcgactttgactacccgggcgcgcccgcgggccccggcggcgccgtcatgcccgggggagcgcacgggcccccgcccggctacggctgcgcggccgccggctacctggacggcaggctggagcccctgtacgagcgcgtcggggcgccggcgctgcggccgctggtgatcaagcaggagccccgcgaggaggatgaagccaagcagctggcgctggccggcctcttcccttaccagccgccgccgccgccgccgccctcgcacccgcacccgcacccgccgcccgcgcacctggccgccccgcacctgcagttccagatcgcgcactgcggccagaccaccatgcacctgcagcccggtcaccccacgccgccgcccacgcccgtgcccagcccgcaccccgcgcccgcgctcggtgccgccggcctgccgggccctggcagcgcgctcaaggggctgggcgccgcgcaccccgacctccgcgcgagtggcggcagcggcgcgggcaaggccaagaagtcggtggacaagaacagcaacgagtaccgggtgcggcgcgagcgcaacaacatcgcggtgcgcaagagccgcgacaaggccaagcagcgcaacgtggagacgcagcagaaggtgctggagctgaccagtgacaatgaccgcctgcgcaagcgggtggaacagctgagccgcgaactggacacgctgcggggcatcttccgccagctgccagagagctccttggtcaaggccatgggcaactgcgcgtgaggcgcgcggctgtgggaccgccctgggccagcctccggcggggacccagggagtggtttggggtcgccggatctcgaggcttgcccgagccgtgcgagccaggactaggagattccggtgcctcctgaaagcctggcctgctccgcgtgtcccctcccttcctctgcgccggacttggtgcgtctaagatgagggggccaggcggtggcttctccctgcgaggaggggagaattcttggggctgagctgggagcccggcaactctagtatttaggataaccttgtgccttggaaatgcaaactcaccgctccaatgcctactgagtagggggagcaaatcgtgccttgtcattttatttggaggtttcctgcctccttcccgaggctacagcagacccccatgagagaaggaggggagcaggcccgtggcaggaggagggctcagggagctgagatcccgacaagcccgccagccccagccgctcctccacgcctgtccttagaaaggggtggaaacatagggacttggggcttggaacctaaggttgttcccctagttctacatgaaggtggagggtctctagttccacgcctctcccacctccctccgcacacaccccaccccagcctgctataggctgggcttccccttggggcggaactcactgcgatgggggtcaccaggtgaccagtgggagcccccaccccgagtcacaccagaaagctaggtcgtgggtcagctctgaggatgtatacccctggtgggagagggagacctagagatctggctgtggggcgggcatggggggtgaagggccactgggaccctcagccttgtttgtactgtatgccttcagcattgcctaggaacacgaagcacgatcagtccatcccagagggaccggagttatgacaagctttccaaatattttgctttatcagccgatatcaacacttgtatctggcctctgtgccccagcagtgccttgtgcaatgtgaatgtgcgcgtctctgctaaaccaccattttatttggtttttgttttgttttggttttgctcggatacttgccaaaatgagactctccgtcggcagctgggggaagggtctgagactccctttccttttggttttgggattacttttgatcctgggggaccaatgaggtgaggggggttctcctttgccctcagctttccccagcccctccggcctgggctgcccacaaggcttgtcccccagaggccctggctcctggtcgggaagggaggtggcctcccgccaacgcatcactggggctgggagcagggaaggacggcttggttctcttcttttggggagaacgtagagtctcactctagatgttttatgtattatatctataatataaacatatcaaagtcaa

SEQ ID NO: 2334 - DNA, 10599 bp, Homo Sapiens
  NM_004369
aagccctgactggtatccctggccccagtccagtttggagctcagtcttccaccaaaggccgttcagttctcctgggctccagcctcctgcaaggactgcaagagttttcctccgcagctctgagtctccacttttttggtggagaaaggctgcaaaaagaaaaagagacgcagtgagtgggaaaagtatgcatcctattcaaacctaattgaatcgaggagcccagggacacacgccttcaggtttgctcaggggttcatatttggtgcttagacaaattcaaaatgaggaaacatcggcacttgcccttagtggccgtcttttgcctctttctctcaggctttcctacaactcatgcccagcagcagcaagcagatgtcaaaaatggtgcggctgctgatataatatttctagtggattcctcttggaccattggagaggaacatttccaacttgttcgagagtttctatatgatgttgtaaaatccttagctgtgggagaaaatgatttccattttgctctggtccagttcaacggaaacccacataccgagttcctgttaaatacgtatcgtactaaacaagaagtcctttctcatatttccaacatgtcttatattgggggaaccaatcagactggaaaaggattagaatacataatgcaaagccacctcaccaaggctgctggaagccgggccggtgacggagtccctcaggttatcgtagtgttaactgatggacactcgaaggatggccttgctctgccctcagcggaacttaagtctgctgatgttaacgtgtttgcaattggagttgaggatgcagatgaaggagcgttaaaagaaatagcaagtgaaccgctcaatatgcatatgttcaacctagagaattttacctcacttcatgacatagtaggaaacttagtgtcctgtgtgcattcatccgtgagtccagaaagggctggggacacggaaacccttaaagacatcacagcacaagactctgctgacattattttccttattgatggatcaaacaacaccggaagtgtcaatttcgcagtcattctcgacttccttgtaaatctccttgagaaactcccaattggaactcagcagatccgagtgggggtggtccagtttagcgatgagcccagaaccatgttctccttggacacctactccaccaaggcccaggttctgggtgcagtgaaagccctcgggtttgctggtggggagttggccaatatcggcctcgcccttgatttcgtggtggagaaccacttcacccgggcagggggcagccgcgtggaggaaggggttccccaggtgctggtcctcataagtgccgggccttctagtgacgagattcgctacggggtggtagcactgaagcaggctagcgtgttctcattcggccttggagcccaggccgcctccagggcagagcttcagcacatagctaccgatgacaacttggtgtttactgtcccggaattccgtagctttggggacctccaggagaaattactgccgtacattgttggcgtggcccaaaggcacattgtcttgaaaccgccaaccattgtcacacaagtcattgaagtcaacaagagagacatagtcttcctggtggatggctcatctgcactgggactggccaacttcaatgccatccgagacttcattgctaaagtcatccagaggctggaaatcggacaggatcttatccaggtggcagtggcccagtatgcagacactgtgaggcctgaattttatttcaatacccatccaacaaaaagggaagtcataaccgctgtgcggaaaatgaagcccctggacggctcggccctgtacacgggctctgctctagactttgttcgtaacaacctattcacgagttcagccggctaccgggctgccgaggggattcctaagcttttggtgctgatcacaggtggtaagtccctagatgaaatcagccagcctgcccaggagctgaagagaagcagcataatggcctttgccattgggaacaagggtgccgatcaggctgagctggaagagatcgctttcgactcctccctggtgttcatcccagctgagttccgagccgccccattgcaaggcatgctgcctggcttgctggcacctctcaggaccctctctggaacccctgaagttcactcaaacaaaagggatatcatctttcttttggatggatcagccaacgttggaaaaaccaatttcccttatgtgcgcgactttgtaatgaacctagttaacagccttgatattggaaatgacaatattcgtgttggtttagtgcaatttagtgacactcctgtaacggagttctctttaaacacataccagaccaagtcagatatccttggtcatctgaggcagctgcagctccagggaggttcgggcctgaacacaggctcagccctaagctatgtctatgccaaccacttcacggaagctggcggcagcaggatccgtgaacacgtgccgcagctcctgcttctgctcacagctgggcagtctgaggactcctatttgcaagctgccaacgccttgacacgcgcgggcatcctgactttttgtgtgggagctagccaggcgaataaggcagagcttgagcagattgcttttaacccaagcctggtgtatctcatggatgatttcagctccctgccagctttgcctcagcagctgattcagcccctaaccacatatgttagtggaggtgtggaggaagtaccactcgctcagccagagagcaagcgagacattctgttcctctttgacggctcagccaatcttgtgggccagttccctgttgtccgtgactttctctacaagattatcgatgagctcaatgtgaagccagaggggacccgaattgcggtggctcagtacagcgatgatgtcaaggtggagtcccgttttgatgagcaccagagtaagcctgagatcctgaatcttgtgaagagaatgaagatcaagacgggcaaagccctcaacctgggctacgcgctggactatgcacagaggtacatttttgtgaagtctgctggcagccggatcgaggatggagtgcttcagttcctggtgctgctggtcgcaggaaggtcatctgaccgtgtggatgggccagcaagtaacctgaagcagagtggggttgtgcctttcatcttccaagccaagaacgcagaccctgctgagttagagcagatcgtgctgtctccagcgtttatcctggctgcagagtcgcttcccaagattggagatcttcatccacagatagtgaatctcttaaaatcagtgcacaacggagcaccagcaccagtttcaggtgaaaaggacgtggtgtttctgcttgatggctctgagggcgtcaggagcggcttccctctgttgaaagagtttgtccagagagtggtggaaagcctggatgtgggccaggaccgggtccgcgtggccgtggtgcagtacagcgaccggaccaggcccgagttctacctgaattcatacatgaacaagcaggacgtcgtcaacgctgtccgccagctgaccctgctgggagggccgacccccaacaccggggccgccctggagtttgtcctgaggaacatcctggtcagctctgcgggaagcaggataacagaaggtgtgccccagctgctgatcgtcctcacggccgacaggtctggggatgatgtgcggaacccctccgtggtcgtgaagaggggtggggctgtgcccattggcattggcatcgggaacgctgacatcacagagatgcagaccatctccttcatcccggactttgccgtggccattcccacctttcgccagctggggaccgtccaacaggtcatctctgagagggtgacccagctcacccgcgaggagctgagcaggctgcagccggtgttgcagcctctaccgagcccaggtgttggtggcaagagggacgtggtctttctcatcgatgggtcccaaagtgccgggcctgagttccagtacgttcgcaccctcatagagaggctggttgactacctggacgtgggctttgacaccacccgggtggctgtcatccagttcagcgatgaccccaaggtggagttcctgctgaacgcccattccagcaaggatgaagtgcagaacgcggtgcagcggctgaggcccaagggagggcggcagatcaacgtgggcaatgccctggagtacgtgtccaggaacatcttcaagaggcccctggggagccgcattgaagagggcgtcccgcagttcctggtcctcatctcgtctggaaagtctgacgatgaggtggacgacccggcggtggagctcaagcagtttggcgtggcccctttcacgatcgccaggaacgcagaccaggaggagctggtgaagatctcgctgagccccgaatatgtgttctcggtgagcaccttccgggagctgcccagcctggagcagaaactgctgacgcccatcacgaccctgacctcagagcagatccagaagctcttagccagcactcgctatccacctccagcagttgagagtgatgctgcagacattgtctttctgatcgacagctctgagggagttaggccagatggctttgcacatattcgagattttgttagcaggattgttcgaagactcaacatcggccccagtaaagtgagagttggggtcgtgcagttcagcaatgatgtcttcccagaattctatctgaaaacctacagatcccaggccccggtgctggacgccatacggcgcctgaggctcagaggggggtccccactgaacactggcaaggctctcgaatttgtggcaagaaacctctttgttaagtctgcggggagtcgcatagaagacggggtgccccaacacctggtcctggtcctgggtggaaaatcccaggacgatgtgtccaggttcgcccaggtgatccgttcctcgggcattgtgagtttaggggtaggagaccggaacatcgacagaacagagctgcagaccatcaccaatgaccccagactggtcttcacagtgcgagagttcagagagcttcccaacatagaagaaagaatcatgaactcgtttggaccctccgcagccactcctgcacctccaggggtggacacccctcctccttcacggccagagaagaagaaagcagacattgtgttcctgttggatggttccatcaacttcaggagggacagtttccaggaagtgcttcgttttgtgtctgaaatagtggacacagtttatgaagatggcgactccatccaagtggggcttgtccagtacaactctgaccccactgacgaattcttcctgaaggacttctctaccaagaggcagattattgacgccatcaacaaagtggtctacaaagggggaagacacgccaacactaaggtgggccttgagcacctgcgggtaaaccactttgtgcctgaggcaggcagccgcctggaccagcgggtccctcagattgcctttgtgatcacgggaggaaagtcggtggaagatgcacaggatgtgagcctggccctcacccagaggggggtcaaagtgtttgctgttggagtgaggaatatcgactcggaggaggttggaaagatagcgtccaacagcgccacagcgttccgcgtgggcaacgtccaggagctgtccgaactgagcgagcaagttttggaaactttgcatgatgcgatgcatgaaaccctttgccctggtgtaactgatgctgccaaagcttgtaatctggatgtgattctggggtttgatggttctagagaccagaatgtttttgtggcccagaagggcttcgagtccaaggtggacgccatcttgaacagaatcagccagatgcacagggtcagctgcagcggtggccgctcgcccaccgtgcgtgtgtcagtggtggccaacacgccctcgggcccggtggaggcctttgactttgacgagtaccagccagagatgctcgagaagttccggaacatgcgcagccagcacccctacgtcctcacggaggacaccctgaaggtctacctgaacaagttcagacagtcctcgccggacagcgtgaaggtggtcattcattttactgatggagcagacggagatctggctgatttacacagagcatctgagaacctccgccaagaaggagtccgtgccttgatcctggtgggccttgaacgagtggtcaacttggagcggctaatgcatctggagtttgggcgagggtttatgtatgacaggcccctgaggcttaacttgctggacttggattatgaactagcggagcagcttgacaacattgccgagaaagcttgctgtggggttccctgcaagtgctctgggcagaggggagaccgcgggcccatcggcagcatcgggccaaagggtattcctggagaagacggctaccgaggctatcctggtgatgagggtggacccggtgagcgtggtccgcctggtgtgaacggcactcaaggtttccagggctgcccgggccagagaggagtaaagggctctcggggattcccaggagagaagggcgaagtaggagaaattggactggatggtctggatggtgaagatggagacaaaggattgcctggttcttctggagagaaagggaatcctggaagaaggggtgataaaggacctcgaggagagaaaggagaaagaggagatgttgggattcgaggggacccgggtaacccaggacaagacagccaggagagaggacccaaaggagaaaccggtgacctcggccccatgggtgtcccagggagagatggagtacctggaggacctggagaaactgggaagaatggtggctttggccgaaggggaccccccggagctaagggcaacaagggcggtcctggccagccgggctttgagggagagcaggggaccagaggtgcacagggcccagctggtcctgctggtcctccagggctgataggagaacaaggcatttctggacctcggggaagcggaggtgccgctggtgctcctggagaacgaggcagaaccggtccactgggaagaaagggtgagcccggagagccaggaccaaaaggaggaatcgggaaccggggccctcgtggggagacgggagatgacgggagagacggagttggcagtgaaggacgcagaggcaaaaaaggagaaagaggattccctggatacccaggaccaaagggtaacccaggtgaacctgggctaaatggaacaacaggacccaaaggcatcagaggccgaaggggaaattcgggacctccagggatagttggacagaagggagaccctggctacccaggaccagctggtcccaagggcaacaggggcgactccatcgatcaatgtgccctcatccaaagcatcaaagataaatgcccttgctgttacgggcccctggagtgccccgtcttcccaacagaactagcctttgctttagacacctctgagggagtcaaccaagacactttcggccggatgcgagatgtggtcttgagtattgtgaatgacctgaccattgctgagagcaactgcccacggggggcccgggtggctgtggtcacctacaacaacgaggtgaccacggagatccggtttgctgactccaagaggaagtcggtcctcctggacaagattaagaaccttcaggtggctctgacatccaaacagcagagtctggagactgccatgtcgtttgtggccaggaacacatttaagcgtgtgaggaacggattcctaatgaggaaagtggctgttttcttcagcaacacacccacaagagcatccccacagctcagagaggctgtgctcaagctctcagatgcggggatcacccccttgttccttacaaggcaggaagaccggcagctcatcaacgctttgcagatcaataacacagcagtggggcatgcgcttgtcctgcctgcagggagagacctcacagacttcctggagaatgtcctcacgtgtcatgtttgcttggacatctgcaacatcgacccatcctgtggatttggcagttggaggccttccttcagggacaggagagcggcagggagcgatgtggacatcgacatggctttcatcttagacagcgctgagaccaccaccctgttccagttcaatgagatgaagaagtacatagcgtacctggtcagacaactggacatgagcccagatcccaaggcctcccagcacttcgccagagtggcagttgtgcagcacgcgccctctgagtccgtggacaatgccagcatgccacctgtgaaggtggaattctccctgactgactatggctccaaggagaagctggtggacttcctcagcaggggaatgacacagttgcagggaaccagggccttaggcagtgccattgaatacaccatagagaatgtctttgaaagtgccccaaacccacgggacctgaaaattgtggtcctgatgctgacgggcgaggtgccggagcagcagctggaggaggcccagagagtcatcctgcaggccaaatgcaagggctacttcttcgtggtcctgggcattggcaggaaggtgaacatcaaggaggtatacaccttcgccagtgagccaaacgacgtcttcttcaaattagtggacaagtccaccgagctcaacgaggagcctttgatgcgcttcgggaggctgttgccatccttcgtcagcagtgaaaatgctttttacttgtccccagatatcaggaaacagtgtgattggttccaaggggaccaacccacaaagaaccttgtgaagtttggtcacaaacaagtaaatgttccgaataacgttacttcaagtcctacatccaacccagtgacgacaacgaagccggtgactacgacgaagccggtgaccaccacaacaaagcctgtaaccaccacaacaaagcctgtgactattataaatcagccatctgtgaagccagccgctgcaaagccggcccctgcgaaacctgtggctgccaagcctgtggccacaaagatggccactgttagacccccagtggcggtgaagccagcaacggcagcgaagcctgtagcagcaaagccagcagctgtaagaccccccgctgctgctgctgcaaaaccagtggcgaccaagcctgaggtccctaggccacaggcagccaaaccagctgccaccaagccagccaccactaagcccatggttaagatgtcccgtgaagtccaggtgtttgagataacagagaacagcgccaaactccactgggagagggctgagccccccggtccttatttttatgacctcaccgtcacctcagcccatgatcagtccctggttctgaagcagaacctcacggtcacggaccgcgtcattggaggcctgctcgctgggcagacataccatgtggctgtggtctgctacctgaggtctcaggtcagagccacctaccacggaagtttcagtacaaagaaatctcagcccccacctccacagccagcaaggtcagcttctagttcaaccatcaatctaatggtgagcacagaaccattggctctcactgaaacagatatatgcaagttgccgaaagacgaaggaacttgcagggatttcatattaaaatggtactatgatccaaacaccaaaagctgtgcaagattctggtatggaggttgtggtggaaacgaaaacaaatttggatcacagaaagaatgtgaaaaggtttgcgctcctgtgctcgccaaacccggagtcatcagtgtgatgggaacctaagcgtgggtggccaacatcatatacctcttgaagaagaaggagtcagccatcgccaacttgtctctgtagaagctccgggtgtagattcccttgcactgtatcatttcatgctttgatttacactcgaactcgggagggaacatcctgctgcatgacctatcagtatggtgctaatgtgtctgtggaccctcgctctctgtctccaggcagttctctcgaatactttgaatgttgtgtaacagttagccactgctggtgtttatgtgaacattcctatcaatccaaattccctctggagtttcatgttatgcctgttgcaggcaaatgtaaagtctagaaaataatgcaaatgtcacggctactctatatacttttgcttggttcattttttttcccttttagttaagcatgactttagatgggaagcctgtgtatcgtggagaaacaagagaccaactttttcattccctgcccccaatttcccagactagatttcaagctaattttctttttctgaagcctctaacaaatgatctagttcagaaggaagcaaaatcccttaatctatgtgcaccgttgggaccaatgccttaattaaagaatttaaaaaagttgtaatagagaatatttttggcattcctctaatgttgtgtgttttttttttgtgtgtgctggagggaggggatttaattttaattttaaaatgtttaggaaatttatacaaagaaactttttaataaagtatattgaaagtttcctgggaaaaaaaaaaaaaaaaaa

SEQ ID NO: 2335 - DNA, 548 bp, Homo Sapiens
  NM_004373
cggcgctgcggcagtccagatcaaaaatggcggtagttggtgtgtcctcggtttctcggctgctgggtcggtcccgcccacagctggggcggcctatgtcgagtggcgcccatggcgaagagggctcagctcgcatgtggaagactctcaccttcttcgtcgcgctccccggggtggcagtcagcatgctgaatgtgtacctgaagtcgcaccacggagagcacgagagacccgagttcatcgcctacccccatctccgcatcaggaccaagccgtttccctggggagatggtaaccatactctattccataaccctcatgtgaatccacttccaactggctacgaagatgaataaagagaatctggaccactacccgggcaccagggaccacagcactggtttggaccgttactctgcacatggaccagaaaaagtatatgggaccttaagctaaccttctttacttgtatcaaatgatgactggtatactggtctcccatccctttgcttgtggcaggagatggcttaaataaataacttaaactt

SEQ ID NO: 2336 - DNA, 2427 bp, Homo Sapiens
  NM_004375
ctcgcgagatttgacctctcgtccctgagaggcgggtgggtgttagttcagagggttatgggagggctctggcgtcctggatggaggtgcgttcctttctgtggctggcgctggatccaccctgggtctccaaccagggctgcagagagggtagagccgtttcttaggccagagtggagtgggacaggaggtgccgagagaggactgaggtggcttgggacatggaagcgctgcagccttcgagcccggcatccagcattgcagccgccgcggcggcctaagagctcgaaccctttcacacgcgcgcaggaggaggagcggcggcggcagaacaagacgaccctcacttacgtggccgctgtcgccgtgggcatgctgggggcgtcctacgctgccgtacccctttatcggctctattgccagactactggacttggaggatcagcagttgcaggtcatgcctcagacaagattgaaaacatggtgcctgttaaagatcgaatcattaaaattagctttaatgcagatgtgcatgcaagtctccagtggaactttagacctcagcaaacagaaatatatgtggtgccaggagagactgcactggcgttttacagagctaagaatcctactgacaaaccagtaattggaatttctacatacaatattgttccatttgaagctggacagtatttcaataaaatacagtgcttctgttttgaagaacaaaggcttaatccccaagaggaagtagatatgccagtgtttttctacattgatcctgaatttgctgaagatccaagaatgattaaagttgatcttatcactctttcttacactttttttgaagcaaaggaagggcacaagttgccagttccaggatataattgaagtcagcaactaagtcttccttcaaagttgtgatttttgggaaaatcatatatcctatcttctcaaaggagaaatattgtacaataatatgaaggcttatattttaaataattattttttctcaactaatttttttcacttaaacttgagagaacaagttcagcttttatcataagaaactcatatgcctagctagaatatatgactgactattcaataccatactgaagagtttgatactattaaaataagccgctttgttttttaaatatgcaggcatgggttcagcttaattccataattcccttccagattattaactcttcatacttacagcaatgaatctgacaatgtttttcaaaaatgtatgctcagggttatttgtttcaagtcataggccagaacttctaaccatgtttattgtgtctaaaagagttggttgctattttccttcattatgaatagtcagtattttaaaagctcaaagtagaagaggagtcactaagccctaacagcttgtccaaagatttaaattcttatttcaaatttgatttgtcctttaaggtttagggctattttatattcagagttctgaataattactttgaaactgtagtatcataaaattgaaataaaatacatctactaggctgttagccaaagcatcaccattacaagtccatgaatgttaaaatgtacaggtgggattgtgaagatttactgacatcaaaagttcttctggaaacaaacctttgttaaaaaaaaaaagtattaaattgttttaatagtgatttatttgtcatcaaatgtacaacttattctaaatattttcattttctgtgttctaaatagaaatattaagttgcagtaaaaagagaaaaaaaggctatttagcattacaaagaatcatatttaaaggctgcccaatgtagagtctagtgacctgttcaggacacctgaaatataattaaatgacaattatcaaggttttaacaatttataattctaaaccagaggattataaagaagtgcaaattgacttttacattcaactttagttaaatgaaggcactcagtattcttcctgaataatacattcagtttctcacattttatgctttcatctattcagaattatttcatagtaaaataatctactcttatcacagctgtgtgacgatttctaaatgtaggaaggcctgtgaaacatgacactgcagttaaattggttggcctaaggactaagtaatttttcttctgctgaagttttaagtgagtatttgttccaaacaagttctgttgaaatctcacgctgttgtcaggaatcagtgttatcctggaactgttattctatttaatcttcattatagcagaaatgtgccaccatggctttgacatgttggtaggtattgtcttccaggcttcaaagctgcacagagtctacgttttagagagttggcacctttgatgtggtagtgagctgatcatccactttcttctaaaataaagagaagaaaatggccagtaaaaaaaaaaaaa

SEQ ID NO: 2337 - DNA, 3152 bp, Homo Sapiens
  NM_004388
gacgcgcagcaggccccgcccacccaggcggtaggaacccactccggcccgctagacctgctgctatgtcccggccgcagcttcgacgctggcgcctcgtctctagcccgccgagcggcgtcccgggtctagcgctgctggcgctgctggcgctgctggcgctgcggctcgcggccgggaccgactgcccatgcccggagcctgagctctgccgcccgattcgccaccatccagatttcgaggtctttgtgtttgatgttggacagaaaacttggaaatcttatgattggtcacagattacaactgtggcaacatttggaaaatatgactcagaacttatgtgctacgctcattcaaaaggagccagagtagtacttaaaggagatgtatccttaaaggatatcattgatcctgctttcagagcatcctggatagctcaaaaacttaatttggccaaaacacaatatatggatggaattaatatagatatagagcaagaagttaattgtttatcacctgaatatgatgcattaactgctttagtcaaagaaactacagactctttccatcgtgaaattgagggatcacaggtaacctttgatgtagcttggtctccaaagaacatagacagaagatgctataattatactggaatcgcagatgcttgtgacttcctctttgtgatgtcttatgatgaacaaagtcagatctggtcagaatgtattgcagcagccaatgctccctataatcagacattaactggatataatgactacatcaagatgagcattaatcctaagaaacttgtaatgggtgttccttggtatggttatgattatacctgcctgaatctgtctgaggatcatgtttgtaccattgcaaaagtccctttccggggggctccttgtagtgacgctgcaggacgtcaggtgccctacaaaacgatcatgaagcaaataaatagttctatttctggaaacctatgggataaagatcagcgggctccttattataactataaagatcctgctggccactttcatcaagtatggtatgataaccctcagagtatttctttaaaggcaacatatatacaaaactatcgcttacggggcattggcatgtggaatgcaaactgtcttgactactctggagatgctgtagccaaacagcaaactgaagaaatgtgggaagtcttaaagccaaagctgttacagagatgaacatcttttgtcaaaccattaagagttagaaagatgatctgtatcaacagatctagtttcttgcatttttattatgttgctatatacttttgttatccgtatactaaaaaaaaagaataaataaatgttttgattgtttgaatttgaaaaatacacacgaatgtcctcagtatccaggaacataaaggcaagaagcaagtcaacttacctattaaatattcctctattagatgtttcaacactataatttaattgggaaaaattgctttcagaattttattatgccatatttcccttcattatagtaaaatatatgctcacgaatcaatgctgatttttaaaatatgtataatctgaagtggaaattgtttgcttagagtttttaaaaacctagtctttgaaaagcagtttgtgctatacttttcccccaaccctccaataaatcttaaatttaaaacctacaatgtagtgtctcccctttaggttcatcaaactgatgaaaataatttttctgcttcctgactccatatagtatttatgttctctgaggtacttgaactaaatctttggacagtgagtgagaattaaaaagaatccagaagattaaatgtattcacaaaatagaagaatgtaacagtaatattttgaattggtaagttagaactacctaatattttccaactacattatttttatgaggctcatttgtaaaatttttaataataggaataacttgcagttgaacttgattctgttcactgtcacacttctaattattcatttcttcatttatggacatatataatttatttcttggctagcttgcttacatggttaaatttttctttctacatctgcaatgtatcttttttatttttattttttgtagagacagggtctcgctatgttgtccagatgggtctccaactcctgggctcaagcactcctcctgccttggcttcctaaagagctgggattacaggcatgagctgcattgtgcttttaatgatctaaagacactgattagcttctcaactagttctctttctaaaagatcaattttatacaaataagttttctaaatgtaataaagtctgttttctttctccagggaattaagaacaacattgtgctgcccttattagttcctaattacagattaaaaatctgtatctttgaactctagatttacataaatcctggcttccctgcacattttgcccctgtaaattggaatacatgatgattgaaccatctgttatgagaatattacatttcctatttacacaattgtttgtgacagagtaaaaaccattttcatagtatatgttggatcactgttgtcttcatatttctaaaataaatgaattaaaaaatttaaattcttagatgcttatctctatcatagctcagaatgcaacttcaatacccccattcttttatatttccagatttcttttaattaagatataatgaacaaattaagttaaatgaagtctgtattttcatgcaaatatattagtattcattaatatacatttattctttgcaaatagattttagttatattagctcttaaattgttaaataaattattattgaattttattattaaattattaaaatgaaaattataaaattagcactgtaaaataatatgtaaaggacttggaatgttaaaaataaccattcatcattttgctttatattacatctaatatttcctgaaacattttgtaatacccacatggaaagtggagaaagagaaaccttgtgctttttataaaacattgccaaggagaataatggttaaacaaatctgttcaaatacatatttaaatttttttacaaataaaagttttaaattaacatacctaaaaaaaaaaaaaaaaaaaaaaaaaaaaaaaaaaaaaaaaaaaaaaaaaaaaa

SEQ ID NO: 2338 - DNA, 5522 bp, Homo Sapiens
  NM_004393
aggcagaagccggcggcgcgcggacagccagtcggcgccgcgcggagctggccgctggattggctgcaacactcgcgtgtcaggcggttgctaggctccggccgcgcgccccgcccttgcgctcagcgccctctcaccgcccggtacgtgctcgcgcgaaggctgcggcgcggcgctcgcgcctcttaggcttggcggtggcggcggcggcagcttcgcgccgaatccccggggagcggcggtggcggcgtcctggggccaggaggagcgaacacctgccgcggtcctcccgccggcgctgggctctgtgtgctccgggatggagcaggtgtgcagagggtgagaacccagctctgggaccaagtcacttgcttccttacttagcaagactatcgacttgagcaaacttggacctgggatgaggatgtctgtgggcctctcgctgctgctgcccctctgggggaggacctttctcctcctgctctctgtggttatggctcagtcccactggcccagtgaaccctcagaggctgtcagggactgggaaaaccagcttgaggcatccatgcactcagtgctctcagacctccacgaggctgttcccacagtggttggcattcctgatggcacggctgtcgtcgggcgctcatttcgagtgaccattccaacagatttgattgcctccagtggagatatcatcaaggtatcagcggcagggaaggaggctttgccatcttggctgcactgggactcacagagccacaccctggagggcctcccccttgacactgataagggtgtgcattacatttcagtgagcgctacacggctgggggccaacgggagccacatcccccagacctccagtgtgttctccatcgaggtctaccctgaagaccacagtgagctgcagtcggtgaggacagcctccccagaccctggtgaggtggtatcatctgcctgtgctgcggatgaacctgtgactgttttgacggtgattttggatgccgacctcaccaagatgaccccaaagcaaaggattgacctcctgcacaggatgcggagcttctcagaagtagagcttcacaacatgaaattagtgccggtggtgaataacagactatttgacatgtcggccttcatggctggcccgggaaatgcaaaaaaggtggtggagaatggggcccttctctcctggaagctgggctgctccctgaaccagaacagtgtgcctgacattcatggtgtagaggcccctgccagggagggcgcaatgtctgctcagcttggctaccctgtggtgggttggcacatcgccaataagaagccccctcttcccaaacgcgtccggaggcagatccatgctacacccacacctgtcactgccattgggcccccaaccacggctatccaggagcccccatccaggatcgtgccaacccccacatctccagccattgctcctccaacagagaccatggctcctccagtcagggatcctgttcctgggaaacccacggtcaccatccggactcgaggcgccattattcaaaccccaaccctaggccccatccagcctactcgggtgtcagaagctggcaccacagttcctggccagattcgcccaacgatgaccattcctggctatgtggagcctactgcagttgctacccctcccacaaccaccaccaagaagccacgagtatccacaccaaaaccagcaacgccttcaactgactccaccaccaccacgactcgcaggccaaccaagaaaccacggacaccccggccagtgccccgggtcaccaccaaagtttccatcaccagattggaaactgcctcaccgcctactcgtattcgcaccaccaccagtggagtgccccgtggcggagaacccaaccagcgcccagagctcaagaaccatattgacagggtagatgcctgggttggcacctactttgaggtgaagatcccgtcagacactttctatgaccatgaggacaccaccactgacaagctgaagctgaccctgaaactgcgggagcagcagctggtgggcgagaagtcctgggtacagttcaacagcaacagccagctcatgtatggccttcccgacagcagccacgtgggcaaacacgagtatttcatgcatgccacagacaaggggggcctgtcggctgtggatgccttcgagatccacgtccacaggcgcccccaaggggatagggctcctgcaaggttcaaggccaagtttgtgggtgacccggcactggtgttgaatgacatccacaagaagattgccttggtaaagaaactggccttcgcctttggagaccgaaactgtagcaccatcaccctgcagaatatcacccggggctccatcgtggtggaatggaccaacaacacactgcccttggagccctgccccaaggagcagatcgctgggctgagccgccggatcgctgaggatgatggaaaacctcggcctgccttctccaacgccctagagcctgactttaaggccacaagcatcactgtgacgggctctggcagttgtcggcacctacagtttatccctgtggtaccacccaggagagtgccctcagaggcgccgcccacagaagtgcctgacagggaccctgagaagagcagtgaggatgatgtctacctgcacacagtcattccggccgtggtggtcgcagccatcctgctcattgctggcatcattgccatgatctgctaccgcaagaagcggaagggcaagcttacccttgaggaccaggccaccttcatcaagaagggggtgcctatcatctttgcagacgaactggacgactccaagcccccaccctcctccagcatgccactcattctgcaggaggagaaggctcccctaccccctcctgagtaccccaaccagagtgtgcccgagaccactcctctgaaccaggacaccatgggagagtacacgcccctgcgggatgaggatcccaatgcgcctccctaccagcccccaccgcccttcacagcacccatggagggcaagggctcccgtcccaagaacatgaccccataccggtcacctcctccctatgtcccaccttaacccgcaagcgcctgggtggaggcagggtagggcaggggcctggagacgacatggtgttgtctgtggagaccggtggcctgcagaccattgcccaccgggagccgacacctgacctagcacacactgacacaggggcctggacaagcccgccctctctggtcctcccaaaccccaaagcagctggagagactttggggacttttttatttttattttttgcctaacagcttttggtttgttcatagagaattcttcgcttcatttttgatggctggctctgaaagcaccatgtggagtggaggtggagggagcgaggaaccatgaatgaactcgcaggcagtgccgggcggccccctggctctctgcgttttgcctttaacactaactgtactgttttttctattcacgtgtgtctagctgcaggatgtaacatggaaaacagtaactaaagattaaattcaaaggactttcagaagttaaggttaagtttttacgtttaatctgctgtttacctaaacttgtatgtataatttttgggtgggtatggggaattgctttgctaaaaataagctcccagggtgtttcaaacttagagaagaccaagggacagtattttttatcaaaggaatactattttttcacactacgtcaacttggttgctctgataccccagagcctgattgggggcctcccggccctggctcacgccaagtccctggtgctgggtttgctctcccgctgttgccaggggctggaagctggaggggtctcttgggccatggacatccccacttccagcccatgtacactagtggcccacgaccaaggggtcttcatttccatgaaaaagggactccaagaggcagtggtggctgtggcccccaactttggtgctccagggtgggccagctgcttgtgggggcacctgggaggtcaaaggtctccaccacatcaacctattttgttttaccctttttctgtgcattgtttttttttttcctcctaaaaggaatatcacggttttttgaaacactcagtgggggacattttggtgaagatgcaatatttttatgtcatgtgatgctctttcctcacttgaccttggccgctttgtcctaacagtccacagtcctgccccgacccaccccatcccttttctctggcactccagtcccaggccttgggcctgaactactggaaaaggtctggcggctggggaggagtgccagcaatagttcataataaaaatctgttagctctcaaagctaattttttactaaagtttttatacagcctcaaattgttttattaaaaaaaagatttaaaatggtgatgcttacagcagtttgtacgagctcttaagtgttgattccatggaactgacggctttgcttgttttgattcttttccccctacttttcctaatggtttaaattctggaattacactggggttcttttgccttttttagcagaacatccgtccgtccatctgcatctctgtcccatgactcaggggcgcccactctgcttcgattctcctcctgtggaagaaaccattttgagcatgacttttcttgatgtctgaagcgttattttgggtactttttagggaggaatgcctttcgcaataatgtatccattccctgattgagggtgggtgggtggacccaggctccctttgcacacagagcagctacttctaagccatatcgactgttttgcagaggatttgtgtgtgctgcctcaggaggggagggctggtaggagggggggagaggtctctgtcctactgctctccagagggcatttccccttgcgccttctcccacagggcccagcccctctcccctgccccagtccccagggggtactctggagtgagcagtgcccctgtgggggagcctgtaaatgcgggctcagtggaccactggtgactgggctcatgcctccaagtcagagtttccctggtgccccagagacaggagcacaagtgggatctgacctggtgagattatttctgatgacctcatcaaaaaataaacaattcccaatgttccaggtgagggctttgaaaggccttccaaacagctccgtcgcccctagcaactccaccattgggcactgccatgcagagacgtggctggcccagaatggcctgttgccatagcaactggaggcgatggggcagtgaacagaataacaacagcaacaatgcctttgcaggcagcctgctcccctgagcgctgggctggtgatggtcgttggactctgtgagatggagagccaatctcacattcaagtgttcaccaaccactgatgtgtttttatttccttctatatgattttaagatgtgttttctgcattctgtaaagaaacatatcaaactaaataaaagcagtgtctttattacaa

SEQ ID NO: 2339 - DNA, 3204 bp, Homo Sapiens
  NM_004398
ccgtgagtctgaccttaggtgtctcgtgtctggggttgatccgagctgtcgccgccgccgccgcaatgggcaaaacggccaactctccgggttcgggagcccgacccgacccggtgcggagcttcaatcgctggaagaaaaaacacagccataggcagaacaaaaagaagcagttgaggaagcaactgaagaaacccgaatggcaggtcgagcgcgagagtatcagccgcctcatgcagaactatgaaaagataaatgtaaatgaaatcacaagattttcagattttcccttgtccaaaaaaacattgaaaggtttgcaagaagctcagtaccgtttggtgactgagatacagaagcagaccattggattggctttgcaaggtaaagatgtacttggagcggccaaaactggatctggcaagactctggcttttcttgttccagtgctggaagccttatatcgtctgcaatggacttcaacagatgggctgggggttctcataatatcacctacgagagaactggcctatcagacctttgaggttctccgaaaagtaggaaagaatcatgacttctcagctggtctcatcattggtggaaaggatctaaaacacgaagctgagaggatcaacaacataaatatactcgtgtgcacaccaggtcggcttcttcaacacatggatgaaacagtatcttttcatgctaccgacctccaaatgttagttcttgatgaagcagatagaatcttggatatgggctttgctgataccatgaatgctgttattgaaaatctccccaagaaacgtcagactttacttttctcagcaacacaaactaaatctgtaaaggaccttgcacgcttgagtttgaaaaaccctgagtatgtctgggttcatgaaaaagcaaaatatagcacccctgccactttggaacagaactacatagtctgtgagctgcagcaaaaaataagtgtgctgtattcctttttgagaagccatctgaagaagaagagcattgtatttttttccagttgcaaagaggtccagtatctgtaccgagtgttttgccggctacgtcctggtgtttctatccttgcactccatggtcgacagcagcaaatgagaagaatggaagtctataatgagtttgtccgtaagagagctgcagtactctttgctactgatattgcagccaggggtctggatttcccggccgtgaattgggttcttcagtttgattgtcctgaggatgccaacacatatattcacagagcaggtagaactgccaggtacaaagaggatggtgaagctttgctaattttgctaccctcagaaaaagctatggtgcagcagcttcttcagaagaaagtacctgtgaaggaaatcaaaatcaatccagaaaaacttatagatgtccagaaaaaattggaatctattttagctcaagatcaagatttaaaagaaagagctcaaaggtgtttcgtctcctatgtacgatctgtatatctgatgaaggataaagaagtatttgatgtgagcaagttacctatacctgaatatgccctgtctcttggtcttgctgtggcaccacgcgtaagatttcttcagaaaatgcagaaacaacccaccaaagaattggtaaggagccaagccgataaagtaattgagccaagggctccctccctcaccaatgacgaagtggaagaatttagagcctacttcaatgagaaaatgtccatccttcaaaaaggtggaaaaagactcgaagggacagagcacagacaggataatgatactggtaatgaagaacaggaagaagaagaagacgatgaagaagaaatggaagagaaactggcaaaagcaaaaggatctcaagccccatctcttcctaacaccagtgaggcacagaagatcaaggaagttcctacacagttcttggacagagatgaggaggaagaagatgctgatttcttgaaggtgaagcggcataatgtgtttggattggaccttaaagacgagaaaacattacagaagaaagaaccttctaaatccagcatcaagaaaaaaatgaccaaagttgcagaagcaaaaaaagtaatgaagagaaattttaaagtgaataagaagataacatttactgatgaaggggagttggttcagcagtggccacaaatgcagaaatctgccatcaaggatgctgaggaagatgatgacacaggtggtatcaacttacataaagcaaaggaaagacttcaggaagaggacaaatttgacaaagaagaatataggaaaaaaattaaggcaaagcatcgggagaaaagactgaaagaaagggaagccagaagagaagccaacaagagacaagcaaaggccaaagatgaagaggaagcctttctggattggagtgatgatgatgatgatgatgatgatggatttgatccaagcacactcccagatccagataaatacagaagctctgaagattcagatagtgaagatatggaaaataaaataagtgataccaagaagaagcaggggatgaagaagaggagcaacagtgaagtggaagacgtgggaccaacaagtcataacagaaagaaggccaggtgggacactttagagcctttggataccggcctgtctttagcagaggatgaagagctggtgttacatctgctaagaagtcaaagctaaatacttcctgcgcctgccttctccttgaaaccttggttatgactgcgtaggcaagaagttgaaaaacagttgatttgggggcacttaggtaccatatgccccattcccaaagggcacatttctggatagaagcgatcgtatctccaagtccctctcacaggacatgctttgtgccatcactgagcatactcagatcgagggtggatgataccatttcctgaccccgttttccagcatgtgttctgttagatttttatccatgggttcctacgccttgtcattggaaacactgcctttgtcttactggcaagttctggagctcttgtgtcattgttagaaatccctgtcttgcttactgtacagaagtttctgttgctgttaaaattgctcatgatttcgacgtatttaatattttcaaagagactatgatggaccagccctgagaaagaatgagtatttttgaattgagatgatcaataataaacatatttcctataaaaaaaaaaaaaaa

SEQ ID NO: 2340 - DNA, 2053 bp, Homo Sapiens
  NM_004401
acatctcccggcaggctgcggaagggggtcgagtagaaggaccgccgctccggcctcccgcgacttctcgaaggtgggcaggtcccaccttgtggaggatggaggtgaccggggacgccggggtaccagaatctggcgagatccggactctaaagccgtgtctgctgcgccgcaactacagccgcgaacagcacggcgtggccgcctcctgcctcgaagacctgaggagcaaggcctgtgacattctggccattgataagtccctgacaccagtcaccctggtcctggcagaggatggcaccatagtggatgatgacgattactttctgtgtctaccttccaatactaagtttgtggcattggctagtaatgagaaatgggcatacaacaattcagatggaggtacagcttggatttcccaagagtcctttgatgtagatgaaacagacagcggggcagggttgaagtggaagaatgtggccaggcagctgaaagaagatctgtccagcatcatcctcctatcagaggaggacctccagatgcttgttgacgctccctgctcagacctggctcaggaactacgtcagagttgtgccaccgtccagcggctgcagcacacactccaacaggtgcttgaccaaagagaggaagtgcgtcagtccaagcagctcctgcagctgtacctccaggctttggagaaagagggcagcctcttgtcaaagcaggaagagtccaaagctgcctttggtgaggaggtggatgcagtagacacgggtatcagcagagagacctcctcggacgttgcgctggcgagccacatccttactgcactgagggagaagcaggctccagagctgagcttatctagtcaggatttggagttggttaccaaggaagaccccaaagcactggctgttgccttgaactgggacataaagaagacggagactgttcaggaggcctgtgagcgggagctcgccctgcgcctgcagcagacgcagagcttgcattctctccggagcatctcagcaagcaaggcctcaccacctggtgacctgcagaatcctaagcgagccagacaggatcccacatagcagcagcgggaagtgtgccaaggaagctctgtggcgttgtgttattggtagacaccctcagcctcatcatttgactacctatgtactactctaccccctgccttagagcaccttccagagaagctattccaggtctcaacatacgccgttccaccaattttttttttagccccaccagcttcaggacttctgccaattttgaatgatatagctgcaccaacaatatcccgcctcctctaattacatatgatgttctctgttcaaaagtaattggcagtgattggccaggcgcagtggctcacgcctgtaatcccagcactgggaggccgaggggggcggatcgtgaagtcaggagatcgagaccatcctggctaacatggtgaaaccctgtctctactaaaaatacaaaaaaaattagccagccatggtggcgggcgcctgtaatcccagctacttgggaggctgaggcaggagaatggcatgaacctgggaggcagagcttgcagtgagctgagattgcgccactgcactccagcctgggcaacagagcgagactccgtctcaaaaaaaaaaaaaaaaaaagtaattggcagtgactatgggcgcactgcctaacatttagccctgccccatatggaacatgttaaaaaaaaaaaaagccaggccgagcgtgttggctcacgcttgtaatcccagcactttgggaggccgaggcgggtggatcacgaggtcaggagatcgagaccatcctggctaacacagtgaaacgtgtttttactaaaagtacaaaaaactagctgggcgtggtggcaggagcctgtagtcccagctactcgggaggctgaggcaggagaattgcttgaaccggggaggcagaagttgcagtgagccgagattatgccactgtactccagcctgggtgacagagtgacactctgtctcaaaaaaaaaaaaaaaaa

SEQ ID NO: 2341 - DNA, 3034 bp, Homo Sapiens
  NM_004402
ccgctactctggccctcagggttgtgtagtttccggggccacggcacctgggcacaccaggtggcgtcgcgcctttgctttcctgagccttctgagtaaggtaatgtggtgtccgtggggcgacgcctgcgcacaagaccgcgtcgggcctcacttttcccaggccttctgggtaatgtagtttccgggatcggcacccggcctgtgccagcttgcagagctcaccaggtgcagacccctgcggccagggcgaggacggatctgagcagctgggcagcaggtgccaccgcctgtgggacccagagggcttgaggacatctgcaatgctccagaagcccaagagcgtgaagctgcgggccctgcgcagcccgaggaagttcggcgtggctggccggagctgccaggaggtgctgcgcaagggctgtctccgcttccagctccctgagcgcggttcccggctgtgcctgtacgaggatggcacggagctgacggaagattacttccccagtgttcccgacaacgccgagctggtgctgctcaccttgggccaggcctggcagggctatgtgagcgacatcaggcgcttcctcagtgcatttcacgagccacaggtggggctcatccaggccgcccagcagctgctgtgtgatgagcaggccccacagaggcagaggctgctggctgacctcctgcacaacgtcagccagaacatcgcggccgagacccgggctgaggacccgccgtggtttgaaggcttggagtcccgatttcagagcaagtctggctatctgagatacagctgtgagagccggatccggagttacctgagggaggtgagctcctacccctccacggtgggtgcggaggctcaggaggaattcctgcgggtcctcggctccatgtgccagaggctccggtccatgcagtacaatggcagctacttcgacagaggagccaagggcggcagccgcctctgcacaccggaaggctggttctcctgccagggtccctttgacatggacagctgcttatcaagacactccatcaacccctacagtaacagggagagcaggatcctcttcagcacctggaacctggatcacataatagaaaagaaacgcaccatcattcctacactggtggaagcaattaaggaacaagatggaagagaagtggactgggagtatttttatggcctgctttttacctcagagaacctaaaactagtgcacattgtctgccataagaaaaccacccacaagctcaactgtgacccaagcagaatctacaaaccccagacaaggttgaagcggaagcagcctgtgcggaaacgccagtgacacgtacacaccacgtcctggtctttgtttgaggcctgacgtgggcatcattttaacaggtgccttttttgtttttttgtttttcgtttttttggtcactccagtagctcctggaaaaaaccttaaaaaatgtttcctccaaatctgatttcattacatttctgaattgttggggttttttttgttgttttgttttgttttgtagatggagtttcacttttgttgcccaggctggagtgtagtggcgcgatctcggctcagcctcccgagtagctgggattacaggcatgtgccaccacgcccggctaatgtttgtatttttagtagagacggggtttcaccatgttggtcaggctggtctcaaactcctgacctcaggtgatccgcccacctcagcctcccaaagtgctgggatgacaggtgtgagccactgcgcccagcctgaatcatttcttataccttctgacagcccaacttccagaggacagctctggggtactcgttggatgtctgtgagtacctggtcatacgggtcagtagggataagaattgtctctgggctgaggaattcttctgttctctggtttcaccagcgttgggtttgctcatgtaatgtggtcaccatactcaaatggtgtcatggctgaagttggccaccttgcttgagggacaagttgtttatgtatcagctctctgctgggtctccctttccatggcaaatgggcagctccatcctcttgactcttctaaatgcccaaaagaggtgtcatgctttgggggtacgatgtttatactccgtaaagaacatacaaggacattcactgctgatttttttttttgtttgtttgagacagggtctcactctgtcgctcaggctggagtgcagtgatgcaatcttggctcactgcaacctccgcctctcaggttcaagtggttctcctgcctcagcctcccaagtagctgggattacaggcacctaccaccagggccagctaatttttgtatgtttagtagaaacggggtttcaccatgttggccaggctgttctcgaactcctgacctcaggtgatctgcccgcctcggtctcccaaagtgctgggattacaggcatgagccactgcacctgacctgctgaattgtttataatggcaagaaataggaaaccccccaatgtctgttgaacagctatcacgttgaaccacgtgaaactgctgttttctaggccaaaaatggtgagcgatcatttatttcatgattcaacctgatacatttacatagtgcaaaactgtgtcacagtttcaggcttttatgaggaaagcgtttctgtgtagaaactggaagctgttcagggcatcggcagctgaaccctgctccgttggtcagcgttactatcatctcggatcatatggagctcatgtcagccgtgtgggtggcgggtgcacagagacggtctggaaggaaacacgcggatctgaacagcagtaatcctgggggatacgggggttgggctagattacagagggctcattttctacgtcatgtattttatgatacttgaattttttgaaatgggcatttattttataacatgttaaaatgtactttttaaattaagtcattttgtaatatttgaatttttacatttgttgtacaatcaggaaaagcaataaagatttttcaaaaatagaaaaaaa

SEQ ID NO: 2342 - DNA, 2040 bp, Homo Sapiens
  NM_004417
tcgctgcgaaggacatttgggctgtgtgtgcgacgcgggtcggaggggcagtcgggggaaccgcgaagaagccgaggagcccggagccccgcgtgacgctcctctctcagtccaaaagcggcttttggttcggcgcagagagacccgggggtctagcttttcctcgaaaagcgccgccctgcccttggccccgagaacagacaaagagcaccgcagggccgatcacgctgggggcgctgaggccggccatggtcatggaagtgggcaccctggacgctggaggcctgcgggcgctgctgggggagcgagcggcgcaatgcctgctgctggactgccgctccttcttcgctttcaacgccggccacatcgccggctctgtcaacgtgcgcttcagcaccatcgtgcggcgccgggccaagggcgccatgggcctggagcacatcgtgcccaacgccgagctccgcggccgcctgctggccggcgcctaccacgccgtggtgttgctggacgagcgcagcgccgccctggacggcgccaagcgcgacggcaccctggccctggcggccggcgcgctctgccgcgaggcgcgcgccgcgcaagtcttcttcctcaaaggaggatacgaagcgttttcggcttcctgcccggagctgtgcagcaaacagtcgacccccatggggctcagccttcccctgagtactagcgtccctgacagcgcggaatctgggtgcagttcctgcagtaccccactctacgatcagggtggcccggtggaaatcctgccctttctgtacctgggcagtgcgtatcacgcttcccgcaaggacatgctggatgccttgggcatcactgccttgatcaacgtctcagccaattgtcccaaccattttgagggtcactaccagtacaagagcatccctgtggaggacaaccacaaggcagacatcagctcctggttcaacgaggccattgacttcatagactccatcaagaatgctggaggaagggtgtttgtccactgccaggcaggcatttcccggtcagccaccatctgccttgcttaccttatgaggactaatcgagtcaagctggacgaggcctttgagtttgtgaagcagaggcgaagcatcatctctcccaacttcagcttcatgggccagctgctgcagtttgagtcccaggtgctggctccgcactgttcggcagaggctgggagccccgccatggctgtgctcgaccgaggcacctccaccaccaccgtgttcaacttccccgtctccatccctgtccactccacgaacagtgcgctgagctaccttcagagccccattacgacctctcccagctgctgaaaggccacgggaggtgaggctcttcacatcccattgggactccatgctccttgagaggagaaatgcaataactctgggaggggctcgagagggctggtccttatttatttaacttcacccgagttcctctgggtttctaagcagttatggtgatgacttagcgtcaagacatttgctgaactcagcacattcgggaccaatatatagtgggtacatcaagtccatctgacaaaatggggcagaagagaaaggactcagtgtgtgatccggtttctttttgctcgcccctgttttttgtagaatctcttcatgcttgacatacctaccagtattattcccgacgacacatatacatatgagaatataccttatttatttttgtgtaggtgtctgccttcacaaatgtcattgtctactcctagaagaaccaaatacctcaatttttgtttttgagtactgtactatcctgtaaatatatcttaagcaggtttgttttcagcactgatggaaaataccagtgttgggtttttttttagttgccaacagttgtatgtttgctgattatttatgacctgaaataatatatttcttcttctaagaagacattttgttacataaggatgacttttttatacaatggaataaattatggcatttctattgaaatttcaaaaaaaaaaaaaaaaaa

SEQ ID NO: 2343 - DNA, 1708 bp, Homo Sapiens
  NM_004418
ggagtcgaccgctcgggcagcgccaccgccacgagagcccgggacgcgggaaagaccgaaaggaagaggaagaggcaccggtggccatggggctggaggcggcgcgcgagctggagtgcgcggcgctgggcacgctgctgcgggatccgcgggaggcggaacgcacgctgctgctggactgccgccccttcctggccttctgccggcgccacgtgcgcgccgcgcggccagtgccttggaacgcgctgctgcggcgccgcgcgcgcggccctcctgccgccgttctcgcctgcctgctgcccgaccgcgcgctgcggacgcgcctggtccgcggggagctggcgcgggccgtggtgctggacgagggcagtgcctcggtggcggagctccggcccgacagcccggctcatgtgctgctggccgcgctgctgcacgagacccgcgcggggcccactgccgtgtacttcctgcgaggaggcttcgacggcttccagggctgctgtcccgatctgtgctctgaggcccccgcccctgcgctgccgccaacaggggacaaaaccagccgctccgactccagggctcctgtctacgaccagggtggccctgtggagatcttgccctacctgttcctgggcagctgcagtcactcgtcagacctgcaggggctgcaggcctgtggcatcacagccgtcctcaacgtgtccgccagctgccccaaccactttgagggccttttccgctacaagagtatccctgtggaggacaaccagatggtggagatcagtgcctggttccaggaggccataggcttcattgactgggtgaagaacagcggaggccgggtgctggtgcactgccaggcgggtatctcgcgctctgccaccatctgtctggcatacctcatgcagagtcgccgtgtgcggctggacgaggcctttgacttcgttaagcagcgccggggggtcatctcccccaacttcagtttcatggggcagctgctgcagtttgagacccaggtgctgtgtcactgaggtggtgcccctctgcctgcctgccccactgtgctggcaggagctgactgtggactggtgggctcccctctgggccagcacagtcccctcacctctggcagggctgctacctcctcagagtttcagaagcccccacatgggggctctaggaatgccggcatgctggtctttccgacctggtgctcttctgctgggggactgaggctggccctcattcggggtcgggaaccaagggtgtgtctgctctttccctccccatcctctggcagaaatcagctagacgctataccgtggactctccctggtccaccaccatgttgaagcccttggcagcctgagagctccaaggaacaagctgtgacaaccaggagccctgtctgtgggttcgtctgcccagggcctggagcccaagccctgtgttcctggggaagctggggacttgggaagtgatgggtgtgtcatgttgcgtgtgtctgtctgtgagcctttcacacctgtgctggcgctggaaaattatttgtgctcagctgacatttaacactccctcccccgcttcctcctagccctgtgggcaggggttggaaacttagcactttatatttatacagaacattcaggatatgtcaataaaatattgttatatttaaaaaacaaaaaaaaaaaaaaaaaaaaaaaaa

SEQ ID NO: 2344 - DNA, 2545 bp, Homo Sapiens
  NM_004419
actcattcacataaaacgctgcgcggccggcggaatccccggcttctagggcggcgagcggccgggctggctatcgagcgagcggggcgggaacgcggagttgcgccgccgctcgggcgccgggctccgtcgcggccgcagccccgcgggtcgccctcccgtgcctcgcccgcggacaccctggccgtggacaccctggccgtgggcacccgcggggcgcgcggcgcggggccgctggccggcggcggcggcggcatgaaggtcacgtcgctcgacgggcgccagctgcgcaagatgctccgcaaggaggcggcggcgcgctgcgtggtgctcgactgccggccctatctggccttcgctgcctcgaacgtgcgcggctcgctcaacgtcaacctcaactcggtggtgctgcggcgggcccggggcggcgcggtgtcggcgcgctacgtgctgcccgacgaggcggcgcgcgcgcggctcctgcaggagggcggcggcggcgtcgcggccgtggtggtgctggaccagggcagccgccactggcagaagctgcgagaggagagcgccgcgcgtgtcgtcctcacctcgctactcgcttgcctacccgccggcccgcgggtctacttcctcaaagggggatatgagactttctactcggaatatcctgagtgttgcgtggatgtaaaacccatttcacaagagaagattgagagtgagagagccctcatcagccagtgtggaaaaccagtggtaaatgtcagctacaggccagcttatgaccagggtggcccagttgaaatccttcccttcctctaccttggaagtgcctaccatgcatccaagtgcgagttcctcgccaacctgcacatcacagccctgctgaatgtctcccgacggacctccgaggcctgcgcgacccacctacactacaaatggatccctgtggaagacagccacacggctgacattagctcccactttcaagaagcaatagacttcattgactgtgtcagggaaaagggaggcaaggtcctggtccactgtgaggctgggatctcccgttcacccaccatctgcatggcttaccttatgaagaccaagcagttccgcctgaaggaggccttcgattacatcaagcagaggaggagcatggtctcgcccaactttggcttcatgggccagctcctgcagtacgaatctgagatcctgccctccacgcccaacccccagcctccctcctgccaaggggaggcagcaggctcttcactgataggccatttgcagacactgagccctgacatgcagggtgcctactgcacattccctgcctcggtgctggcaccggtgcctacccactcaacagtctcagagctcagcagaagccctgtggcaacggccacatcctgctaaaactgggatggaggaatcggcccagccccaagagcaactgtgatttttgtttttaagactcatggacatttcatacctgtgcaatactgaagacctcattctgtcatgctgccccagtgagatagtgagtggtcaccaggcttgcaaatgaacttcagacggacctcagggtaggttctcgggactgaaggaaggccaagccattacgggagcacagcatgtgctgactactgtacttccagacccctgccctcttgggactgcccagtccttgcacctcagagttcgccttttcatttcaagcataaggcaataaatacctgcagcaacgtgggagaaagaagttgctggaccaggagaaaaggcagttatgaagccaattcattttgaaggaagcacaatttccaccttattttttgaactttggcagtttcaatgtctgtctctgttgcttcggggcataagctgatcaccgtctagttgggaaagtaaccctacagggtttgtagggacatgatcagcatcctgatttgaaccctgaaatgttgtgtagacaccctcttgggtccaatgaggtagttggttgaagtagcaagatgttggcttttctggattttttttgccatgggttcttcactgaccttggactttggcatgattcttagtcatacttgaacttgtctcattccacctcttctcagagcaactcttcctttgggaaaagagttcttcagatcatagaccaaaaaagtcataccttcgaggtggtagcagtagattccaggaggagaagggtacttgctaggtatcctgggtcagtggcggtgcaaactggtttcctcagctgcctgtccttctgtgtgcttatgtctcttgtgacaattgttttcctccctgcccctggaggttgtcttcaagctgtggacttctgggatttgcagattttgcaacgtggtactactttttttttctttttgtctgttagttatttctccaggggaaaaggcaataattttctaagacccgtgtgaatgtgaagaaaagcagtatgttactggttgttgttgttgttcttgttttttatagtgtaaaataaaaatagtaaaaggagaaaagcaaaaaaaaaaaaaaaaaa

SEQ ID NO: 2345 - DNA, 4491 bp, Homo Sapiens
  NM_004420
ccgaggcgagcgcgagcgaggtccagcaccatgtgctaggtcactcccagcgcgaggccacacctgggccgtcggagcagcccctcctcacttcaggggtcaccctccccagcacccattgccccaccatggctggggaccggctcccgaggaaggtgatggatgccaagaagctggccagcctgctgcggggcgggcctggggggccgctggtcatcgacagccgctccttcgtggagtacaacagctggcatgtgctcagctccgtcaacatctgctgctccaagctggtgaagcggcggctgcagcagggcaaggtgaccattgcggagctcatccagccggctgcacgcagccaggtggaggctacggagccacaggacgtggtggtctatgaccagagcacgcgggacgccagcgtgctggccgcagacagcttcctctccatcctgctgagcaagctggacggctgcttcgacagcgtggccatcctcactgggggcttcgccaccttctcctcctgcttccccggcctctgcgagggcaagcctgctgccctgctacccatgagcctctcccagccctgcctgcctgtgcccagcgtgggcctgacccgcatcctgcctcacctctacctgggctcgcagaaggacgtcctaaacaaggatctgatgacgcaaaatggaataagctacgtcctcaacgccagcaactcctgccccaagcctgacttcatctgcgagagccgcttcatgcgggtccccatcaacgacaactactgtgaaaaactgctgccctggctggacaagtccatcgagttcatcgataaagccaagctctccagctgccaagtcatcgtccactgtctggctggcatctcccgctctgccaccatcgccatcgcctacatcatgaagaccatgggcatgtcctccgacgacgcctacaggttcgtgaaggacaggcgcccgtccatctcgcccaacttcaacttcctgggccagctgctggagtacgagcgcagcctgaagctgctggccgccctgcagggcgacccgggcaccccctcagggacgccggagcctccgcccagtcctgccgccggggccccgctgccacggctgccaccacctacctcagagagcgctgccacagggaatgcggctgccagggagggcggcctgagcgcgggcggggagccccccgcgccccccacgcccccggcgaccagcgcactgcagcagggcctgcgcggcctgcacctctcctcggaccgcctgcaggacactaaccgcctcaagcgctccttctccctggacatcaagtctgcctacgcccctagcaggcggcccgacggccccgggccccccgaccccggcgaggccccgaagctctgcaagctggacagcccgtcgggggccgcgctgggcctgtcctcgcccagcccggacagcccggacgccgcgcctgaggcgcgcccacggccccgccggcggccccggccccccgccggctcccccgcgcgctcccccgcgcacagcctcggcctgaacttcggcgatgcggcccggcagactccgcggcacggcctctcggccctgtcggcgcccgggctgcccggccctggccagccggccggccccggggcctgggcaccgccgctcgactccccaggcacgccgtcgcccgacgggccctggtgcttcagccccgagggcgcacagggggcgggcggggtgctgtttgcgcccttcggccgggcgggcgccccgggaccaggcggcggcagcgacctgcggcggcgggaggcagcgagggctgagccccgggacgcgcggaccggctggcccgaggagccggccccggagacgcagttcaagcgccgcagctgccagatggagttcgaggagggcatggtggaggggcgcgcgcgcggcgaggagctggccgccctgggcaagcaggcgagcttctcgggcagcgtggaggtcatcgaggtgtcctgacccctccgctgccctcggccccgccgcccgcagccaggcccgttataaatgtatattatatataatgcaaagaaaggtaaatggttttactgggatttttatcgagaagtaaatatttcgattttttatttatttaagctgttcattctggcaatgatttggcaacagtgcgggtggtcctcgagctctatttttactgtctggtatttaaactgaaacatacgtttctaagcaatacgaggccaccttcagtcgcaagctgggtgccaggcctggggcccctcccagttcccccgccccaggaaacactgctgacctttgcaaaggctgccgagctttcgtgcactttttacataacaaaaaggtgaaaaaaaggaaaaaaaaacttctttgccacaaactgagccgcagaaccccccttctccccccacccacctcccctgctccctcccttctctgcgccggcctagggctctgcaccaaagccataggatggaggagcaggagctggtgtgccccggagaggtgcggccagccctccatcagctccaggcaccaaatcttggtggcaaggagggcaccccgctgcccgttgccccagagctgttctctggcaggggaggacaggcattgggcttcatggtgccagggtgttcagaggggctgagaaatagaacagtgtgtgtaggggcttcgggcagggggttctggaacgtcagatgaggtgcagcccaggggaggacagaggtgttagtgcccccaactcctgccagagccccagtccagccacagagtggctcagaaaggccattcctagagggctgcggccctcccttctcccttgcccatgcccccagagctgcctgccgggcagggtggcaccattgcaggagaggagcttggcctccgggggtcaggcaggaggcgcctggctagccagtgctggctccactgggcaggaagccctggacccccaggtatgaggagggggtggtcttagggttctgttccaggtctgccccgcccccctcccagccatgccccaggcagaacttggaattcaggtgtgcacctgcaggctgaggggctctgtgagcaggtgctgctcacacagggagttcaggcgccagccaagcccctgtgctgctgggataggcctgcttcacttagggagcactgcctcaagacaggtaaagccccctcgtttgcccccacccccatggggccgctcaggagagaaactcccattcacccctttcccagggtgctctctctctaggtggcatgccagcccccaaacacaagtggcttttgggcccaggtgggtcagcctgctgcccctgccccataccccctcgggccattgggacccctgcccttcagatgtcctagggtctaggagtggggccagtcactgtgggaagaggccaggggcttggccggagaggcagcccagggcaggacccagtcctgagtcctggagcagggccagggaggcgcccatcccgccccagccagccgccctctctgctgtttcttctatttgttcttcttttcacccacagctctgtgttcctgtcatccctcctttcagcaaaagtcctgttcccgttccctctgtccccacccactcctgttcccccaagaaaataagctatcgttgtatttgcaatctatggattagaggtttaagtatttattattattggttaattattattaattatgtaaatttgcctcccatatgtctgttgcgttgggtttctgaggagaccctgggtgaggaggatgcactggcttcccgcttctcgccccccacccctgtgctgtccgggagacagtggtctggggccactggttgggcccccttctcccttcccccttccccttgtcccttctgcaggccgttgaggggggctgtctgtctcagtctgtctctgctcccactcttgaggcactggttaccgcaaagtgagcagccagcaggggggcgaaggtcctgtgttggccactgcctcctccagtgctgcaggaggcgggctgaggccccacctggtggctttcacctgacccagccctgagtcctctccaagcctctctccggcccctcccacctggccactgcctcctccagtgctgcgggaggcgggccagggccccacctggtggctttcacctgacccagccctgagtcctctccaagcctctctccggcccctcccacctggccactgcctggcattgggatcgccccaaaatggacccggcccctcctgttatttgctgggaagtccagcggaggagagggtgcaggtcccccgctgagcctccagtctctgtagactgggctgccggcccttcagccccccttggagcccctcccgccacagccgcaccttctgctcccggcccctccctttgtatttggagacaatgtgttgtaataaagcttaaagtggatgttttcaaaaaaaaaaaaaaaaaa

SEQ ID NO: 2346 - DNA, 3046 bp, Homo Sapiens
  NM_004422
agtcacgtgacatgaggagaggtgggcgggtacctggaggaagctcgcggcgtcggtggcggtggcgcgcggcggccgctgagaccggggctttgagtcgcaccccgcggcccgccccccgccgccaccctcgcagatccgtgctttttcccctttgcttctctcccgtactgggtcagtcctgtccgcgctcgcgcgtcggtttgcgggtgtgcgcaggcgcggcaggggccattagccctttgggtgggcggtggagcccgggagcgcgcgggcgagaccatggcgggtagcagcactgggggcggtggggttggggagacgaaggtgatttaccacctggatgaggaagagactccctacctggtgaagatccctgtccccgccgagcgcatcaccctcggcgatttcaagagcgtcctgcagcggcccgcgggcgccaagtactttttcaagtctatggatcaggatttcggggtggtgaaggaagaaatttcagatgacaacgcccgcctcccctgcttcaacggaagggtggtatcctggctggtgtcctcagataatccccaacccgagatggcccctccagtccatgagcctcgggcagaactggcgcctccagccccacctttacctcctttgccacccgagaggaccagcggcattggggactcaaggcctccatccttccaccctaatgtgtccagcagccatgagaatctggagcctgagacagaaaccgagtcagtagtgtcactgaggcgggagcggcctcgcaggagagacagcagtgagcatggcgctgggggccacaggactggtggcccctcaaggctggagcgccacctggccggatacgagagctcctctaccctcatgaccagcgagctggagagtaccagcctgggggactcggacgaggaggacaccatgagcaggttcagcagctccacggagcagagcagtgcctcccgcctccttaagcgccaccggcggcgaaggaagcagaggccaccccgcctggagaggacgtcatccttcagcagcgtcacagattccacaatgtctctcaatatcatcacagtcacgctaaacatggagaagtacaacttcctgggtatctccattgttggccagagcaatgagcggggagacggaggcatctacattggctccatcatgaagggtggggctgtggcggccgacgggcgcattgagccaggggacatgcttttgcaggtgaatgacatgaactttgagaacatgagcaacgatgacgctgtgcgggtgctgagggacattgtgcacaagcctggccccattgtgctgactgtggccaagtgctgggatccctctcctcaggcctatttcactctcccccgaaatgagcccatccagccaattgaccctgctgcctgggtgtcccattccgcggctctgactggcaccttcccagcctatccaggttcctcctccatgagcaccattacatctggatcgtctttgcctgatggctgtgaaggccggggtctctccgtccatacggacatggcatcggtgaccaaggccatggcagctccagagtctggactggaagtccgggaccgcatgtggctcaagatcaccatccctaatgcctttctgggctcggatgtggttgactggctctaccatcacgtggagggctttcctgagcggcgggaggcccgcaagtatgccagcgggctgctcaaagcaggcctgatccgacacaccgtcaacaagatcaccttctctgagcagtgctattacgtcttcggagacctcagtggtggctgtgagagctacctagtcaacctgtctctcaatgacaacgatggctccagtggggcttcagaccaggataccctggctcctctgcctggggccaccccctggcccctgctgcccactttctcctaccaataccctgccccacacccctacagcccgcagcctccaccctaccatgagctttcatcttacacctatggtgggggcagtgccagcagccagcatagtgagggcagccggagcagtgggtcgacacggagtgatgggggggcagggcgcacggggaggcccgaggagcgggcccccgagtccaagtccggcagtggcagtgagtctgagccctccagccgagggggcagccttcggcggggtggggaagcaagtgggactagcgatgggggccctcctccatccagaggctcaactgggggtgcccctaatctccgagcccacccagggctccatccctatggaccgccccctggcatggccctcccctacaaccccatgatggtggtcatgatgcccccacctccacctccagtccctccagcagtgcagcctccgggggcccctccagtcagagacctgggctctgtgcccccagaactgacagccagccgccaaagcttccacatggccatgggcaatcccagcgagttctttgtggatgttatgtagcccactgtggggccaggctgggccgggcgctcctggtgtgtgactgggtgtcctggccgtcatgtgcttgctcttacagtgcctgggctcagcctaccagctgctgccatacaggagattgtggccactgtgactctcaccagcagtgcctggttcctcccccttccctcaggggtagacaagggacctttgattatttttagctttgtttttttataagcctttttgggggttaaaatagagtttcttacatttttgggacttttttaataggcatttcctcttttatatgaagaattcccatccattgggccccttctaaccccagaatgtgacctcctcctccagttacccacagccctgccctttgcagggttgggggtggtcagcggtaccccggggttaggcatcctagacagcagcctgaggaagctgggagatttgggccatgtagctgcctttgttactctatttattttagtcacttgtataaaacaccaaataaagcaatagaggcaaactcaaaaaaaaaaaaaaaaaaaaaaaaaaaaaa

SEQ ID NO: 2347 - DNA, 2573 bp, Homo Sapiens
  NM_004424
atgacgacatggtcgtaaatccgccatcttcctgcggcgcgttgcgacatggagggcgcgatggcagtgcgggtgacggccgctcatacggcagaagcccaggccgaagccgggcgggaagcgggcgagggtgcagttgcggcggtggcggcggccttggcccccagcggcttcctcggcctcccggcgcccttcagcgaggaagatgaggacgatgtgcacagatgcggccgctgccaggcagagttcaccgccttggaggattttgttcagcacaagattcagaaggcctgccagcgggcccctccggaggccctgcctgccacccctgccaccacagcgttgctgggccaggaggtggtgccggcagcaccaggcccagaggagcccatcactgtggcccacatcgtggtggaggcggcctctctggcagcagacatcagccacgcatctgaccttgttggtggtgggcacatcaaagaggtcatcgtggctgctgaggcggagctgggagacggtgagatggccgaggccccgggcagcccccgccagcaggggctggggctcgcaggggagggtgagcaggcccaggtgaagctactggtgaacaaggatggccgctatgtgtgtgcgctgtgccacaagaccttcaagacgggcagcatcctcaaggcccacatggtcactcacagcagccgcaaggaccacgagtgcaagctctgtggggcctccttccgcaccaagggctcactcatccggcaccaccggcggcacacggatgagcgcccctacaagtgctccaagtgtggaaagagcttccgggagtcgggtgcactgacccggcacctcaagtctctcaccccctgcacagagaaaatccgcttcagtgtgagcaaggacgtggttgtcagcaaagaggacgcacgtgcaggttctggagctggagctgccggcttggggacagccacatcatcggtgacaggcgagcctatagagacttcacccgtgattcacctggtgacagatgccaagggcaccgtcatccacgaagtccacgtccagatgcaggagctgtccctgggcatgaaagccctggccccagagccccccgtctcccaggagctcccctgctccagcgagggcagccgtgagaacctgctgcaccaggccatgcagaactccggcatcgtccttgagcgcgctgctggggaggagggtgccctggagccagctcctgctgccgggtccagtccccagcccctggcagtggcagccccgcagctgccggtactggaagtgcagccgctggagacacaggtggccagcgaggcctcagcggtgcccaggacccacccatgtcctcagtgcagtgagaccttcccgacagcagccaccctggaggcccacaagaggggccacaccgggccgaggccgttcgcctgcgcgcagtgtggcaaggccttccccaaggcctacctgctcaagaagcaccaggaggtgcacgtgcgtgagcgccgcttccgctgtggcgactgcgggaagctctacaagaccattgcccatgtgcgtggccaccggcgcgtccactcagacgagcggccctacccttgtcccaagtgtggcaagcgctacaagactaagaacgcacagcaggtgcacttcaggacacacctggaggagaagccgcacgtgtgccagttctgcagccgtggcttccgagagaagggctcactggtgcggcacgtgcgacaccacacaggcgagaagccgttcaagtgctacaagtgcggccgtggcttcgccgagcacggcacgctgaaccggcacctgcgcaccaaagggggctgcctgctggaggtggaggagttgctggtgtctgaggacagccccgcggcagccaccaccgtcctcacggaagacccgcacacagtgttggtggagttctcgtccgtggtagctgacacccaggagtatatcatcgaggccactgcggacgatgcggagaccagtgaggccacggagatcatcgagggcacccagacagaggtggacagccacatcatgaaggtggtgcagcagatcgtgcaccaggctagcgccggccaccagatcatcgtgcagaacgtcaccatggacgaggagacggcgctgggcccagaggcggctgccgccgacaccatcaccatcgccacccccgagagcctgacagagcaggtggccatgacgctggcctcggccatcagcgagggcactgtgcttgccgcccgggcagggacaagtggcactgaacaggccactgtgaccatggtgtcatcagaggacatcgagatcctggagcatgcaggcgagctggtcatcgcctcgccggagggccagctggaggtgcagacggtcatcgtctagcatgaggtctgcggggtcctggccgggcagggacagggcagaggactctgagcgccccacccatgcctgcctggcctggtagagaagatggcacaggatggaggcgccccaagacggacagtgtacataagagtttcttgttgctttacaataaaacatgagaacctgca

SEQ ID NO: 2348 - DNA, 5206 bp, Homo Sapiens
  NM_004426
cccgccgcggaggccgagcgagcccccagcccagcctggcgactggggaccccggcacatgaggtggacgcccccggggaagacttgggtgcacagccaggcgagaaggtcttgagtcagacagagcaccagccttggggaccctggaccactatcatggagactgagagcgagcagaactccaattccaccaatgggagttctagctcagggggcagctctcggccccagatagctcaaatgtcactttatgaacgacaagcagtgcaggctctgcaagcactgcagcggcagcccaatgcagctcagtatttccaccagttcatgctccagcagcagctcagtaatgcccagctgcatagcctggctgccgtccagcaggccacaattgctgccagtcggcaggccagctccccaaacaccagcactacacagcagcagactaccaccacccaggcctcgatcaatctggccaccacatcggccgcccagctcatcagccgatcccagagtgtgagctctcccagtgctaccaccttgacccaatctgtgctactggggaacaccacctccccacccctcaaccagtctcaggcccagatgtatctacggccacagctgggaaacctattgcaggtaaaccgaaccctgggtcggaatgtgcctctagcctcccaactcatcctgatgcctaatggggcggtggctgcagtccagcaggaggtgccatctgctcagtctcctggagttcatgcagatgcagatcaggttcagaacttggcagtaaggaatcaacaggcctcagctcaaggacctcagatgcaaggctccactcagaaggccattcctccaggagcctcccctgtctctagcctctcccaggcctctagccaggccctagcggtggcacaggcttcctctggggccacaaaccagtccctcaaccttagtcaagctggtggaggcagtgggaatagcatcccagggtccatgggtccaggtggaggtgggcaggcacatggtggtttgggtcagttgccttcctcaggaatgggtggtgggagctgtcccagaaagggtacaggagtggtgcagcccttgcctgcagcccaaacagtgactgtgagccagggcagccagacagaggcagaaagtgcagcagccaagaaggcagaagcagatgggagtggccagcagaatgtgggcatgaacctgacacggacagccacacctgcgcccagccagacacttattagctcagccacctacacacagatccagccccattcactgattcagcaacagcaacagatccacctccagcagaaacaggtggtgatccagcagcagattgccatccaccaccagcagcagttccagcaccggcagtcccagctccttcacacagctacacacctccagttggcgcagcagcagcagcagcaacaacagcaacagcagcaacagcagcagccgcaagccaccaccctcactgcccctcagccaccacaggtcccacctactcagcaggtcccaccttcccagtcccagcagcaagcccaaaccctggtcgttcagcccatgcttcagtcttcacccttgtctcttccacctgatgcagcccctaagccaccaattcccatccaatccaaaccacctgtagcacctatcaagccgcctcagttaggggccgctaagatgtcagctgcccagcaaccaccaccccatatccctgtgcaagttgtaggcactcgacagccaggtacagcccaggcacaggctttggggttggcacagctggcagctgctgtacctacttcccgggggatgccaggtacagtgcagtctggtcaggcccatttggcctcctcgccaccttcatcccaggctcctggtgcactgcaggagtgccctcccacattggcccctgggatgacccttgctcctgtgcaggggacagcacatgtggtaaagggtggggctaccacctcctcacctgttgtagcccaggtccctgctgccttctatatgcagtctgtgcacttgccgggtaaaccccagacattggctgtcaaacgcaaggctgactctgaggaggagagagatgatgtctccacattgggttcaatgcttcctgccaaggcatctccagtagcagaaagcccaaaagtcatggacgagaagagcagtcttggagaaaaagctgaatcagtggctaatgtgaatgctaatactccaagcagtgaactagtagccttgacccccgccccttcagtaccgcctcctacactagccatggtgtctagacaaatgggtgactcaaaacccccacaggccatcgtgaagccccagattctcacccacatcattgaaggctttgttatccaggaaggagcagaacctttcccggtgggttgttctcagttactgaaggagtctgagaagccactacagactggccttccgacagggctgactgagaatcagtcaggtggccctttgggagtggacagcccatctgctgagttagataagaaggcgaatctcctgaagtgcgagtactgtgggaagtacgcccccgcagagcagtttcgtggctctaagaggttctgctccatgacttgcgctaagaggtacaatgtgagctgtagccatcagttccggctgaagaggaaaaaaatgaaagagtttcaagaagccaactatgctcgcgttcgcaggcgtggaccccgccgcagctcctctgacattgcccgtgccaagattcagggcaagtgccaccggggtcaagaagactctagccggggttcagataattccagttatgatgaagcactctctccaacatctcctgggcctttatcagtaagagctgggcatggagaacgtgacctggggaatcccaatacagctccacctacaccggaattacatggcatcaaccctgtgttcctgtccagtaatcccagccgttggagtgtagaggaggtgtacgagtttattgcttctctccaaggctgccaagagattgcagaggaatttcgctcacaggagattgatggacaggcccttttattacttaaagaagaacatcttatgagtgccatgaacatcaagctgggccctgccctcaagatctgcgccaagataaatgtcctcaaggagacctaaggtggccctcttgcacaaaccagcctaaggcagacactctccactgtccaggttataacctggtaccagcagactttgcagggaagaaagagttgttccaatcatgtaaccttctgtaggggattactgagacagggaagagaagtgcaagaattggttgctggtgctacatggcggcagctttgacattttctctgggttctactttattttttaaaatctttacagttctcaccatttcacgtaccttaatccaatctttataaaagaggcagtctagagaactaggactgctcagccttatcctggagtggagcatttagcccaggtcttaattctccaagaggaggaatacatagtatggtaaggcaaggaactgggtggaatgtcaggttgcctgcccaatgggagaggtagggtttttctagcttgtgtgacagaagtagcaaaatctggtcctcccccctcccagtgtagctgtggctcagagttttttctttttgttgtcacttactcccttgtgattgaattttttctcctgcatccatggcaggatccccagccagtatagagacttggttggcatcttctgctgcagggactaaaagtatttgactggggcacatgtggctgttgtcattctttctgcatcccactgttcccctccaatttatgttattttctaccctgtttttcagttccatctctgctctgtcctatagctttataaaaccagagtgtgtggggctgaggtcaggagtataagtacctgccttaggcactattccttatataacaaaaatattaaatatttttttcctcagtaaaaggatgaaaattggtttcagttgtcttactctattccagtctttgcccactttcacacaaatgacaaggccaatatgttttgtttgttttttaatcattaagagtttttgtacaaaaggtgatggttttttttcttcattttaaaacaccagggtgtgggggagggatgcaaacaaataacaaaaaagatgcttttgtaacattattttccctgtttagaaagaaaaaaatcactccaatagtattgaaaagtccaaagatgaaatagtttcattttcttttcctaaggcttataaaaggccccctgcctgttgattccatccctcttttgtgtccagtggagccatgttactcttcagtggcccaggggttcactattaaagaaagatcagtccaggtttctgggcacatggcctaaacaggaagatggaagcatcagaggattaaaaacctttccccacagaaatgtgggcaagaagacacttccctgagccagcagaagggacaggtgcagcagcattccacacccagcgcagaggacagcagagccctcgatgtcccacttctgcttccgttccctttctagaagattgaaaaaaaggtcaaaaccacatgcctgtggagaaagtgcgacatgtttagaaatactggtagggaaccaggagtaagaaaagctttaccagcttttactacaaatggatgaaagacatcaggatcccaccaccgcaaggtaaagtgacttcccttttctggaacccctgtggcacaggagtaccaattttcctttccaacgaactggatttctggataggcattttggctgtatgtggacagataagaccacagtccttagcccaatcccagctatacagtcaccccaatttccacaaatgatgtgatggtaccgtataatcctgtaattgggaaatttcacatttttcctgtcctaatctcagaggtgggagaagcaagtctagaacatctccaggctcagactaaacgagagtacttggactgcaaccaagtaatcactgcaaagtagttccaagcagcaagaaataccagattctcatggaggctactatagggtacagaataacaacatgaaagcaatcaaccctgtataaataatgtttcttggcattttttttttaattaaagaaatccagtgtctcaaaaaaaaaaaaaaaaaaaaaaaaaaaaaaaa

SEQ ID NO: 2349 - DNA, 2566 bp, Homo Sapiens
  NM_004427
cattgtctccgcggcggctgcagccctcgagcgcccgccgcgcgcgcgcgcgcaaccccggccgccgcccgcgctcccgccccggcctcgcgcccccgtcccggcctcgcgccccggccgccctttgttgacgccggccaggccggtgcggtcggatgcgccgcggcagccccgggccccggctcggaggctcccggcggagaggaggcggcccgcccgggcccgggaccccgcgcgagtcggcgcccggccgaggggctgcgtaggccccgcccggccaggcccagccgggccctggacagagacagggcagggcattgttcatgcactgaccgacctcagcagccccggcatgacctcagggaacggaaactctgcctccagcatcgccggcactgccccccagaatggtgagaataaaccaccacaggccattgtgaaaccccaaatcctgacgcatgttatcgaagggtttgtgatccaggagggggcggagcctttcccggtgggacgctcgtccctgctggtggggaatctcaagaagaagtatgcacaggggttcctgcctgagaaacttccacagcaggatcacaccaccaccactgactcggagatggaggagccctatctgcaagaatccaaagaggagggtgctcccctcaaactcaagtgtgagctctgtggccgggtggactttgcctataagttcaagcgttccaagcgcttctgttccatggcttgtgcaaagaggtacaacgtgggatgcaccaaacgggtgggacttttccactcagaccggagcaagctgcagaaggcaggagctgcgacccacaaccgccgtcgggccagcaaagccagtctgccaccacttaccaaggataccaagaagcagccaacaggcactgtgcccctttcggttactgctgctttgcagctaacacacagccaggaagactccagccgttgctcagataactcaagctatgaggaacccttgtcacccatctcagccagctcatctacttcccgccggcgacaaggccagcgggacctggagctccccgacatgcatatgcgggacctggtgggcatgggacaccacttcctgccaagtgagcccaccaagtggaatgtagaagacgtctacgaattcatccgctctctgccaggctgccaggagatagcagaggaattccgtgcccaggaaatcgacgggcaagccctgctgctgctcaaggaggaccacctgatgagcgccatgaacatcaagctggggcccgccctgaagatctacgcccgcatcagcatgctcaaggactcctagggctggtggcagccaggattctggcccagggcgcctcctcccgactgagcagagccagacagacattcctgaggggcccagaaatggggccggttggagggcaggggctctccctaggggcatagctggtgaggaggtctgggcacctcctccatggctctcaggggcctttcatttctgtgggaggggcagagaggtaggtggcacagaagatggggctttatgcttgtaaatattgatagcactggcttcctccaaagtcccaatactctagccccgctctcttcccctctttctgtcccccattttccagggggtatatggtcagggctccccaacctgagttgggttacttcaagggcagccagcaggcctggatggaggcctagaaagcccttgccttccttcctcccacttctttctccaggcctggttaactcttccgttgtcagcttctcccccttcagcctgtttctgcagcagccagggttctcccccctacaccctctgcaggtggagagagagaagctgggcccagccgggccgtgcctgctggcacagacgccttaacgctgtgtgtatgactgtgtgactgtgtgggagcctggactgacagataggccaagggctactctctggcatctccaggtgttttgtagcaaacagccacttagtgctttgtcctggactccactcagcctcaggatggggaatagccaagaatggcagcctcagcgcagaggcaaggtcagaaagagacggcgcttcagagtttcctttccagacacccctccccgcactgtgaagttcccctgaccgccctcctggttcacaaagagcattaagaaagctgcggtggtctgagcaacatagcccaaagggctgagcctcctggcctgcctgcccgcccaccctgggagtcccagtggtgaggctcagagaactgctaaggggaaagaacagctggagtttctgttgatgtgaagaaggcagctcttggcctcccactcccacacttctttgcctataaatcttcctagcagcaatttgagctacctgaggaggaggcagggcagaaagggcgagggcctgcctctgacctgccgtgtcctttgcaggaaggaggtaggcacctttctgagcttattctattccccacccacacccccaggcagggttggaaatgaaggacttttttaacctttgttttgttttttaaaaataaatctgtaaaatctgtct

SEQ ID NO: 2350 - DNA, 1145 bp, Homo Sapiens
  NM_004435
acacccggttgggctctgctgctcccttctgggttccgaggcccaagcccttggcagtgtttgtgagtggaagggaggtcacgctatcgtccgcggccccagcagccctgtgccctcgttggatcccgcgacgcggctcctttaagagcctcgcgggtcgcccgccgctaggtcgctccccggccatgcgggcgctgcgggccggcctgaccctggcgtcgggcgcggggctgggtgcggtcgtcgagggctggcggcggcggcgggaggacgcgcgggcggcgccgggactgctgggccggctgcccgtgctgcccgtggcggcggcagccgagttgccccctgtgcccgggggaccccgcggcccgggcgagctggccaagtacgggctgccggggctggcgcagctcaagagccgcgagtcgtacgtgctgtgctacgacccgcgcacccgcggcgcgctctgggtggtggagcagctgcgacccgagcgtctccgcggcgacggcgaccggcgcgagtgcgacttccgcgaggacgactcggtgcacgcgtaccaccgtgccaccaacgccgactaccgcggcagtggcttcgaccgcggtcacctggccgccgccgccaaccaccgctggagccagaaggccatggacgacacgttctacctgagcaacgtcgcgccccaggtgccccacctcaaccagaatgcctggaacaacctggagaaatatagccgcagcttgacccgcagctaccaaaacgtctatgtctgcacagggccactcttcctgcccaggacagaggctgatgggaaatcctacgtaaagtaccaggtcatcggcaagaaccacgtggcagtgcccacacacttcttcaaggtgctgatcctggaggcagcaggtgggcaaattgagctccgcacctacgtgatgcccaacgcacctgtggatgaggccatcccactggagcgcttcctggtgcccatcgagagcattgagcgggcttcggggctgctctttgtgccaaacatcctggcgcgggcaggcagcctcaaggccatcacggcgggcagtaagtgagggtggagcccagtgagactgtgggtgtgtgcaggccggggagtattaaaggtggtgatttttgga

SEQ ID NO: 2351 - DNA, 6364 bp, Homo Sapiens
  NM_004438
ctgggatagaagcggcaggagcagcgttggcaccggcgaaccatggctgggattttctatttcgccctattttcgtgtctcttcgggatttgcgacgctgtcacaggttccagggtataccccgcgaatgaagttaccttattggattccagatctgttcagggagaacttgggtggatagcaagccctctggaaggagggtgggaggaagtgagtatcatggatgaaaaaaatacaccaatccgaacctaccaagtgtgcaatgtgatggaacccagccagaataactggctacgaactgattggatcacccgagaaggggctcagagggtgtatattgagattaaattcaccttgagggactgcaatagtcttccgggcgtcatggggacttgcaaggagacgtttaacctgtactactatgaatcagacaacgacaaagagcgtttcatcagagagaaccagtttgtcaaaattgacaccattgctgctgatgagagcttcacccaagtggacattggtgacagaatcatgaagctgaacaccgagatccgggatgtagggccattaagcaaaaaggggttttacctggcttttcaggatgtgggggcctgcatcgccctggtatcagtccgtgtgttctataaaaagtgtccactcacagtccgcaatctggcccagtttcctgacaccatcacaggggctgatacgtcttccctggtggaagttcgaggctcctgtgtcaacaactcagaagagaaagatgtgccaaaaatgtactgtggggcagatggtgaatggctggtacccattggcaactgcctatgcaacgctgggcatgaggagcggagcggagaatgccaagcttgcaaaattggatattacaaggctctctccacggatgccacctgtgccaagtgcccaccccacagctactctgtctgggaaggagccacctcgtgcacctgtgaccgaggctttttcagagctgacaacgatgctgcctctatgccctgcacccgtccaccatctgctcccctgaacttgatttcaaatgtcaacgagacatctgtgaacttggaatggagtagccctcagaatacaggtggccgccaggacatttcctataatgtggtatgcaagaaatgtggagctggtgaccccagcaagtgccgaccctgtggaagtggggtccactacaccccacagcagaatggcttgaagaccaccaaagtctccatcactgacctcctagctcataccaattacacctttgaaatctgggctgtgaatggagtgtccaaatataaccctaacccagaccaatcagtttctgtcactgtgaccaccaaccaagcagcaccatcatccattgctttggtccaggctaaagaagtcacaagatacagtgtggcactggcttggctggaaccagatcggcccaatggggtaatcctggaatatgaagtcaagtattatgagaaggatcagaatgagcgaagctatcgtatagttcggacagctgccaggaacacagatatcaaaggcctgaaccctctcacttcctatgttttccacgtgcgagccaggacagcagctggctatggagacttcagtgagcccttggaggttacaaccaacacagtgccttcccggatcattggagatggggctaactccacagtccttctggtctctgtctcgggcagtgtggtgctggtggtaattctcattgcagcttttgtcatcagccggagacggagtaaatacagtaaagccaaacaagaagcggatgaagagaaacatttgaatcaaggtgtaagaacatatgtggacccctttacgtacgaagatcccaaccaagcagtgcgagagtttgccaaagaaattgacgcatcctgcattaagattgaaaaagttataggagttggtgaatttggtgaggtatgcagtgggcgtctcaaagtgcctggcaagagagagatctgtgtggctatcaagactctgaaagctggttatacagacaaacagaggagagacttcctgagtgaggccagcatcatgggacagtttgaccatccgaacatcattcacttggaaggcgtggtcactaaatgtaaaccagtaatgatcataacagagtacatggagaatggctccttggatgcattcctcaggaaaaatgatggcagatttacagtcattcagctggtgggcatgcttcgtggcattgggtctgggatgaagtatttatctgatatgagctatgtgcatcgtgatctggccgcacggaacatcctggtgaacagcaacttggtctgcaaagtgtctgattttggcatgtcccgagtgcttgaggatgatccggaagcagcttacaccaccaggggtggcaagattcctatccggtggactgcgccagaagcaattgcctatcgtaaattcacatcagcaagtgatgtatggagctatggaatcgttatgtgggaagtgatgtcgtacggggagaggccctattgggatatgtccaatcaagatgtgattaaagccattgaggaaggctatcggttaccccctccaatggactgccccattgcgctccaccagctgatgctagactgctggcagaaggagaggagcgacaggcctaaatttgggcagattgtcaacatgttggacaaactcatccgcaaccccaacagcttgaagaggacagggacggagagctccagacctaacactgccttgttggatccaagctcccctgaattctctgctgtggtatcagtgggcgattggctccaggccattaaaatggaccggtataaggataacttcacagctgctggttataccacactagaggctgtggtgcacgtgaaccaggaggacctggcaagaattggtatcacagccatcacgcaccagaataagattttgagcagtgtccaggcaatgcgaacccaaatgcagcagatgcacggcagaatggttcccgtctgagccagtactgaataaactcaaaactcttgaaattagtttacctcatccatgcactttaattgaagaactgcactttttttacttcgtcttcgccctctgaaattaaagaaatgaaaaaaaaaaacaatatctgcagcgttgcttggtgcacagattgctgaaactgtggggcttacagaaatgactgccggtcatttgaatgagacctggaacaaatcgtttctcagaagtacttttctgttcatcaccagtctgtaaaatacatgtacctatagaaatagaacactgcctctgagttttgatgctgtatttgctgccagacactgagcttctgagacatccctgattctctctccatttggaattacaaccattgtattttgtttgtggcataaattacagtcatctgtctttcactggaatgaagaccatgcctaggaacattttttaaggactcagctgtggcttttagggcttggttcataccatgggggaaaaaaaagtcctaggagaaagcgacgtggctcattagtgttgcctcttcagtgctcaagccgcctggtggattcctatgacacagggggcctggaaagaaagggaaagtggatttaaaatatatatatacgtaacccaagccccataacccctaactggacaaatgaggtctgtttctttgggcctgaggctgtgccatataaagtcttattttgggactttacaaacttgtcctaactatcttgtggatagtgggctgtgacaatctggaatagagaacgttcacacttcgctcctttaaagaagcgaccccagatctgcaagggagtagattctgctatcttggcctcacagcccttcctgttgattacaaagcccgtggaagaaaacagaacacaccctcctcagttccgtctaaatgtgtttcttctgcttcaattacaccagttctggggcaaagacactgatgaaacaacacccatacctgaaaagaataaatgtgtgactttcaaatcccctttcgcagtgaaagaaacagcaaacacttaagattcagcatctgttctccagttgcactgaggaatgcactgtctcgcagcaccagctctgcagagcccttgccccagactctttgcggttttatttatatgtatttccatatttcattcctgtgtgtcactgctgcattggtgtggcagcaagtgaccaaatgctacaggtcttactatggacaccaggtcaggtgcaaccacacaaaacaaagccagttccatgagctgcctatgatatgcattgcggaagtaacattttacccagggtgtgccattgcagtgatataaatatatttttttcttagactaaatatgagctgactatctcttttgatgtgtgtacataggtgtgagtgtgtgtgtatgcgtgcctgtctgtgtgcgggtgtgtgtatgtgcatagcctcatgcttaggactacccatgaatgttgtggaatgctacacctggagagttctggttttccaccagtttcaagatgaagaactacatgatacagtggacctggagaccatccccttggaaagacaacccagagatgttcagcatcctgtatctacacgcatcctgtatctacacgtgtattttgtagctgtcacactaaccttaataagaattctacagctttggacagaggcattttcaccttaatggtgaagtaatttaaaatataaatccattcaggtgacaacccatcatcaaaattacaaattttctgattgaactcatctgaatcatcagttccttgatggagagagagaaggagatggaatgtgtctggtaaccccaaatggagtacaagtagcctttgttttcctgcataaatggacttgttgaatgcgaacgaatatatgcaattcatatacttttggagatgaacgtagatatgtgtgtcagctttgagatggtgtgtcctggattaatactttgtctcccaatatcacagaaaaatacatgccagtgactcttgaggttaaggtagttgggatgaaatggcctcaggcaatttcacattccctaattacctggaaagttctacagtaattaatatgcagctaactcctgttgccctcacaagagcatcagccttctagaatcggagctccggagtgtgaagattcagtattgatatgatatgtataccaaactccagccaacttactgccatttttcataatctgagtggctgccttgcttatcctaagctgtggttgcagaaaccgtggccatttatataagctataacatcaaatcagggaaaaatgaggaaaaaaaatagattctgaaccatttattgttgaataagtagagaaaatcatcaataaatatttattacattctgacagggtgtgtggcattgtgttctatgccagagtgacaaagttgattcacccctttttggggaccttaatatattttttaagggatgtgcctatgcattgatgcctgaaaaatatgtataaagaaatgaggttgactcttctgagcagttcatcttttccagaggtaagggtaggaggccaacttcagggtctgggtctgagcccgtgggcaagccctggccgagtgagctccaatgctaactcatgtgccgatctctagagcagtgggaaactaccccgctgcaccaaatcaagtagcttcaccttgtgtatgcaggccccaagttattttttagcaatcttacgagtgaaatgttctggtgggttgaaaaacgttcttattttaaagaaaggttgtgctcgctacactgctggtgtgtgcattctgagacctcttgtattcaatctgtgaaggatatgtgtattaatccgtacacccgtatagcctcaatatttgtctgaagacacttaaattctgacccataaaggaaagttctagaagcaatattttcacttatttaacattctccaaacaacatcaagcattgatacacactgaagagtgcgtttattttttgtatcactctaagtatgttggaatatgcaaggactgtggttcaaattagaatgtataaggcatattataatttagttcatactgaataagaaattaacagaacattgttcggttcacacgttccaaactttgagtgatttctggagttagacatagattttctattttgttttaatttgtcaaggtatttttcttcccttcatgaactttaggtacacataacttatgtcatttatttatggtcttttatacctagtttgtaaaattgtaaaatagcaaactaaatgcaaagagtttgcatttgaaaataataaagtagttgccgtatacaaccctgcaaaaaaaaaaaaaaaaaa

SEQ ID NO: 2352 - DNA, 4691 bp, Homo Sapiens
  NM_004441
gtcagtctggccggctccgtcctcccgtaggctccgctgtagctagcaatgtgacaccaggacgcactcgctctcgcgcgctctcccaggctcgttctccctcgccctctctctctcacacacgcacgcacacacccacctctcccataaacacacacacacacatgcacacccacacccacgcgcgcccgcaccgccccacgcgcacacactcctgcccacgcccacgcagcgctccgggaagtccggtccgggcgagagcgcgaaaggataccgagaagccacccgcggagagcgcagcggcgccctgggacgcggcgctctcccggcgctgctgcctcggcttggtctcggcctgcgggccgtcggccggcgatggccctggattatctactactgctcctcctggcatccgcagtggctgcgatggaagaaacgttaatggacaccagaacggctactgcagagctgggctggacggccaatcctgcgtccgggtgggaagaagtcagtggctacgatgaaaacctgaacaccatccgcacctaccaggtgtgcaatgtcttcgagcccaaccagaacaattggctgctcaccaccttcatcaaccggcggggggcccatcgcatctacacagagatgcgcttcactgtgagagactgcagcagcctccctaatgtcccaggatcctgcaaggagaccttcaacttgtattactatgagactgactctgtcattgccaccaagaagtcagccttctggtctgaggccccctacctcaaagtagacaccattgctgcagatgagagcttctcccaggtggactttgggggaaggctgatgaaggtaaacacagaagtcaggagctttgggcctcttactcggaatggtttttacctcgcttttcaggattatggagcctgtatgtctcttctttctgtccgtgtcttcttcaaaaagtgtcccagcattgtgcaaaattttgcagtgtttccagagactatgacaggggcagagagcacatctctggtgattgctcggggcacatgcatccccaacgcagaggaagtggacgtgcccatcaaactctactgcaacggggatggggaatggatggtgcctattgggcgatgcacctgcaagcctggctatgagcctgagaacagcgtggcatgcaaggcttgccctgcagggacattcaaggccagccaggaagctgaaggctgctcccactgcccctccaacagccgctcccctgcagaggcgtctcccatctgcacctgtcggaccggttattaccgagcggactttgaccctccagaagtggcatgcactagcgtcccatcaggtccccgcaatgttatctccatcgtcaatgagacgtccatcattctggagtggcaccctccaagggagacaggtgggcgggatgatgtgacctacaacatcatctgcaaaaagtgccgggcagaccgccggagctgctcccgctgtgacgacaatgtggagtttgtgcccaggcagctgggcctgacggagtgccgcgtctccatcagcagcctgtgggcccacaccccctacacctttgacatccaggccatcaatggagtctccagcaagagtcccttccccccacagcacgtctctgtcaacatcaccacaaaccaagccgccccctccaccgttcccatcatgcaccaagtcagtgccactatgaggagcatcaccttgtcatggccacagccggagcagcccaatggcatcatcctggactatgagatccggtactatgagaaggaacacaatgagttcaactcctccatggccaggagtcagaccaacacagcaaggattgatgggctgcggcctggcatggtatatgtggtacaggtgcgtgcccgcactgttgctggctacggcaagttcagtggcaagatgtgcttccagactctgactgacgatgattacaagtcagagctgagggagcagctgcccctgattgctggctcggcagcggccggggtcgtgttcgttgtgtccttggtggccatctctatcgtctgtagcaggaaacgggcttatagcaaagaggctgtgtacagcgataagctccagcattacagcacaggccgaggctccccagggatgaagatctacattgaccccttcacttacgaggatcccaacgaagctgtccgggagtttgccaaggagattgatgtatcttttgtgaaaattgaagaggtcatcggagcaggggagtttggagaagtgtacaaggggcgtttgaaactgccaggcaagagggaaatctacgtggccatcaagaccctgaaggcagggtactcggagaagcagcgtcgggactttctgagtgaggcgagcatcatgggccagttcgaccatcctaacatcattcgcctggagggtgtggtcaccaagagtcggcctgtcatgatcatcacagagttcatggagaatggtgcattggattctttcctcaggcaaaatgacgggcagttcaccgtgatccagcttgtgggtatgctcaggggcatcgctgctggcatgaagtacctggctgagatgaattatgtgcatcgggacctggctgctaggaacattctggtcaacagtaacctggtgtgcaaggtgtccgactttggcctctcccgctacctccaggatgacacctcagatcccacctacaccagctccttgggagggaagatccctgtgagatggacagctccagaggccatcgcctaccgcaagttcacttcagccagcgacgtttggagctatgggatcgtcatgtgggaagtcatgtcatttggagagagaccctattgggatatgtccaaccaagatgtcatcaatgccatcgagcaggactaccggctgcccccacccatggactgtccagctgctctacaccagctcatgctggactgttggcagaaggaccggaacagccggccccggtttgcggagattgtcaacaccctagataagatgatccggaacccggcaagtctcaagactgtggcaaccatcaccgccgtgccttcccagcccctgctcgaccgctccatcccagacttcacggcctttaccaccgtggatgactggctcagcgccatcaaaatggtccagtacagggacagcttcctcactgctggcttcacctccctccagctggtcacccagatgacatcagaagacctcctgagaataggcatcaccttggcaggccatcagaagaagatcctgaacagcattcattctatgagggtccagataagtcagtcaccaacggcaatggcatgagaactcttgtttcttggggaaggagaggagggaaaaggaccagggtcaagggggaccagaggttgaccactgtggaatgtactggagagactggcttctcagctgaggaatgcatttccatcagtgaagaatcaaccggacctgttgctagcaggcaatctccatttctcagtgacagaagcatgtttgagatgccgtgggaaaccaaatatataataataaaaatataaaaaggtgatgttcaacagaagtgaagacaaaacaatatgcatcaggagaacaagagtaaacccagctcccactctcagtgggctgcagttgcccaaccacaggaagaaagggaaggaggtagagggaagaaacagaagcagtgttccattttcttcctcaccaatgacattcttttcttttctcctttcgtactcctccctgagagtcccctcccttctcccacactcgtttccctttgctcatgactcctgtagggaagtttcttcaaacaaaacccagctcctgagtctccagatgttgttctgtcagttgccaaaggactttgctgaccactgcatggggatccaaccaattcaattaatgtcttcatattgaagaagagatgtaccttcaattgaaaacctcgtttttcttttgtttgcattttctgcaaaaaggaaaaagaaaccacaaattggggaaaaaaaaagaagaaaaacctgtttccgtgtgcaaaagcacacatatgtatgtctgtgttataaaatgactgtgcttgttcgtaacagatgcaaacaagaaagaagaactgggaagtctttgtccctaggaaatccaaaggggctggaatatggtgttggtttggctttctggttggcccaatcggcctattggctcaatgggaagagaggagagggagaaaaataaaatgaaaggaaaaaaaaaagtttgcaaattcagacaggaaacaggtgagtggtttgaattggatgcagtgtgggccatcctggaatgatactgactgattaattattcctgataacatctcaagaaaaggagaaggaaagtgtttctggagaatgttctttcacatcactggaatctgcaattcaagaagtgacaagggagaattcttgctttacctatggactggcttaagccgtgtggcatccgaggaatgtttcaaatgtgtctgtgtttctctttacattccttgttgtacctcattgttcaattcacttttgtaaattccacctaacatttaattattttaaatttctccttttaccttaatctccttgctaattttatctgtctaattaaaaagagcagaagcatgtctgggtttacgtaaaaaaaaaaaaaaaaaa

SEQ ID NO: 2353 - DNA, 4044 bp, Homo Sapiens
  NM_004445
ggggcgggccgggccggcttgggaggggacgcggagggggcgggccgggctgcgttcgctccagccgcggctctacagcagcgggcggcgggacccgggacccagcttggcgacggcgatctcgacgcgggcccccaggatctcccggcgccccacctctggagcagcccctgccgccagcgtcaggtccaccccggaatcccagggactctcggcgccgaacggacccgggccgggtgcaacggggtccccggactggagaagacgcgggtggcaccgtgcgagctccaggagccccgggtccactgcgaggcctcggggggcgcagacctgcagagactgcggccaacgggaagaaataaagggattatagtccacccaattcacagacttctgagactcagacacgaggagagatagagaaccgccaatctctagatcaacaagcaaaggaggtgccaagcctgtttgtcttcattgtgacactggagtctagatgctgggaagtccaagatcagggtgccggcatggtcagttcctggcgaagcctctcttctaggtttcagactgccctcttctttgttgtgtcctcgaatggcagaaaaaggggtggctgttggaggaagggaggagagtaaatgaagagaaagaactggaataaccccttgcagaaaaaaaaaaaaagggaagcaagcttagctgtacaccctgagtcttgcaaaagctgcagccccacccaggagcagggtggtggctggggcgatggtggacgccctgaagatgtcccatggctactgaaggggctgcccagttagggaacagagtggcgggcatggtgtgtagcctatgggtgctgctcctggtgtcttcagttctggctctggaagaggtattgctggacaccaccggagagacatctgagattggctggctcacctacccaccaggggggtgggacgaggtgagtgttctggacgaccagcgacgcctgactcggacctttgaggcatgtcatgtggcaggggcccctccaggcaccgggcaggacaattggttgcagacacactttgtggagcggcgcggggcccagagggcgcacattcgactccacttctctgtgcgggcatgctccagcctgggtgtgagcggcggcacctgccgggagaccttcaccctttactaccgtcaggctgaggagcccgacagccctgacagcgtttcctcctggcacctcaaacgctggaccaaggtggacacaattgcagcagacgagagctttccctcctcctcctcctcctcctcctcttcttcctctgcagcgtgggctgtgggaccccacggggctgggcagcgggctggactgcaactgaacgtcaaagagcggagctttgggcctctcacccaacgcggcttctacgtggccttccaggacacgggggcctgcctggccctggtcgctgtcaggctcttctcctacacctgccctgccgtgctccgatcctttgcttcctttccagagacgcaggccagtggggctgggggggcctccctggtggcagctgtgggcacctgtgtggctcatgcagagccagaggaggatggagtagggggccaggcaggaggcagcccccccaggctgcactgcaacggggagggcaagtggatggtagctgtcgggggctgccgctgccagcctggataccaaccagcacgaggagacaaggcctgccaagcctgcccacgggggctctataagtcttctgctgggaatgctccctgctcaccatgccctgcccgcagtcacgctcccaacccagcagcccccgtttgcccctgcctggagggcttctaccgggccagttccgacccaccagaggccccctgcactggtcctccatcggctccccaggagctttggtttgaggtgcaaggctcagcactcatgctacactggcgcctgcctcgggagctggggggtcgaggggacctgctcttcaatgtcgtgtgcaaggagtgtgaaggccgccaggaacctgccagcggtggtgggggcacttgtcaccgctgcagggatgaggtccacttcgaccctcgccagagaggcctgactgagagccgagtgttagtggggggactccgggcacacgtaccctacatcttagaggtgcaggctgttaatggggtgtctgagctcagccctgaccctcctcaggctgcagccatcaatgtcagcaccagccatgaagtgccctctgctgtccctgtggtgcaccaggtgagccgggcatccaacagcatcacggtgtcctggccgcagcccgaccagaccaatgggaacatcctggactatcagctccgctactatgaccaggcagaagacgaatcccactccttcaccctgaccagcgagaccaacactgccaccgtgacacagctgagccctggccacatctatggtttccaggtgcgggcccggactgctgccggccacggcccctacgggggcaaagtctatttccagacacttcctcaaggggagctgtcttcccagcttccggaaagactctccttggtgatcggctccatcctgggggctttggccttcctcctgctggcagccatcaccgtgctggcggtcgtcttccagcggaagcggcgtgggactggctacacggagcagctgcagcaatacagcagcccaggactcggggtgaagtattacatcgacccctccacctacgaggacccctgtcaggccatccgagaacttgcccgggaagtcgatcctgcttatatcaagattgaggaggtcattgggacaggctcttttggagaagtgcgccagggccgcctgcagccacggggacggagggagcagactgtggccatccaggccctgtgggccgggggcgccgaaagcctgcagatgaccttcctgggccgggccgcagtgctgggtcagttccagcaccccaacatcctgcggctggagggcgtggtcaccaagagccgacccctcatggtgctgacggagttcatggagcttggccccctggacagcttcctcaggcagcgggagggccagttcagcagcctgcagctggtggccatgcagcggggagtggctgctgccatgcagtacctgtccagctttgccttcgtccatcgctcgctgtctgcccacagcgtgctggtgaatagccacttggtgtgcaaggtggcccgtcttggccacagtcctcagggcccaagttgtttgcttcgctgggcagccccagaggtcattgcacatggaaagcatacaacatccagtgatgtctggagctttgggatactcatgtgggaagtgatgagttatggagaacggccttactgggacatgagtgagcaggaggtactaaatgcaatagagcaggagttccggctgcccccgcctccaggctgtcctcctggattacatctacttatgttggacacttggcagaaggaccgtgcccggcggcctcattttgaccagctggtggctgcatttgacaagatgatccgcaagccagataccctgcaggctggcggggacccaggggaaaggccttcccaggcccttctgacccctgtggccctggactttccttgtctggactcaccccaggcctggctttcagccattggactggagtgctaccaggacaacttctccaagtttggcctctgtaccttcagtgatgtggctcagctcagcctagaagacctgcctgccctgggcatcaccctggctggccaccagaagaagctgctgcaccacatccagctccttcagcaacacctgaggcagcagggctcagtggaggtctgagaatgacgatacccgtgactcagccctggacactggtccgagaagggacatgtgggacgtgagccgggctccaacagcctctgtgagagatgccccacaccaaacccaaccctcccgatggctgcattccctggtcctccgcctctccaccagccccctcctcattaaagggaaagaagggaatttgcaaa

SEQ ID NO: 2354 - DNA, 5021 bp, Homo Sapiens
  NM_004446
agcacgaaaggccacgcaggccgttctaaccctggcggccaagaggaggggtagcaggctctggaacctgcgggcggggacgaagacggcgcgcgacgatgtcgcaccgcggcgtgcgcggtgtcggcagtagctgcggcgcaggggcggagcgaaggctgcggcggcgtcgggtacgcgcacacgttgcatcttcttcctttcgcggggtcctccgtagttctggcacgagccaggcgtactgacaggtggaccagcggactggtggagatggcgacgctctctctgaccgtgaattcaggagaccctccgctaggagctttgctggcagtagaacacgtgaaagacgatgtcagcatttccgttgaagaagggaaagagaatattcttcatgtttctgaaaatgtgatattcacagatgtgaattctatacttcgctacttggctagagttgcaactacagctgggttatatggctctaatctgatggaacatactgagattgatcactggttggagttcagtgctacaaaattatcttcatgtgattcctttacttctacaattaatgaactcaatcattgcctgtctctgagaacatacttagttggaaactccttgagtttagcagatttatgtgtttgggccaccctaaaaggaaatgctgcctggcaagaacagttgaaacagaagaaagctccagttcatgtaaaacgttggtttggctttcttgaagcccagcaggccttccagtcagtaggtaccaagtgggatgtttcaacaaccaaagctcgagtggcacctgagaaaaagcaagatgttgggaaatttgttgagcttccaggtgcggagatgggaaaggttaccgtcagatttcctccagaggccagtggttacttacacattgggcatgcaaaagctgctcttctgaaccagcactaccaggttaactttaaagggaaactgatcatgagatttgatgacacaaatcctgaaaaagaaaaggaagattttgagaaggttatcttggaagatgttgcaatgttgcatatcaaaccagatcaatttacttatacttcggatcattttgaaactataatgaagtatgcagagaagctaattcaagaagggaaggcttatgtggatgatactcctgctgaacagatgaaagcagaacgtgagcagaggatagactctaaacatagaaaaaaccctattgagaagaatctacaaatgtgggaagaaatgaaaaaagggagccagtttggtcagtcctgttgtttgcgagcaaaaattgacatgagtagtaacaatggatgcatgagagatccaaccctttatcgctgcaaaattcaaccacatccaagaactggaaataaatacaatgtttatccaacatatgattttgcctgccccatagttgacagcatcgaaggtgttacacatgccctgagaacaacagaataccatgacagagatgagcagttttactggattattgaagctttaggcataagaaaaccatatatttgggaatatagtcggctaaatctcaacaacacagtgctatccaaaagaaaactcacatggtttgtcaatgaaggactagtagatggatgggatgacccaagatttcctacggttcgtggtgtactgagaagagggatgacagttgaaggactgaaacagtttattgctgctcagggctcctcacgttcagtcgtgaacatggagtgggacaaaatctgggcgtttaacaaaaaggttattgacccagtggctccacgatatgttgcattactgaagaaagaagtgatcccagtgaatgtacctgaagctcaggaggagatgaaagaagtagccaaacacccaaagaatcctgaggttggcttgaagcctgtgtggtatagtcccaaagttttcattgaaggtgctgatgcagagactttttcggagggtgagatggttacatttataaattggggcaacctcaacattacaaaaatacacaaaaatgcagatggaaaaatcatatctcttgatgcaaagttgaatttggaaaacaaagactacaagaaaaccactaaggtcacttggcttgcagagactacacatgctcttcctattccagtaatctgtgtcacttatgagcacttgatcacaaagccagtgctaggaaaagacgaggactttaagcagtatgtcaacaagaacagtaagcatgaagagctaatgctaggggatccctgccttaaggatttgaaaaaaggagatattatacaactccagagaagaggattcttcatatgtgatcaaccttatgaacctgttagcccatatagttgcaaggaagccccgtgtgttttgatatacattcctgatgggcacacaaaggaaatgccaacatcagggtcaaaggaaaagaccaaagtagaagccacaaaaaatgagacctctgctccttttaaggaaagaccaacaccttctctgaataataattgtactacatctgaggattccttggtcctttacaatagagtggctgttcaaggagatgtggttcgtgaattaaaagccaagaaagcaccaaaggaagatgtagatgcagctgtaaaacagcttttgtctttgaaagctgaatataaggagaaaactggccaggaatataaacctggaaaccctcctgctgaaataggacagaatatttcttctaattcctcagcaagtattctggaaagtaaatctctgtatgatgaagttgctgcacaaggggaggtggttcgtaagctaaaagctgaaaaatcccctaaggctaaaataaatgaagctgtagaatgcttactgtccctgaaggctcagtataaagaaaaaactgggaaggagtacatacctggtcagcccccattatctcaaagttcggattcaagcccaaccagaaattctgaacctgctggtttagaaacaccagaagcgaaagtactttttgacaaagtagcttctcaaggggaagtagttcggaaacttaaaactgaaaaagcccctaaggatcaagtagatatagctgttcaagaactccttcagctaaaggcacagtacaagtctttgataggagtagagtataagcctgtgtcggccactggagctgaggacaaagataagaagaagaaagaaaaagaaaataaatctgaaaagcagaataagcctcagaaacaaaatgatggccaaaggaaagacccttctaaaaaccaaggaggtgggctctcatcaagtggagcaggagaagggcaggggcctaagaaacagaccaggttgggtcttgaggcaaaaaaagaagaaaatcttgctgattggtattctcaggtcatcacaaagtcagaaatgattgaataccatgacataagtggctgttatattcttcgtccctgggcctatgccatttgggaagccatcaaggacttttttgatgctgagatcaagaaacttggtgttgaaaactgctacttccccatgtttgtgtctcaaagtgcattagagaaagagaagactcatgttgctgactttgccccagaggttgcttgggttacaagatctggcaaaaccgagctggcagaaccaattgccattcgtcctactagtgaaacagtaatgtatcctgcatatgcaaaatgggtacagtcacacagagacctgcccatcaagctcaatcagtggtgcaatgtggtgcgttgggaattcaagcatcctcagcctttcctacgtactcgtgaatttctttggcaggaagggcacagtgcttttgctaccatggaagaggcagcggaagaggtcttgcagatacttgacttatatgctcaggtatatgaagaactcctggcaattcctgttgttaaaggaagaaagacggaaaaggaaaaatttgcaggaggagactatacaactacaatagaagcatttatatctgctagtggaagagctatccagggaggaacatcacatcatttagggcagaatttttccaaaatgtttgaaatcgtttttgaagatccaaagataccaggagagaagcaatttgcctatcaaaactcctggggcctgacaactcgaactattggtgttatgaccatggttcatggggacaacatgggtttagtattaccaccccgtgtagcatgtgttcaggtggtgattattccttgtggcattaccaatgcactttctgaagaagacaaagaagcgctgattgcaaaatgcaatgattatcgaaggcgattactcagtgttaacatccgcgttagagctgatttacgagataattattctccaggttggaaattcaatcactgggagctcaagggagttcccattagacttgaagttgggccacgtgatatgaagagctgtcagtttgtagccgtcagacgagatactggagaaaagctgacagttgctgaaaatgaggcagagactaaacttcaagctattttggaagacatccaggtcacccttttcacaagggcttctgaagaccttaagactcatatggttgtggctaatacaatggaagactttcagaagatactagattctggaaagattgttcagattccattctgtggggaaattgactgtgaggactggatcaaaaagaccactgccagggatcaagatcttgaacctggtgctccatccatgggagctaaaagcctttgcatccccttcaaaccactctgtgaactgcagcctggagccaaatgtgtctgtggcaagaaccctgccaagtactacaccttatttggtcgcagctactgagggatgaacgaaagccccctcttcaactcctctcactttttaaagcattgatattagtatcttctcagatacagaccgttttatgattttttaaaaagtaaaagttctaaaatgaagtcacacaggacaattattcttatgcctaagttaacagtggataaaagacttttctgtaaacaactccagtaataaatatcatgaactaaaaaaaa

SEQ ID NO: 2355 - DNA, 4624 bp, Homo Sapiens
  NM_004448
ggaggaggtggaggaggagggctgcttgaggaagtataagaatgaagttgtgaagctgagattcccctccattgggaccggagaaaccaggggagccccccgggcagccgcgcgccccttcccacggggccctttactgcgccgcgcgcccggcccccacccctcgcagcaccccgcgccccgcgccctcccagccgggtccagccggagccatggggccggagccgcagtgagcaccatggagctggcggccttgtgccgctgggggctcctcctcgccctcttgccccccggagccgcgagcacccaagtgtgcaccggcacagacatgaagctgcggctccctgccagtcccgagacccacctggacatgctccgccacctctaccagggctgccaggtggtgcagggaaacctggaactcacctacctgcccaccaatgccagcctgtccttcctgcaggatatccaggaggtgcagggctacgtgctcatcgctcacaaccaagtgaggcaggtcccactgcagaggctgcggattgtgcgaggcacccagctctttgaggacaactatgccctggccgtgctagacaatggagacccgctgaacaataccacccctgtcacaggggcctccccaggaggcctgcgggagctgcagcttcgaagcctcacagagatcttgaaaggaggggtcttgatccagcggaacccccagctctgctaccaggacacgattttgtggaaggacatcttccacaagaacaaccagctggctctcacactgatagacaccaaccgctctcgggcctgccacccctgttctccgatgtgtaagggctcccgctgctggggagagagttctgaggattgtcagagcctgacgcgcactgtctgtgccggtggctgtgcccgctgcaaggggccactgcccactgactgctgccatgagcagtgtgctgccggctgcacgggccccaagcactctgactgcctggcctgcctccacttcaaccacagtggcatctgtgagctgcactgcccagccctggtcacctacaacacagacacgtttgagtccatgcccaatcccgagggccggtatacattcggcgccagctgtgtgactgcctgtccctacaactacctttctacggacgtgggatcctgcaccctcgtctgccccctgcacaaccaagaggtgacagcagaggatggaacacagcggtgtgagaagtgcagcaagccctgtgcccgagtgtgctatggtctgggcatggagcacttgcgagaggtgagggcagttaccagtgccaatatccaggagtttgctggctgcaagaagatctttgggagcctggcatttctgccggagagctttgatggggacccagcctccaacactgccccgctccagccagagcagctccaagtgtttgagactctggaagagatcacaggttacctatacatctcagcatggccggacagcctgcctgacctcagcgtcttccagaacctgcaagtaatccggggacgaattctgcacaatggcgcctactcgctgaccctgcaagggctgggcatcagctggctggggctgcgctcactgagggaactgggcagtggactggccctcatccaccataacacccacctctgcttcgtgcacacggtgccctgggaccagctctttcggaacccgcaccaagctctgctccacactgccaaccggccagaggacgagtgtgtgggcgagggcctggcctgccaccagctgtgcgcccgagggcactgctggggtccagggcccacccagtgtgtcaactgcagccagttccttcggggccaggagtgcgtggaggaatgccgagtactgcaggggctccccagggagtatgtgaatgccaggcactgtttgccgtgccaccctgagtgtcagccccagaatggctcagtgacctgttttggaccggaggctgaccagtgtgtggcctgtgcccactataaggaccctcccttctgcgtggcccgctgccccagcggtgtgaaacctgacctctcctacatgcccatctggaagtttccagatgaggagggcgcatgccagccttgccccatcaactgcacccactcctgtgtggacctggatgacaagggctgccccgccgagcagagagccagccctctgacgtccatcatctctgcggtggttggcattctgctggtcgtggtcttgggggtggtctttgggatcctcatcaagcgacggcagcagaagatccggaagtacacgatgcggagactgctgcaggaaacggagctggtggagccgctgacacctagcggagcgatgcccaaccaggcgcagatgcggatcctgaaagagacggagctgaggaaggtgaaggtgcttggatctggcgcttttggcacagtctacaagggcatctggatccctgatggggagaatgtgaaaattccagtggccatcaaagtgttgagggaaaacacatcccccaaagccaacaaagaaatcttagacgaagcatacgtgatggctggtgtgggctccccatatgtctcccgccttctgggcatctgcctgacatccacggtgcagctggtgacacagcttatgccctatggctgcctcttagaccatgtccgggaaaaccgcggacgcctgggctcccaggacctgctgaactggtgtatgcagattgccaaggggatgagctacctggaggatgtgcggctcgtacacagggacttggccgctcggaacgtgctggtcaagagtcccaaccatgtcaaaattacagacttcgggctggctcggctgctggacattgacgagacagagtaccatgcagatgggggcaaggtgcccatcaagtggatggcgctggagtccattctccgccggcggttcacccaccagagtgatgtgtggagttatggtgtgactgtgtgggagctgatgacttttggggccaaaccttacgatgggatcccagcccgggagatccctgacctgctggaaaagggggagcggctgccccagccccccatctgcaccattgatgtctacatgatcatggtcaaatgttggatgattgactctgaatgtcggccaagattccgggagttggtgtctgaattctcccgcatggccagggacccccagcgctttgtggtcatccagaatgaggacttgggcccagccagtcccttggacagcaccttctaccgctcactgctggaggacgatgacatgggggacctggtggatgctgaggagtatctggtaccccagcagggcttcttctgtccagaccctgccccgggcgctgggggcatggtccaccacaggcaccgcagctcatctaccaggagtggcggtggggacctgacactagggctggagccctctgaagaggaggcccccaggtctccactggcaccctccgaaggggctggctccgatgtatttgatggtgacctgggaatgggggcagccaaggggctgcaaagcctccccacacatgaccccagccctctacagcggtacagtgaggaccccacagtacccctgccctctgagactgatggctacgttgcccccctgacctgcagcccccagcctgaatatgtgaaccagccagatgttcggccccagcccccttcgccccgagagggccctctgcctgctgcccgacctgctggtgccactctggaaaggcccaagactctctccccagggaagaatggggtcgtcaaagacgtttttgcctttgggggtgccgtggagaaccccgagtacttgacaccccagggaggagctgcccctcagccccaccctcctcctgccttcagcccagccttcgacaacctctattactgggaccaggacccaccagagcggggggctccacccagcaccttcaaagggacacctacggcagagaacccagagtacctgggtctggacgtgccagtgtgaaccagaaggccaagtccgcagaagccctgatgtgtcctcagggagcagggaaggcctgacttctgctggcatcaagaggtgggagggccctccgaccacttccaggggaacctgccatgccaggaacctgtcctaaggaaccttccttcctgcttgagttcccagatggctggaaggggtccagcctcgttggaagaggaacagcactggggagtctttgtggattctgaggccctgcccaatgagactctagggtccagtggatgccacagcccagcttggccctttccttccagatcctgggtactgaaagccttagggaagctggcctgagaggggaagcggccctaagggagtgtctaagaacaaaagcgacccattcagagactgtccctgaaacctagtactgccccccatgaggaaggaacagcaatggtgtcagtatccaggctttgtacagagtgcttttctgtttagtttttactttttttgttttgtttttttaaagatgaaataaagacccagggggagaatgggtgttgtatggggaggcaagtgtggggggtccttctccacacccactttgtccatttgcaaatatattttggaaaacagcta

SEQ ID NO: 2356 - DNA, 801 bp, Homo Sapiens
  NM_004450
gcggcgttgtagttaagctcgtgtaacggcggcggtgtcggcagctgctgtagcgaagagagtttggcgcgatgtctcacaccattttgctggtacagcctaccaagaggccagaaggcagaacttatgctgactacgaatctgtgaatgaatgcatggaaggtgtttgtaaaatgtatgaagaacatctgaaaagaatgaatcccaacagtccctctatcacatatgacatcagtcagttgtttgatttcatcgatgatctggcagacctcagctgcctggtttaccgagctgatacccagacataccagccttataacaaagactggattaaagagaagatctacgtgctccttcgtcggcaggcccaacaggctgggaaataattgtgttggaagcactgggggggttggggtgggcttggaacacaggtgtgtacagcgtgctgtagtggaagttttgtatcatagtaatcctgtttccactttgttatactctagccaagattgactgtattagatgaaatgtgaggatcttgttcaatcggaaacccccgttacctcctctttttctttctctttctttttttttttttacttaaacatttttatgatgatttagatggaagttgttcttcgtcacttaatgttggttccagtccttcaactgttcatatctactttataacattcacatactaacccttcttcaagatggggtggggggtggaaatgcagtttagccatgtcctcaagataaagtcttggtaaaaataaataaatgtcctttagttatattttc

SEQ ID NO: 2357 - DNA, 4369 bp, Homo Sapiens
  NM_004457
gtcccaggcggttccgctcaacagacgctgctgtggctgcgccgggctgcgacactgcagttgtctacgcggccggggccgggacgaggaggcgttggacggggtcgcatacgttcgtcccctcgcattgcggccccgacagctgcgccaggatccccgggcggcggcgcggggcgtgaacgctctggggctcagccaggcctgcgcgggcccgaggccggaggaacccggactccggcgtagcggttttgacacaagggcgcatatcttcaaagcacctagtacctcctaccattgtcaactgatacagaattcgttgttgggaaggactggggaaacagctgtaacatttgccaccctcagaagctgctggtcctgtgtcacaccaccttagcctcttgatcgaggaagattctcgctgaagtctgttaattctactttttgagtacttatgaataaccacgtgtcttcaaaaccatctaccatgaagctaaaacataccatcaaccctattcttttatattttatacattttctaatatcactttatactattttaacatacattccgttttattttttctccgagtcaagacaagaaaaatcaaaccgaattaaagcaaagcctgtaaattcaaaacctgattctgcatacagatctgttaatagtttggatggtttggcttcagtattataccctggatgtgatactttagataaagtttttacatatgcaaaaaacaaatttaagaacaaaagactcttgggaacacgtgaagttttaaatgaggaagatgaagtacaaccaaatggaaaaatttttaaaaaggttattcttggacagtataattggctttcctatgaagatgtctttgttcgagcctttaattttggaaatggattacagatgttgggtcagaaaccaaagaccaacatcgccatcttctgtgagaccagggccgagtggatgatagctgcacaggcgtgttttatgtataattttcagcttgttacattatatgccactctaggaggtccagccattgttcatgcattaaatgaaacagaggtgaccaacatcattactagtaaagaactcttacaaacaaagttgaaggatatagtttctttggtcccacgcctgcggcacatcatcactgttgatggaaagccaccgacctggtccgagttccccaagggcatcattgtgcataccatggctgcagtggaggccctgggagccaaggccagcatggaaaaccaacctcatagcaaaccattgccctcagatattgcagtaatcatgtacacaagtggatccacaggacttccaaagggagtcatgatctcacatagtaacattattgctggtataactgggatggcagaaaggattccagaactaggagaggaagatgtctacattggatatttgcctctggcccatgttctagaattaagtgctgagcttgtctgtctttctcacggatgccgcattggttactcttcaccacagactttagcagatcagtcttcaaaaattaaaaaaggaagcaaaggggatacatccatgttgaaaccaacactgatggcagcagttccggaaatcatggatcggatctacaaaaatgtcatgaataaagtcagtgaaatgagtagttttcaacgtaatctgtttattctggcctataattacaaaatggaacagatttcaaaaggacgtaatactccactgtgcgacagctttgttttccggaaagttcgaagcttgctagggggaaatattcgtctcctgttgtgtggtggcgctccactttctgcaaccacgcagcgattcatgaacatctgtttctgctgtcctgttggtcagggatacgggctcactgaatctgctggggctggaacaatttccgaagtgtgggactacaatactggcagagtgggagcaccattagtttgctgtgaaatcaaattaaaaaactgggaggaaggtggatactttaatactgataagccacaccccaggggtgaaattcttattgggggccaaagtgtgacaatggggtactacaaaaatgaagcaaaaacaaaagctgatttctttgaagatgaaaatggacaaaggtggctctgtactggggatattggagagtttgaacccgatggatgcttaaagattattgatcgtaaaaaggaccttgtaaaactacaggcaggggaatatgtttctcttgggaaagtagaggcagctttgaagaatcttccactagtagataacatttgtgcatatgcaaacagttatcattcttatgtcattggatttgttgtgccaaatcaaaaggaactaactgaactagctcgaaagaaaggacttaaagggacttgggaggagctgtgtaacagttgtgaaatggaaaatgaggtacttaaagtgctttccgaagctgctatttcagcaagtctggaaaagtttgaaattccagtaaaaattcgtttgagtcctgaaccgtggacccctgaaactggtctggtgacagatgccttcaagctgaaacgcaaagagcttaaaacacattaccaggcggacattgagcgaatgtatggaagaaaataattattctcttctggcatcagtttgctacagtgagctcagatcaaataggaaaatacttgaaatgcatgtctcaagctgcaaggcaaactccattcctcatattaaactattacttctcatgacgtcaccatttttaactgacaggattagtaaaacattaagacagcaaacttgtgtctgtctcttctttcattttccccgccaccaacttactttaccacctatgactgtacttgtcagtatgagaatttttctgaatcatattggggaagcagtgattttaaaacctcaagtttttaaacatgatttatatgttctgtataatgttcagtttgtaactttttaaaagtttggatgtatagagggataaataggaaatataagaattggttatttgggggcttttttacttactgtatttaaaaatacaagggtattgatatgaaattatgtaaatttcaaatgcttatgaatcaaatcattgttgaacaaaagatttgttgctgtgtaattattgtcttgtatgcatttgagagaaataaatatacccatacttatgttttaagaagttgagatcttgtgaatatatgcctgtcagtgtcttctttatatatttattttttattagaaaaaatgaagtttggttggtgatgcatgaaacaaaatagcaagagagggttatagtttaatagtaagggagataacacagcatgtgtagcaccagttgataattggtctctagtagcttactgtcaaaatgttcaatgaagtcttctgttcatctgttgaaactaggaaaatacccaaacttaaatggaagaattctgaaagagaggatagaatttaaagaacaagagtatataaagttattctttgaatatttcgttgactatatgtacattgagttatctatatttgtaaacaaattagtcatggaaaattattctatctcaaagtctccttttagtctagataatcattatttcattttaaaattagtgtttttcctagtttgcactgatgcgtgtatggatgtgtgtgagtcagtggtagcttatttaaaaagcaccttatcctttctcccataacctttgtacactaaaaaatgaaagaatttagaatgtatttgatgatagcattctcactaagacacatgagaatttaactttataaccgcgtgagttaagatttaattcataggttttgatgtcattgttgaagttatttgtaattcagaaaccttgcttgtgtgatacatagtctcttcatttattactgcttgtctgttgttatatctggattatcaaaagcaatagtgcaccaattaagatgtgctcaaatcaggacttaaatcataggcaccacatttttcatgtcagactagttactttgttgattctcagttactgtaggcatcaaaaggcaaaaatcaaaaaaaaaaaaaacaaaaacaaaaaaaaagatgaacctaggtctgtgtaaagtaaggggagtgttaggagcagccaggactgtgtagtgtgtgtttggttgcatcacaaacatcgtatgtggagacattgcaatacagtgttttttgttttcaacttttcttgtattgtatatttgtattatgttttgaatgcttttctcttttcataattaaatattaatgtttgggataactgccaagaagaagtaaaaatattgaatggaacttctatatgaggatgctgtgatctaaaaattaaatctcagtgggcggagaaaaaaaaa

SEQ ID NO: 2358 - DNA, 5039 bp, Homo Sapiens
  NM_004458
gcgattcggctggctctgccacaccaccgcgcgcccccgctccgcccgcccctccgggcgcgtcttttccgggctcgcgctgagtcccgcctccgccggctgtccgggtgcgcgcgcgccgctgcggctttttctctggcctccgccgcgcgctcctcctcgtcccagcgctagcgggcacgcggttcctttttgcgagctttccgagtgccaggcgccggccggctgcgaagacgcggtgggccgcccctccgattgaaatcacagaagatattcgtgttcttcttaagagaaaaagaggacatttaaaaacgctatggcaaagagaataaaagctaagcccacttcagacaaacctggaagtccatatcgctctgtcacacacttcgactcactagctgtaatagacatccctggagcagatactctggataaattatttgaccatgctgtatccaagtttgggaagaaggacagccttgggaccagggaaatcctaagtgaagaaaatgaaatgcagccaaatggaaaagtttttaagaagttaattcttgggaattataaatggatgaactatcttgaagtgaatcgcagagtgaataactttggtagtggactcactgcactgggactaaaaccaaagaacaccattgccatcttctgtgagaccagggccgaatggatgattgcagcacagacctgctttaagtacaactttcctcttgtgactttatatgccacacttggcaaagaagcagtagttcatgggctaaatgaatctgaggcttcctatctgattaccagtgttgaacttctggaaagtaaacttaagactgcattgttagatatcagttgtgttaaacatatcatttatgtggacaataaggctatcaataaagcagagtaccctgaaggatttgagattcacagcatgcaatcagtagaagagttgggatctaacccagaaaacttgggcattcctccaagtagaccaacgccttcagacatggccattgttatgtatactagtggttctactggccgacctaagggagtgatgatgcatcatagcaatttgatagctggaatgacaggccagtgtgaaagaatacctggactgggaccgaaggacacatatattggctacttgcctttggctcatgtgctagaactgacagcagagatatcttgctttacctatggctgcaggattggatattcttctccgcttacactctctgaccagtccagcaaaattaaaaaaggaagcaaaggagactgtactgtactgaagcccacacttatggctgctgttccggaaatcatggatagaatttataagaatgttatgagcaaagtccaagagatgaattatattcagaaaactctgttcaagatagggtatgattacaaattggaacagatcaaaaagggatatgatgcacctctttgcaatctgttactgtttaaaaaggtcaaggccctgctgggagggaatgtccgcatgatgctgtctggaggggccccgctatctcctcagacacaccgattcatgaatgtctgcttctgctgcccaattggccagggttatggactgacagaatcatgtggtgctgggacagttactgaagtaactgactatactactggcagagttggagcacctcttatttgctgtgaaattaagctaaaagactggcaagaaggcggttatacaattaatgacaagccaaaccccagaggtgaaatcgtaattggtggacagaacatctccatgggatattttaaaaatgaagagaaaacagcagaagattattctgtggatgaaaatggacaaaggtggttttgcactggtgatattggagaattccatcccgatggatgtttacagattatagatcgtaagaaagatctagtgaagttacaagcaggagagtatgtatctcttgggaaagtagaagctgcactgaagaattgtccacttattgacaacatctgtgcttttgccaaaagtgatcagtcctatgtgatcagttttgtggttcctaaccagaaaaggttgacacttttggcacaacagaaaggggtagaaggaacttgggttgatatctgcaataatcctgctatggaagctgaaatactgaaagaaattcgagaagctgcaaatgccatgaaattggagcgatttgaaattccaatcaaggttcgattaagcccagagccatggacccctgaaactggtttggtaactgatgctttcaaactgaaaaggaaggagctgaggaaccattacctcaaagacattgaacgaatgtatgggggcaaataaaatgttgttgtcttattgacagttgtgcaggaggtagcctggtggttttcaacctctagaattttaagcctttgttgaactgttagaatgtaaggtatatcattctaaagatagagtaaaaagaaaacaaaaccaaaagttattaaaattgttgtccggtttactttaacttagttttgcatagttctagtgcagctgaaattgaaaagttatttccctttagctgtgttattatagagcagaaattctgtttttaaaaattagcctaagatatacttgtttttgtaaagaaaaatatttaatgttgaacaaaataaattggagttggagtagaatgtagtttgaggaaatttgcagcttccaatgcctcttgtcttcctatttcagaagtttaaatattaagcatgacagaaaatatgtattaacactactcaaagcaaaagtgctgcagggctttaaaattctcttccaaccatttatcttgaaggaaaaattcaatagtaatataatacacaaaatcaaataataccttagaaggtattaagattataattgttgcataggttagatatagagtcattgtaatgttgtgaataattacagtgcctaaaataagaatagaacaacatatacaacaccaaaaaatatctagtaatatatttaaagggaaattgagctgctttttttgaaactttgagatctaaaaataactgtaattatttgaatgactaagaggaaagtacattttttgaaatgctgaaaattgcctttctgtgtttattcaaactgaaaagctgagaccaagagcaaggaaggtaaaaagttaacaggcaaacattttctcttagaaaaggtgataaaatcataagtatttggaattagaacccttgcacagcactgaacctgggaaagagatttaaactctgaatttatctttgataacagggattgattttaaaatgtacatgtattaaattacatttgtaatttaaggtctgtttgctgttgctgattttattcttgatcagtagtttgcatttcagaaagcctttcattttgctttaattttagcaaagcgggttataatgaatgacttccccaatatcttgcttgaacttacaggtgattaacttggatgagttttgggaagttaaagggaagaaaacactgttatcattttttcctgtttgggaagagcttagaaactggaaatactagatttgggagaagggcagagttacttgataagggactgatgtttgtgcagtaacttgggagtgtggtttctttttgaatctttaattaaaacctgggattatatatccctgataaatattcacacttgaaccatagttactgtaaaatgcaaaaaatcttaatactgttattctttgcactttttcttaatcattttttatatatatgcatatatatatgtgtgtgtgtgtgttgcttatgttgttttgtacagatgtgggccaccattgcaacaaaatacattctttttgctctaaaatatttatgaagaaaatacttaaatgttatgtatatggtggtaataagggaaaaatcaagtattataaacaagaatgaaggtttttgtaaagatttctgttcagcgttttgcaaggtaaaattttaggcaagttttccctgaagttatgtgtatgtgagtattctcattcttcccaacttgcctttgaagagtgaaataccattattatcaagtagactactgttcagcttttattcctgccctgctgtttatcccttaagaatgagtttcttagacttttccaatatgtgattttttttcccatttagaatggtgattttaaatgtgtgagtgcatgtactatcttatctcagatatttgcacccccaatctgcccccaactcccaaaagctagaacactgccaactgatctgttataggtcctttagaaacacataattaacacttaaggttgggtgctgctaattctttgcaaaaatccaaatattgttaagggaccagggagatgccactaccccttgattttccatctaaaaatatacatgtttatgtaaacaaatctttccatatccatagtgacttttcaagtatttaagcctaaagattttgatctcacatttttatacctgtttaaattgctcacagttattacatacacatcagccatcaactaaagttgtactttaaaaatttactacaatatgtacatttctaagtcaaacacttgtgacttttgctttaattccatgaatgttcctgcctccttgatatttgtatttattctttttttctctagagtagaggtataattgtgtgatatttcagaaatacagataaatgattcaaaaagtcacagttaaggagaatcatgtttctttgatcatgaataactgattagtaagtcttgcctatattttcctgatagcatatgacaaatgtttctaaggtaacaagatgagaacagataaagattgtgtggtgttttggatttggagagaaatattttaatttttaaatgcagttacaaattataatgtattcatatttgtactttctgttaaaatgcatgattgcagaattgtttagattttgtgtttattcttgatgaaaagctttgtttgttcttgtttttaagtttgcactcaaatcttaagaaataaatccacccatgttatcaaaaaaaaaaaaaaaaaa

SEQ ID NO: 2359 - DNA, 10863 bp, Homo Sapiens
  NM_004459
cgccccccctgcgcccgcccctcccccttcgctttccttctccccccgcctcggctccgacatgaggggccggcggggcaggccgcccaagcagcccgcggctcccgctgcggagcgctgcgccccggccccgccgccaccgccgccgccgcccacgtccggacccatcggggggctccgctcgcggcaccgcggcagcagccggggcaggtgggccgccgcccaggctgaggtggcgcccaagacgcggctgagctcgcccagggggggcagcagtagccggaggaagccgccgccgccgccgccggccccccccagcaccagcgccccgggccggggggggcgaggaggcgggggcggcaggacggggggcgggggcggcggcggccacctggcccggaccaccgcggcccggagggccgtcaacaaagtggtgtacgatgaccacgagagcgaggaggaggaggaagaggaggacatggtctccgaggaggaggaggaggaggacggcgacgccgaggagacccaggattctgaggacgacgaggaggatgagatggaagaggacgacgatgactccgattatccggaggagatggaagacgacgacgacgacgccagttactgcacggaaagcagcttcaggagccatagtacctacagcagcactccaggtaggcgaaaaccaagagtacatcggcctcgttctcctatattggaagaaaaagacatcccgccccttgaatttcccaagtcctctgaggatttaatggtgcctaatgagcatataatgaatgtcattgccatttacgaggtactgcggaactttggcactgttttgagattatctccttttcgctttgaggacttttgtgcagctctggtgagccaagagcagtgcacactcatggcagagatgcatgttgtgcttttgaaagcagttctgcgtgaagaagacacttccaatactacctttggacctgctgatctgaaagatagcgttaattccacactgtatttcatagatgggatgacgtggccagaggtgctgcgggtgtactgtgagagtgataaggagtaccatcacgttcttccttaccaagaggcagaggactacccatatggaccagtagagaacaagatcaaagttctacagtttctagtcgatcagtttcttacaacaaatattgctcgagaggaattgatgtctgaaggggtgatacagtatgatgaccattgtagggtttgtcacaaacttggggatttgctttgctgtgagacatgttcagcagtataccatttggaatgtgtgaagccacctcttgaggaggtgccagaggacgagtggcagtgtgaagtctgtgtagcacacaaggtgcctggtgtgactgactgtgttgctgaaatccaaaaaaataaaccatatattcgacatgaacctattggatatgatagaagtcggaggaaatactggttcttgaaccgaagactcataatagaagaagatacagaaaatgaaaatgaaaagaaaatttggtattacagcacaaaggtccaacttgcagaattaattgactgtctagacaaagattattgggaagcagaactctgcaaaattctagaagaaatgcgtgaagaaatccaccgacacatggacataactgaagacctgaccaataaggctcggggcagtaacaaatcctttctggcggcagctaatgaagaaattttggaatccataagagccaaaaagggagacattgataatgttaaaagcccagaagaaacagaaaaagacaagaatgagactgagaatgactctaaagatgctgagaaaaacagagaagaatttgaagaccagtcccttgaaaaagacagtgacgacaaaacaccagatgatgaccctgagcaaggaaaatctgaggagccaacagaagttggggataaaggtaactctgtgtcagcaaatcttggcgacaacacaacaaatgcaacttcagaagagactagtccctctgaagggaggagccctgtggggtgtctctcagaaacccccgatagcagcaacatggcagagaagaaggtggcatctgagctcccccaggatgtgccagaagaacctaacaagacatgtgagagcagtaacactagtgctaccactacctccatccagcctaatctggaaaacagtaacagcagcagtgaactaaattcttcccagagtgaatctgctaaggcagctgatgatcctgaaaatggagaaagagaatctcatacacctgtctctattcaggaagagatagtaggtgatttcaaatcggagaagtccaacggggagctaagtgaatctcctggagctggaaaaggagcatctggctcaactcgaatcatcaccagattgcggaatccagatagcaaacttagtcagctgaagagccagcaggtggcagccgctgcacatgaagcaaataaattatttaaggagggcaaagaggtactggtagttaactctcaaggagaaatttcacggttgagcaccaaaaaggaagtgatcatgaaaggaaatatcaacaattattttaaattgggtcaagaagggaagtatcgcgtctaccacaatcaatactccaccaattcatttgctttgaataagcaccagcacagagaagaccatgataagagaaggcatcttgcacataagttctgtctgactccagcaggagagttcaaatggaacggttctgtccatgggtccaaagttcttaccatatctactctgagactgactatcacccaattagaaaacaacatcccttcatcctttcttcatcccaactgggcatcacatagggcaaattggatcaaggcagttcagatgtgtagcaaacccagagaatttgcattggctttagccattttggagtgtgcagttaaaccagttgtgatgctaccaatatggcgagaatctttaggacataccaggttacaccggatgacatcaattgaaagagaagaaaaggagaaagtcaaaaaaaaagagaagaaacaggaagaagaagaaacgatgcagcaagcgacatgggtaaaatacacatttccagttaagcatcaggtttggaaacaaaaaggtgaagagtacagagtgacaggatatggtggttggagctggattagtaaaactcatgtttataggtttgttcctaaattgccaggcaatactaatgtgaattacagaaagtcgttagaaggaaccaaaaataatatggatgaaaatatggatgagtcagataaaagaaaatgttcacgaagtccaaaaaaaataaaaatagagcctgattctgaaaaagatgaggtaaaaggttcagatgctgcaaaaggagcagaccaaaatgaaatggatatctcaaagattactgagaagaaggaccaagatgtgaaggagctcttagattctgacagtgataaaccctgcaaggaagaaccaatggaagtagacgatgacatgaaaacagagtcacatgtaaattgtcaggagagttctcaagtagatgtggtcaatgttagtgagggttttcatctaaggactagttacaaaaagaaaacaaaatcatccaaactagatggacttcttgaaaggagaattaaacagtttacactggaagaaaaacagcgactcgaaaaaatcaagttggagggtggaattaagggtataggaaagacttctacaaattcttcaaaaaatctctctgaatcaccagtaataacgaaagcaaaagaagggtgtcagagtgactcgatgagacaagaacagagcccaaatgcaaataatgatcaacctgaggacttgattcagggatgttcagaaagtgattcctcagttcttagaatgagtgatcctagtcataccacaaacaaactttatccaaaagatcgagtgttagatgatgtctccattcggagcccagaaacaaaatgtccgaaacaaaattccattgaaaatgacatagaagaaaaagtctctgaccttgccagtagaggccaggaacccagtaagagtaaaacaaaaggaaatgattttttcatcgatgactctaaactagccagtgcagatgatattggtactttgatctgtaagaacaaaaaaccgctcatacaggaggaaagtgacaccattgtttcttcttccaagagtgctttacattcatcagtgcctaaaagtaccaatgacagagatgccacacctctgtcaagagcaatggactttgaaggaaaactgggatgtgactctgaatctaatagcactttggaaaatagttctgataccgtgtctattcaggatagcagtgaagaagatatgattgttcagaatagcaatgaaagcatttctgaacagttcagaactcgagaacaagatgttgaagtcttggagccgttaaagtgtgagttggtttctggtgagtccactggaaactgtgaggacaggctgccggtcaaggggactgaagcaaatggtaaaaaaccaagtcagcagaagaaattagaggagagaccagttaataaatgtagtgatcaaataaagctaaaaaataccactgacaaaaagaataatgaaaatcgagagtctgaaaagaaaggacagagaacaagtacatttcaaataaatggaaaagataataaacccaaaatatatttgaaaggtgaatgcttgaaagaaatttctgagagtagagtagtaagtggtaatgttgaaccaaaggttaataatataaataaaataatccctgagaatgatattaaatcattgactgttaaagaatctgctataaggccattcattaatggtgatgtcatcatggaagattttaatgaaagaaacagctccgaaacaaaatcgcatttgctgagttcttcagatgctgaaggtaactaccgagatagccttgagaccctgccatcaaccaaagagtctgacagtacacagacgaccacaccctcagcatcttgtccagaaagcaattcagttaatcaggtagaagatatggaaatagaaacctcagaagttaagaaagttacttcatcacctattacttctgaagaggaatctaatctcagtaatgactttattgatgaaaatggtctgcccatcaacaaaaatgaaaatgtcaatggagaatctaaaagaaaaaccgtcatcacagaagtcaccacgatgacctccacagtggccacagaatcaaaaactgtgatcaaggtagaaaaaggcgataagcaaactgtggtttcttccacagaaaattgtgcaaaatccactgtcacaaccaccactacaacagtgaccaagctttccacaccctccacaggcggcagtgtggacatcatctctgtaaaggagcagagcaaaaccgtggtcaccacgacagtgacagactccctgaccaccacgggaggcacactggttacatctatgactgtgagcaaagagtattccacacgagacaaagtgaaactgatgaaattttcaagaccaaagaagactcgttcaggtacagctctgccatcctatagaaaatttgttaccaagagcagcaagaagagcatttttgttttgcctaatgatgacttaaaaaagttggcccgaaaaggaggaatccgagaggtcccttattttaattacaatgcaaaacctgctttggatatatggccatatccttctcctagaccgacctttggcatcacttggaggtatagacttcagacagtaaagtccttagctggagtgagcctgatgttacggttactgtgggcaagtttgagatgggatgatatggcggccaaggctcctccaggaggagggactacacggacagaaacatccgaaactgaaatcacaacaacagaaataattaagaggagagatgttggtccttatggcattcgatctgaatattgtatcaggaaaatcatttgtcccattggagttccagaaacaccaaaagaaacgcctacacctcagaggaaaggccttcgatcaagtgcactgcggccaaagagaccagaaacgcccaagcaaactggccctgttattattgaaacctgggtagcagaagaagaactggaattgtgggagatcagggcatttgctgagagagtggagaaagaaaaggcacaagcagttgagcaacaggctaagaaacgactggagcagcagaagccgacagtgattgcaacttccactacttccccaacaagcagtacaaccagcaccatctctccagcacagaaggttatggtggcccccataagtggctcagttacaactggaaccaaaatggtactaactactaaagttggatctccagctacagtaacattccaacaaaacaagaactttcatcaaacctttgctacatgggttaagcaaggccagtcaaattcaggcgttgttcaagtacagcagaaagtcctgggtatcattccatcaagtacaggtaccagtcagcaaacctttacttcattccagcccaggacagcaacagtcacaattaggcccaatacctcaggctctggaggaaccacaagcaattcacaagtaatcacagggcctcagattcgccctggtatgaccgtgattagaacaccactccaacagtcaacactaggaaaggcaattattcgaacacctgtgatggtacagccaggtgctcctcagcaagtgatgactcaaatcatcagggggcagcctgtctccactgcagtctccgcccctaacacggtttcctcaacacctgggcagaaaagcttaacttcagcaacgtccacttcaaatatacagtcttcagcctcacaaccccctcgcccccaacaaggacaagtgaagctcaccatggctcaacttactcagttaacacagggccacggtggcaatcaaggtttgacagtagtaattcaaggacaaggtcaaactactggacagttgcagttgatacctcaaggggtgactgtactcccaggcccaggccagcagctaatgcaagctgcaatgccaaatggtactgttcagcgattcctctttaccccattggcaacaacagccaccacagccagcaccaccaccaccactgtttccacgacagcagcaggtacaggtgaacaaaggcagagtaaactgtcaccccagatgcaggtacatcaagacaaaaccctgccaccagctcagtcatcaagtgtgggtccagcagaagcccagccacagactgctcagccttcagctcagccccagccccaaacccagccccagtccccagctcagcctgaagttcagactcagcctgaagttcagacccaaacaactgtttcatcccatgtcccttctgaagcacaacccacccacgcacagtcatccaagccccaagttgcagcacagtctcagcctcaaagtaatgtccaaggacagtctcctgttcgtgtccaaagtccatcacagactcgaatacgtccatcaactccatcccaactgtctcctggacaacaatcccaggttcagactacaacctcacaaccgattccaattcaaccacatacatctcttcagataccttcccaaggccagccacagtcacaaccccaggtggtgatgaagcataatgctgtaatagaacatttaaaacagaaaaagagcatgactccagctgaaagagaagagaatcaaagaatgattgtctgtaaccaggtgatgaagtatattttggataagatagataaagaagaaaaacaggcagcaaaaaaacggaagcgtgaagagagtgtggagcagaaacgtagcaagcagaatgccactaagctgtcagctctgctcttcaagcacaaagagcagctcagagccgagatcctgaagaagagagcactcctggacaaggatctgcaaattgaagtgcaggaagagctgaagagagacctgaaaattaagaaagaaaaagacctgatgcagttggctcaggccacagcagtagctgcaccctgccccccagtgacaccagctcctccagcccctccagcccctccaccttcacctccccctccacctgctgtgcaacacacaggccttctgtccacgcccaccttacctgctgcttcccagaagaggaagcgggaagaggaaaaagactccagctcaaagtccaagaaaaagaaaatgatctctactacctcaaaggaaactaagaaggacacaaagctttactgtatctgtaaaacgccttatgatgaatctaaattttatattggctgtgatcggtgtcagaattggtaccatgggcgctgcgttggcatcttgcaaagtgaggcagagctcattgatgagtatgtctgtccacagtgccagtcaacagaggatgccatgacagtgctcacgccactaacagagaaggattatgaggggttgaagagggtgctccgttccttacaggcccataagatggcctggcctttccttgaaccagtagaccctaatgatgcaccagattattatggtgttattaaggaacctatggaccttgccaccatggaagaaagagtacaaagacgatattatgaaaagctgacggaatttgtggcagatatgaccaaaatttttgataactgtcgttactacaatccaagtgactccccattttaccagtgtgcagaagttctcgaatcattctttgtacagaaattgaaaggcttcaaagctagcaggtctcataacaacaaactgcagtctacagcttcttaaagttcagcgtgttaacctaacataaaacacagcaagaatctggttgtctgaactattttaaattaaggagccagatgtttttagtcaggctatcctgacaagacttgacctaaacttcgtttttattggtcataacagtccaattatattcttggccaattttgtccaacggacaagaaaaaagcaaagtcaacgacaccattatcttgtcaagatcagatggttttactattgtggcagaagcgagaaaactttgtttattgaaaaaaaaagaaaaagaaagcaagaaaaaaagatactatggggtcaagtgtaactccatggaaatgccacgtctgctcttcagtgaagaagctggtttagagtctcacagaaaacttttgactgtatttatttattgttgcaaaaaagacgcttttttattgctgccctcatttgtcagctaattattttttcttataaaatccagccccggttacatataatcatctgtatcttatcatgattcctgtaggtaaaagtacaagacgacctctagatgtcttttctttctatgaaaggagctgctatgtacacatgtgcacacacacacaactgggaatcaacaatgagtttattgttcatggtagattaaaattaagcttgcataaaggttgggctaagtggtcctggactacagactctgttgccttgaatataacagtacaatttgtcaattactctgcaccaggctaaaatgagtaaaatctatttgaaggtatcttgtttgtaaacatttgtcagattctaatttttttcttttgtattaaaattcaactatggatgtatatgaaacaaaataaatggagataatttttctcccacagacagaggtgtctttgaatgtgcgctaatgattatctgtaagcctttgtggggagggaggcctgcaaggtcatgaaaggcagaagagtctaattgtgcctggatttctccaggacagcagtggcccctcgttttatcattcccagtccattgtcatcacgtcagagaaaaatcttcaggggtgctaatcctgttgcatcagttgatcatactaacgagaacggtaatgcgacaagatacacattgccttcatctgtacattctgtgataccaggcaaattaccaattacacacagctacttatattttatgaagggcattttttagatgacctcatcctctgtgttatttgttgattgggtttgttttctgtttgttggtttgtttgtttcttccacgtaaggaaaagtagtgtaaacagtagcgagaaaatggaaaccacagaggaagatgtattttgcatgtttttcctttcagtgttcttacacgttgtatcactgcattgtggtaatagcttctataaaatctgccatagttggattatgcagctttgcaaaaatttttactagattttgcactaactcatattagctttgtcctaccaacttctggaatttatctaattattgtttttcaaagtttctttccttttaatgtttccctgctatgcaaaacctttcccagacctcagtttcttaaaagaaagatgttgctacagttcccgattctttcttattacaggctcaggtgtacaggttattctgggttaattttatctaatgaagcccattcctttttgtacataaagatgtcacttaaacttatgcttacaaactaaagactaatcgctcaatatgaaaacatgaaaaaatttttgcttaaagtattaagatggaagtagttaaatatgggttattttgtccttttacttttttaaaaaatgttacatattgtatgcactgtgctgatgcaagaattctacattttaatgagttataaaattattctgcatctcatcacgtcacagtatttctgtactatttattcatatatataaatatatatgggcttaatcatttaaaatttgttgcagcaagaactttcctacctgtaggcaatagattgctatgtttttaacaaattgtggcaaattctaaacagcaattcttttgtacgtaataggacatttcatcctagaaaaataaagtaatgtttttgacattgga

SEQ ID NO: 2360 - DNA, 1853 bp, Homo Sapiens
  NM_004461
ccccccgcccacccgggcccggacacgctgagcacactggaaggagtcatggcggatggtcaggtggcggaactgctgctccggcggctggaggcgtctgatggcggcctggacagcgccgagttggcggctgagctgggcatggagcaccaggcggtggtgggcgccgtgaagagccttcaggcgctgggcgaggtcatcgaggctgaacttcggtccaccaagcactgggagcttactgcggagggcgaggagattgcccgggagggcagccatgaggcccgtgtgtttcgaagcattcccccagagggcctggcccagagcgagcttatgcgactgcccagtggcaaagtgggcttcagcaaggccatgtccaacaagtggattcgggtggacaagagtgcggctgacgggccccgggtgttccgagtggtggacagcatggaggatgaggtgcagcggcggctccagctggtccgggggggacaggctgagaagctgggggagaaggagaggagcgagctgaggaagaggaagctgttggctgaagtgactctgaagacctactgggtgagcaaaggcagtgcctttagtaccagcatctccaagcaagagacagagctgagcccagagatgatctccagtggctcttggcgggaccggcccttcaagccctacaacttcttggcccacggtgtcctccccgacagcggccaccttcacccgctgctcaaggtccgctcccagttccgacagatcttcctggagatggggttcaccgagatgccgactgataacttcattgagagctccttctggaactttgacgccctcttccagccccagcagcacccagcccgtgaccagcacgacaccttcttccttcgagatccagcggaggccctgcagctcccaatggactatgtccagcgggtcaagcggacccactctcagggcggctacggctcacaggggtacaagtataactggaagctggacgaggcccggaaaaacctactgcgaacccacaccacatcagccagcgcccgtgcgctctaccgccttgcccagaagaagcccttcactccggtcaagtacttctccatcgaccgcgtattccggaatgagaccctggacgccacgcacctggctgagttccaccagatcgagggcgtggtggcggatcatggtctcaccttgggccacctcatgggcgttctgcgggagttcttcaccaagctgggtatcacgcaactccgcttcaagccagcctacaacccatacacagagcccagcatggaggtgttcagctaccaccaaggcctgaagaagtgggtggaggtcggaaactcgggggtcttccgtccagagatgctgctgcccatggggcttcccgagaacgtgtcggtcattgcctggggcctctccctggagcgcccaacgatgatcaaatatggcatcaacaatatccgggagctggtgggccacaaggtgaacctgcagatggtgtatgacagtcccctgtgccgcctggatgccgagccgaggccccctcccacacaggaggctgcgtgacatgggccactctaggacaggtcatcctccccgagtccctgctgctgcgctcctttgcatccctggccagtgaccttgtatttatgaggcctctgtgaggccagcccccaccttcctctttcccacctgtcccaggaccagaatcccagggacagaggactgggtagcaggttccttctgttgtcctgtgtggtgtgtctactgtgagggtgggccctgaggagacctgtgggccacctattgtctaataaagtgggcagttgcccccatctggtggc

SEQ ID NO: 2361 - DNA, 2659 bp, Homo Sapiens
  NM_004475
ggcgagcgagcgggcggccggccgctgggggtggcgggataggctgggcgcggccggcgctgcagacccgctgctgttgtccgggtctgtgcggtcccgagggccctccgtgccgccggcgccatgggcaattgccacacggtggggcccaacgaggcgctggtggtttcagggggctgttgtggttccgactataaacagtacgtgtttggcggctgggcctgggcctggtggtgtatctccgacactcagaggatttccctagagattatgacgttgcagccccgctgcgaggacgtagagacggccgagggggtagctttaactgtgacgggtgtcgcccaggtgaagatcatgacggagaaggaactcctggccgtggcttgtgagcagtttctgggtaagaatgtgcaggacatcaaaaacgtcgtcctgcagaccctggagggacatctgcgctccatcctcgggaccctgacagtggagcagatttatcaggaccgggaccagtttgccaagctggtgcgggaggtggcagcccctgatgttggccgcatgggcattgagatcctcagcttcaccatcaaggacgtgtatgacaaagtggactatctgagctccctgggcaagacgcagactgccgtggtgcagagagatgctgacattggcgtggccgaggctgaacgggacgcaggcatccgggaagctgagtgcaagaaggagatgctggatgtgaagttcatggcagacaccaagattgctgactctaagcgagccttcgagctgcaaaagtcagccttcagtgaggaggttaacatcaagacagctgaggcccagttggcctatgagctgcagggggcccgtgaacagcagaagatccggcaggaagagattgagattgaggttgtgcagcgcaagaaacagattgccgtggaggcacaggagatcctgcgtacggacaaggagctcatcgctacagtgcgccggcctgccgaggccgaggcccaccgcatccagcagattgccgagggtgaaaaggtgaagcaggtcctcttggcacaggcagaggctgagaagatccgcaaaatcggggaggcggaagcggcagtcatcgaggcgatgggcaaggcagaggctgagcggatgaagctcaaggcagaagcctaccagaaatacggggatgcagccaagatggccttggtgctagaggccctgccccagattgctgccaaaatcgctgccccacttaccaaggtcgatgagattgtggtcctcagtggagacaacagtaaggtcacatcagaagtgaaccgactgctggccgagctgcctgcctctgtgcatgccctcacaggcgtggacctgtctaagatacccctgatcaagaaggccactggtgtgcaggtgtgaggctcctgcaggcccactctcttcagcagccacccggccctccctccagcacccgttttaatcccacagaacaacgggaacgttactgactctggtgccttatctcgaagggaccagaagtgctgcgtgttcaggccatctctggctgtcttcctgtctctcctgtctgtccacctcctcctcttcctctcctttaccccactttcactgccactttcatcaggtttgtgtctcatctccctgcgtgtcttttcctttgtctgtctttttctttcccccatgcacatcatgtagattaagctgaagatgtttattacaatcactctctgtggggggtggccctgctgctcctcagaatcctggtgccttgaagttctctgtgcatctgtccatcctccctatggccctggccagagctcagcatgggcaggggttctgggtaggacggtcactgtcctctctcctggactggtcttcccagccctaaaccctgccccaggaagcccacagcctcacctgctgctgcccctctaggtctgggcagccatgacctgcagggcccagagacactgtccttcccctcatccacccaaggccccagccagcgctcataccctgtcctttctccctgaccccaagggcacagaggcaaggcctcctgtctacagcagcttcctcagtttcctactgccttaggaggcccctgcttgtgctcagggaaggcctcttcatgggcatgttcctgctggggcggtgcggtttggtcccaactctgctaagttttctgagatgagggtctagccctgttggggacagaaaagtgtgtagaccttcttcctgctagggctgcactgtcctgggtgttgggcccttctggtggacaaggctgtgccaaccctgtacagaatcgagtgctgtagcctggccagaccccagagcccttgtgccatctttcttcctggccagagtgatggggttccagccatggggaagcaacccaatcctctgtctccttgctccaatggaggcagaagagcccaggacccaagcgtcttggcaggggtgctgtgaatgtccagtggtcccagctccccaccctggccctgccccagcctgtgtagctcttcctgcatgtggatgctgcatgtctggtctggggcttggatgttgcactgccccactgcctgtcccttctggtaaaataaagaactcttaatgcccaaaaaaaaaaaaaaaaaaaaaaaaaaaa

SEQ ID NO: 2362 - DNA, 2428 bp, Homo Sapiens
  NM_004479
ctgggcccagcctatagtcagcggtgtctatgggcatggatctggacggggaaaaggacaaagcagcctccatccacagttcattccgggaccaggcccttgcaggcacgcgctgggctcctgtgggaagacactaagggccccaggacagacctcctctccgggcatctgggttcctagatggcagaggtggcagagtggggtgggatggcccaattgggagctttagcttccggcaaagagctgagcacagtacatcttcaatgtgtaagattctcctgggagaccagggcccagctggtggtgagctgggggaagtgggtgatactgccgtgggaggagccacctggccctctggggaagtgcactcgctgtctgcagcgcccaggcctgggtagctgggtgggggctggggggccatctgtgctcagggtgcctgcacctgggccttctctgccctgggccaagcctgcccgagcctctctgtcctctgcctgcccagctggacatctctgggcctctctggagaccagtggggtgggctgtgggggcgtcatattgccctggcttggcatccctcttgtggctgtacccctcccagcagccccaggactagcaagtccccgagatgggggtggggacagtggttgatgccaaaggttgtgggggcaggggcggggcaggagcaggaaggtcccctgagttccctcaccttgggcagagataaaaggagcacagttccaggcggggctgagctagggcgtagctgtgatttcaggggcacctctggcggctgccgtgatttgagaatctcgggtctcttggctgactgatcctgggagactgtggatgaataatgctgggcacggccccacccggaggctgcgaggcttgggggtcctggccggggtggctctgctcgctgccctctggctcctgtggctgctggggtcagcccctcggggtaccccggcaccccagcccacgatcaccatccttgtctggcactggcccttcactgaccagcccccagagctgcccagcgacacctgcacccgctacggcatcgcccgctgccacctgagtgccaaccgaagcctgctggccagcgccgacgccgtggtcttccaccaccgcgagctgcagacccggcggtcccacctgcccctggcccagcggccgcgagggcagccctgggtgtgggcctccatggagtctcctagccacacccacggcctcagccacctccgaggcatcttcaactgggtgctgagctaccggcgcgactcggacatctttgtgccctatggccgcctggagccccactgggggccctcgccaccgctgccagccaagagcagggtggccgcctgggtggtcagcaacttccaggagcggcagctgcgtgccaggctgtaccggcagctggcgcctcatctgcgggtggatgtctttggccgtgccaatggacggccactgtgcgccagctgcctggtgcccaccgtggcccagtaccgcttctacctgtcctttgagaactctcagcaccgcgactacattacggagaaattctggcgcaacgcactggtggctggcactgtgccagtggtgctggggcccccacgggccacctatgaggccttcgtgccggctgacgccttcgtgcatgtggatgactttggctcagcccgagagctggcggctttcctcactggcatgaatgagagccgataccaacgcttctttgcctggcgtgacaggctccgcgtgcgactgttcaccgactggcgggaacgtttctgtgccatctgtgaccgctacccacacctaccccgcagccaagtctatgaggaccttgagggttggtttcaggcctgagatccgctggccgggggaggtgggtgtgggtggaagggctgggtgtcgaaatcaaaccaccaggcatccggcccttaccggcaagcagcgggctaacgggaggctgggcacagaggtcaggaagcaggggtggggggtgcaggtgggcactggagcatgcagaggaggtgagagtgggagggaggtaacgggtgcctgctgcggcagacgggaggggaaaggctgccgaggaccctccccaccctgaacaaatcttgggtgggtgaaggcctggctggaagagggtgaaaggcagggcccttggggctggggggcaccccagcctgaagtttgtgggggccaaacctgggaccccgagcttcctcggtagcagaggccctgtggtccccgagacacaggcacgggtccctgccacgtccatagttctgaggtccctgtgtgtaggctggggcggggcccaggagaccacggggagcaaaccagcttgttctgggctcagggagggagggcggtggacaataaacatctgagcagtgaaaaaaaaaaaaaa

SEQ ID NO: 2363 - DNA, 1582 bp, Homo Sapiens
  NM_004492
gagcacttccgggtcgtcagctcagttctgcggtttctgcggcggctggagaggtggtcggagaagtaggaacctcctgccgggctcgtggcggcttctgtccgctccgcggagggaagcgccttccccacaggacatcaatgcaagcttgaataagaaaaacaaattcttcctcctaagccatggcatatcagttatacagaaatactactttgggaaacagtcttcaggagagcctagatgagctcatacagtctcaacagatcaccccccaacttgcccttcaagttctacttcagtttgataaggctataaatgcagcactggctcagagggtcaggaacagagtcaatttcaggggctctctaaatacgtacagattctgcgataatgtgtggacttttgtactgaatgatgttgaattcagagaggtgacagaacttattaaagtggataaagtgaaaattgtagcctgtgatggtaaaaatactggctccaatactacagaatgaatagaaaaaatatgacttttttacaccatcttctgttattcattgcttttgaagagaagcatagaagagactttttatttattctagaattgcagaaatgactacactgtgctataccagagaattccagtagaaagaaacttgtaactctgtagcctcttacatcacctttattatacagcatgaaaaaccataacttttttttaaggacaaaagttgttgccttcctaagaaccttctttaataaactcattttaaaactctgagtaataactggtgaagctattaaggtagcaatatgaagatattagataatgcattttcccatttcctttgcaaggaacatgatgccctttcagaatgcttatttcaataaagtcatgttttgtcagttgtaactttacctgatgaaagcatcagcaggggcaaaaccaaactctggatggaattttttaagaaaatcccttgctttttaaaatacaaaaccaaagttaatcattggtataaaaaaacccaagtacaacttgattaggaaaagttagacaatcatagcaaaaacaaaaccaaaaaactttccttcttagaccaggtaacatgaggaagggggaaaaaaacccaaacaaaatagtccccccacatgacaggtgtcttcagcttgccatattgatccaaagttcatacattttatcatgtacaagatacattagacttacaataaagtctaattattagacttttatgtcagtggattgtgcttgcagaaatacagaagtaacatactgaccctaggtgaggagtttcttacatggttaactggattgacccaattggagtaaaagatttttgctgttacctcgatgctcctgcagttgttacctcagcatgccactgtagtccttgactctcacattaaaactaactttggctaggtactggtggctcacacctgtaagtaatcccagtactttaggaggctgagactggaggattacttgagtccaggagttggagaccagcctggccaatatagactgtccctacaaagaaaataaaattgtttcatcttccaa

SEQ ID NO: 2364 - DNA, 963 bp, Homo Sapiens
  NM_004493
atccccatcccgtggagtggccggcgacaagatggcagcagcgtgtcggagcgtgaagggcctggtggcggtaataaccggaggagcctcgggcctgggcctggccacggcggagcgacttgtggggcagggagcctctgctgtgcttctggacctgcccaactcgggtggggaggcccaagccaagaagttaggaaacaactgcgttttcgccccagccgacgtgacctctgagaaggatgtgcaaacagctctggctctagcaaaaggaaagtttggccgtgtggatgtagctgtcaactgtgcaggcatcgcggtggctagcaagacgtacaacttaaagaagggccagacccataccttggaagacttccagcgagttcttgatgtgaatctcatgggcaccttcaatgtgatccgcctggtggctggtgagatgggccagaatgaaccagaccagggaggccaacgtggggtcatcatcaacactgccagtgtggctgccttcgagggtcaggttggacaagctgcatactctgcttccaaggggggaatagtgggcatgacactgcccattgctcgggatctggctcccataggtatccgggtgatgaccattgccccaggtctgtttggcaccccactgctgaccagcctcccagagaaagtgtgcaacttcttggccagccaagtgcccttccctagccgactgggtgaccctgctgagtatgctcacctcgtacaggccatcatcgagaacccattcctcaatggagaggtcatccggctggatggggccattcgtatgcagccttgaagggagaaggcagagaaaacacacgctcctctgcccttcctttccctggggtactactctccagcttgggaggaagcccagtagccattttgtaactgcctaccagtcgccctctgtgcctaataaagtctctttttctcacagag

SEQ ID NO: 2365 - DNA, 2397 bp, Homo Sapiens
  NM_004494
gagggaggaggaggagtggggaccgggcggggggtggaggaagaggcctcgcgcagaggagggagcaattgaatttcaaacacaaacaactgcacgagcgcgcacccaccgcgccggagccttgccccgatccgcgcccgccccgtccgtgcggcgcgcgggcggagacgccgtggccgcgccggagctcgggccgggggccaccatcgaggcgggggccgcgcgagggccggagcggagcggcgccgccaccgccgcacgcgcaaacttgggctcgcgcttcccggcccggcgcggagcccggggcgcccggagccccgccatgtcgcgatccaaccggcagaaggagtacaaatgcggggacctggtgttcgccaagatgaagggctacccacactggccggcccggattgacgagatgcctgaggctgccgtgaaatcaacagccaacaaataccaagtcttttttttcgggacccacgagacggcattcctgggccccaaagacctcttcccttacgaggaatccaaggagaagtttggcaagcccaacaagaggaaagggttcagcgaggggctgtgggagatcgagaacaaccctactgtcaaggcttccggctatcagtcctcccagaaaaagagctgtgtggaagagcctgaaccagagcccgaagctgcagagggtgacggtgataagaaggggaatgcagagggcagcagcgacgaggaagggaagctggtcattgatgagccagccaaggagaagaacgagaaaggagcgttgaagaggagagcaggggacttgctggaggactctcctaaacgtcccaaggaggcagaaaaccctgaaggagaggagaaggaggcagccaccttggaggttgagaggccccttcctatggaggtggaaaagaatagcaccccctctgagcccggctctggccgggggcctccccaagaggaagaagaagaggaggatgaagaggaagaggctaccaaggaagatgctgaggccccaggcatcagagatcatgagagcctgtagccaccaatgtttcaagaggagcccccaccctgttcctgctgctgtctgggtgctactggggaaactggccatggcctgcaaactgggaacccctttcccaccccaacctgctctcctcttctactcacttttcccactccaagcccagcccatggagattgacctggatggggcaggccacctggctctcacctctaggtccccatactcctatgatctgagtcagagccatgtcttctccctggaatgagttgaggccactgtgttccttccgcttggagctattttccaggcttctgctggggcctgggacaactgctcccacctcctgacacccttctcccactctcctaggcattctggacctctgggttgggatcaggggtaggaatggaaaggatggagcatcaacagcagggtgggcttgtggggcctgggaggggcaatcctcaaatgcggggtgggggcagcacaggagggcggcctccttctgagctcctgtcccctgctacacctattatcccagctgcctagattcagggaaagtgggacagcttgtaggggaggggctcctttccataaatccttgatgattgacaacacccatttttccttttgccgaccccaagagttttgggagttgtagttaatcatcaagagaatttggggcttccaagttgttcgggccaaggacctgagacctgaagggttgactttacccatttgggtgggagtgttgagcatctgtccccctttagatctctgaagccacaaataggatgcttgggaagactcctagctgtcctttttcctctccacacagtgctcaaggccagcttatagtcatatatatcacccagacataaaggaaaagacacattttttaggaaatgtttttaataaaagaaaattacaaaaaaaaattttaaagacccctaaccctttgtgtgctctccattctgctccttccccatcgttgcccccatttctgaggtgcactgggaggctccccttctatttggggcttgatgactttctttttgtagctggggctttgatgttccttccagtgtcatttctcatccacataccctgacctggccccctcagtgttgtcaccagatctgatttgtaacccactgagaggacagagagaaataagtgccctctcccaccctcttcctactggtctctctatgcctctctacagtctcgtctcttttaccctggcccctctcccttgggctctgatgaaaaattgctgactgtagctttggaagtttagctctgagaaccgtagatgatttcagttctaggaaaataaaacccgttgattactataaaaaaaaaaa

SEQ ID NO: 2366 - DNA, 1696 bp, Homo Sapiens
  NM_004499
aaagggcgccacgagtcggcattgtcaggcggcggcaccgcgcgggacggagcttggctgttggtcggtgggttcccgtgcggcggcggccaaggaggaggagacacagttggagcagctccgtgggctgactggggcgaggcctcagcagcgcgagcttgagtgcggccgagcctgcggcgccttcccctgcgggtggggacgagcgggccccgcggcgtcatcggcggcgaggagccgccgcgcctcggcctagcatgtcggaagcgggcgaggagcagcccatggagacgacgggcgccaccgagaacggacatgaggccgtccccgaaggcgagtcgccggccggggctggcacgggcgccgcggcgggggctggaggcgcgaccgcggcgcccccgagcgggaatcagaacggcgccgagggcgaccagatcaacgccagcaagaacgaggaggacgcgggaaaaatgttcgttggtggcctgagctgggatactagcaaaaaagatttaaaagactattttactaaatttggagaggtcgttgactgtacaataaaaatggatcccaacactggacggtcaagagggtttgggtttatcctgttcaaagatgcagccagtgtggagaaggtcctagaccagaaggagcacaggctggatggccgtgtcattgaccctaaaaaggccatggctatgaagaaggacccggtgaagaaaatcttcgttgggggtctgaatcctgaagccactgaggaaaagatcagggagtactttggcgagtttggggagattgaggccattgaattgccaatggatccaaagttgaacaaaagacgaggttttgtgtttatcacctttaaagaagaagaacccgtgaagaaggttctggagaaaaagttccatactgtcagtggaagcaagtgtgagatcaaggtggcccagcccaaagaagtctatcagcagcagcagtatggctctgggggccgtggaaaccgcaaccgagggaaccgaggcagcggaggtggtggtggaggtggaggtcagggtagtacaaactacggcaagagccagcgacgtggtggccatcagaataactacaagccatactgaggcggcagcaggagcgaccaactgatcgcacacatgctttgtttggatatggagtgaacacaattatgtaccaaatttaacttggcaaactttctattgcctgtcccatgtgcatcttatttaaaatttcccccatggaaatcactctcctgttgactatttccagagctctaggtgtttaggcagcgtgtggtgtctgagaggccatagcgccatcatgggctgatttttattaccaggtcccccagaagcaggtgggaggctctgcttcctgctgccgctctgcagcctggacctgtggaccctggttgtaaagagtaaattgtatcttaggaaaccagtgtcacctttttttcaccttttaattttatattatttgcgtcatacatttcctgtaacggaagtgttaattttactgtactttttggtaccttttgggaatctaatgtattgtaaggtattttacacgtgtcctgattttgccacaacctggatattgaagctatccaagcttttgaaataaaatttaaaaacccccaagcctgggtgagtgtgggataaaaaaaaaaaaaaaaaaaaaa

SEQ ID NO: 2367 - DNA, 8684 bp, Homo Sapiens
  NM_004504
gggaaggtggcggcggcggcggcggttgtcccggctgtgccggttggtgtggcccgtcagcccgcgtaccacagcgcccgggccgcgtcgagcccagtacagccaagccgctgcggccgggtccggcgcgggcggcgcgcgcagacggagggcggcggccgcggccagggcggcccgtgggaccgcgggcccccggcgcagcgctgcccggctcccggccctgccggcctcctcccttggcgccgcggccatggcggccagcgcgaagcggaagcaggaggagaagcacctgaagatgctgcgggacatgaccggcctcccgcacaaccgaaagtgcttcgactgcgaccagcgcggccccacctacgttaacatgacggtcggctccttcgtgtgtacctcctgctccggcagcctgcgaggattaaatccaccacacagggtgaaatctatctccatgacaacattcacacaacaggaaattgaattcttacaaaaacatggaaatgaagtctgtaaacagatttggctaggattatttgatgatagatcttcagcaattccagacttcagggatccacaaaaagtgaaagagtttctacaagaaaagtatgaaaagaaaagatggtatgtcccgccagaacaagccaaagtcgtggcatcagttcatgcatctatttcagggtcctctgccagtagcacaagcagcacacctgaggtcaaaccactgaaatctcttttaggggattctgcaccaacactgcacttaaataagggcacacctagtcagtccccagttgtaggtcgttctcaagggcagcagcaggagaagaagcaatttgaccttttaagtgatctcggctcagacatctttgctgctccagctcctcagtcaacagctacagccaattttgctaactttgcacatttcaacagtcatgcagctcagaattctgcaaatgcagattttgcaaactttgatgcatttggacagtctagtggttcgagtaattttggaggtttccccacagcaagtcactctccttttcagccccaaactacaggtggaagtgctgcatcagtaaatgctaattttgctcattttgataacttccccaaatcctccagtgctgattttggaaccttcaatacttcccagagtcatcaaacagcatcagctgttagtaaagtttcaacgaacaaagctggtttacagactgcagacaaatatgcagcacttgctaatttagacaatatcttcagtgccgggcaaggtggtgatcagggaagtggctttgggaccacaggtaaagctcctgttggttctgtggtttcagttcccagtcagtcaagtgcatcttcagacaagtatgcagctctggcagaactagacagcgttttcagttctgcagccacctccagtaatgcgtatacttccacaagtaatgctagcagcaatgtttttggaacagtgccagtggttgcttctgcacagacacagcctgcttcatcaagtgtgcctgctccatttggagctacgccttccacaaatccatttgttgctgctgctggtccttctgtggcatcttctacaaacccatttcagaccaatgccagaggagcaacagcggcaacctttggcactgcatccatgagcatgcccacaggattcggcactcctgctccctacagtcttcccaccagctttagtggcagctttcagcagcctgcctttccagcccaagcagctttccctcaacagacagctttttctcaacagcccaatggtgcaggttttgcagcatttggacaaacaaagccagtagtaaccccttttggtcaagttgcagctgctggagtatctagtaatccttttatgactggtgcaccaacaggacaatttccaacaggaagctcatcaaccaatcctttcttatagccttatatagacaatttactggaacgaacttttatgtggtcacattacatctctccacctcttgcactgttgtcttgtttcactgatcttagctttaaacacaagagaagtctttaaaaagcctgcattgtgtattaaacaccaggtaatatgtgcaaaaccgagggctccagtaacaccttctaacctgtgaattggcagaaaagggtagcggtatcatgtatattaaaattggctaatattaagttattgcagataccacattcattatgctgcagtactgtacatatttttcttagaaattagctatttgtgcatatcagtatttgtaactttaacacattgttatgtgagaaatgttactggggaaatagatcagccacttttaaggtgctgtcatatatcttggaatgaatgacctaaaatcattttaaccattgctactggaaagtaacagagtcaaaattggaaggttttattcattcttgaatttttcctttctaaagagctcttctatttatacatgcctaaattcttttaaaatgtagagggatacctgtctgcataataaagctgatcatgttttgctacagtttgcaggtgaaaaaaaataaatattataaaatatgctattgtttttgtgttcttgctgcaatgcctttaccaaagtggccttaaatatgagtagtgaattgagaacatcttgaattcttaaaagacttcttagtgactttttataaaaaggccatgtagaaaatttattaaaactactatgactgctacattcaggaatatgccagtggtaaagcatttaaatgtagcttgtcagatttaccataatcctactaatttctttgcagcttattaattttgtgaaatttgtatatatgaagaatttgcatgtatgtgtatttacaaatttttctaagtatcttgaattctcagactgcaaaaggcctattttaactattgattttttttaaaaaaaattgtctttgaatgtattggaagtagacatgcattaactgtgacattattgcacctcagtttttttctttctttttttgggcaaactgatattatctataggatatttgtttatgtttgttttttgggggaaagaaactggaactcagtgttaccttaaagttacggaatactttgttttaaaggaaaagataataagtttagttatatctttttgttaatattcaaatgaacttgtttaagtatctatgtacagtaatgcctcattcatctagaggtaatctggcagtcttgtgaaaaccgaacacaactcagaaacttggaatcgttttttttaaaaatgcctctgagcaacccatataagtcacaaagtctgtgtgttagagcttatgcatttgtttttatgagagattttaataaatttaattatttgcttgtccagactatagcatattagctgtttagaagggatggcttgaaaggaaggagactgaaaaacactctgagagcatacactgtccaaggccattagtgtaaggaccgctacccagcctagaggacatcactatactacatcatctgatgattattctttattatgcctctaggtaattaagtaaaggtgaaattgcatacacagatatgtagtacatattttaaaagttttatcttaaattgattaaaactttttaaaaagctttggtattaaaagaggtaaacatcagtttcctcaaacattttattcatgttgaatgcctttttgcaatgatgactgagttgttatcatagtattttaaaacctgtatagtgttttagacttgttaaaacattgctgtctagtgtacatctagctaaaagtgtggtttatctaaaccgttttaataagcaagatgactgggaaatctctgccccttttctgagcagtatgcctcttcttttagaattaaatgaatgctgcacaggtccagatgtgtgttgatgtagacttgaaatgtctccacattttggaggacttcctcagcccttttcattgagggaaaatatatttgaatttctgttttagattgtatcgggtcccagttgattcatgtgtacaaagttatgctacctaattacagaccattacccaaatatcctaccaggctttccatctgaatagtaaattaaacagttgttatcaaaatgattttaaagactatttctttttctgggtaactattgaagtttgtaattaaatgggggctcttactgactttaaattagcgcttataaaataaaaatgtttagttcaagaagagacccaagctgggtatggtggtgtgagagcctgtgagtcctagctacctggaggtgaggtgggaacatcacttgagcccaggagttggaggctgcagtgcgctacgatcacaccactgcacaccagcctggggatagagtgagatcccatctctaaaaaatgaaaaaaagaagagaggtagctttaaagtggtttttctcatgatattcactgtttattattaaagaaaatcagctttcgttagacttttacatttagatttattctagttttatatagaccatcaaaattatgttgagtactaaaaaggagaaaaaatcctggaaggtaacaaggctgaagaccttcaaatttcctggcttactggtttagtcacatcatttttcctgttcaggtatctgcagatatccctgttcaggaaagatcttttttcaggatggcaaacttttgacatagtttaaagacattttttccccattttttgaaatagagaatattttattatttttgtgaaaatagagttttggtaatcactttcttcctcaaaataagtccttctgttaatttgtaaaagcacattagtgctttacctgtgaaattccccgcccccctgcacacacacccactttagtacagttcctgtcaattggcaacatggagagggtgacctggctgctggtttaccactgtaccaacatctctggagcattttagtttcagaaccttaacactccccaacagctttgttgatgtagcttgtatctctgagaatttattgtattaaaattaatactgagatatttttaaaacatgtttatttatttaagtataacagtaataaactaataacttgctaacataaataccatttttgataaaaataacttttccaaaacaaaaactaatgagaacaggaacattgttttacattttatgcatttaaatctggcttaataaaagcagtgagattttcatgctgcttttgcattccaacttaaaaattacacagcatacacacgctggaaaactccactgtgcacttgtgagatcaggagaatgaaaactatgtaatatctcagtagtacaatgaaaatagtttgacttttcacagcctttcaaagaaagggttgtagggaccattaagggtctccagactctttgagaaccactatactttaaatttgtgtatttctagaacagtatttacttgcagggcaaacataactattccctgggttttttttgtttgctagtgagaactgaaattgcagactttttaacactacttcaaggtaataatagcagtggtattatgggctgtgtatgagatagtcatttgtaaaacaattttcatatttcatctcttacaatccctgcagtggacctatacttttaggatgaaagaagcaaagcatagagaggttaagctagtggcagctttttgctctggggaacagatttggattaaatgctatcacatttatatatgaatgcattctttcttaatattttgaaattctgaacaagttaacgttcttgtcttgtatatctaaaaaaactttaatcacttgaattcctttcataatttgatgaaatcagtacagtttattcttggtttttttttttaactttagaagtaaattaatatggtaactagtggagcgtgctttagattgaagactcatctgaagtatcacagactcctattttgtaaagcattccacctttattgatacagtttgtggcctatacacttttaaaatttattttttaaaaggtgatattaaaatttgtatttaacctgttgtattcatcctcattagttaagtttttctttttatgttttaaaacttagtgacattaaacttttcacgtggttgtttgtgaacagatgaatatataaccacgatgtaatccagtgttgtgctgctgaatgtttaacaaccatctttcatgaaagaaaaaaggccctgttttgtagcatttactaatatttatggtataaatactgtcttcatggtgattttacctgccaatctgatgtcattaaatgcagtttgatgaaagagatagccaaccagtggctttcccaagccttggcaaaccagcttcagcacagcaaaggacatacaattccacaactcattaattaaatgtattggtcatttgatgattatatccagtatttggagagcttttatattgttaattcatttagcaagcatttgaacacttgtttatttttagagatatactgggcactgaggtatttaatctgcaaagacccaagtatcgtgaaccttggttttaaaaagtccaattattgtgctcttataggggttgcacattcaaggcttacactgaattctgtctgcagttctgttttgtgtgaccagcacagtgttttaaaacgttgcattctgaatccatctttttgaaatggggcatgtactcttaaggtggccactagcttaccattcccaatttttcttagtctcaaacattcacatgtttttcaaggccttggagttggcaaatcctgaatatatagtgaaggtaggaaatagctcttcttatgccacatcttagtctgattttgaagtcagttgtgtaagtttgggctgacagtggtattttccagtgaagactatcgccaagaatgcatatcattctgcttattttattctagtggataaaaattcaacgtatatttaagtgtatttttgacatctgtgcttgtccaacacagggctgtagggactgatgaaaagagaatgttgtgatttgagcttttataaaaaaagataagtgatcctagataaaatattttagatggtgattaaaatgcccatagattaattttttaatcggttctctgaaatcttgagatgttatccaagttacaatttaagcaatgagagtaaaatttgaattctaaattctcagcatcttccctcattcttgagtggagagacagaggaagcaaacgccaaggagccttctaattttgactatatgatcattaactaaaggcagcaagggattgtaaactaatcttacatagtcaatgtttcatagaatgctttggttacaatcaggttttttaaagactttaaaggttttttgtatgctataatatatgcttatgatttctaaaaattatgcagtatacacaaagggcataaagtcaaaaagtgtgtctccctctgtgactttattctcataccccagaggcatataatttcttgtattcttgtgtagtctttaagaaatgttatcgtttattttatatatggctctctctctgtatgcctcttcctgttcttattttaaatgttcaagtttgtgacttggttcttgtttaacttggttgtctttccatattgccaccttccagctctaacattaatgtctccaggattccattatatggatgtccctttgggagaacatttgtttatagacttttctactaaaaatattgttataatgataatatccttatgcatatatgaagattactcttgattctgcctgactggaaactttattaataaagtagacattattctattttgaggctcaccagctgtgtaggtatgatcttgtgcttccatttaagaaattcttccatttaaagaagaaaaaaaatctctctgactatctgaagatatatgaaaaagcctatgcttttaaattaaactgttaagacagtccattgaaagattgtggaagttcacatctattttgcaccttaattttttcattgtccctactcatgactctaaaaagtgcatggcttggggctatactttgttttgcagtttgttggtatcgtgcctttccttatctacattagcttagactataccttatttttaagaagagaaagtggaaattaactgtggcaaaacctattttggcacaaccacatttgttcattatacaaaattagcttcctatgctttagaaaaaatgtgagttattactctgaaagttgtgattctgattcctcatggtttggagctcagaaatttcttaacatgtctttgctgttagtcaagcacaggatttgttttctgcaaaagtttattttcaatgaagaatacttgtcctaatagctcataaaaagtacctttgcactttaaatcctaggaatagggaacaaggaaacttactgggaagttcaaaagaaagaataacaggaccttctagtcagcagggcatgtttggaaaatgttaatacgccatgatttttgaagaccaattttagttcaggaggtggttttaaatattggatgaaaacttacaggctgttttcaatattcatttctgaaatactttagtatgatagataaatttggttaagttcttgttcattgtgaaatactgttggaagaatttttttcaaaataaagacttctgaatttgtgtaccatttggaaaaaaaaaaaaaaaaaa

SEQ ID NO: 2368 - DNA, 2697 bp, Homo Sapiens
  NM_004506
acttgtccgtcacgtgcggccgcccggcctctcggccttgccgcgcgcctggcggggttgggggggcggggaccaagatctgctgcgcctgcgttgtgggcgttctcggggagctgctgccgtagctgccgccgccgctaccaccgcgttcgggtgtagaatttggaatccctgcgccgcgttaacaatgaagcagagttcgaacgtgccggctttcctcagcaagctgtggacgcttgtggaggaaacccacactaacgagttcatcacctggagccagaatggccaaagttttctggtcttggatgagcaacgatttgcaaaagaaattcttcccaaatatttcaagcacaataatatggcaagctttgtgaggcaactgaatatgtatggtttccgtaaagtagtacatatcgactctggaattgtaaagcaagaaagagatggtcctgtagaatttcagcatccttacttcaaacaaggacaggatgacttgttggagaacattaaaaggaaggtttcatcttcaaaaccagaagaaaataaaattcgtcaggaagatttaacaaaaattataagtagtgctcagaaggttcagataaaacaggaaactattgagtccaggctttctgaattaaaaagtgagaatgagtccctttggaaggaggtgtcagaattacgagcaaagcatgcacaacagcaacaagttattcgaaagattgtccagtttattgttacattggttcaaaataaccaacttgtgagtttaaaacgtaaaaggcctctacttctaaacactaatggagcccaaaagaagaacctgtttcagcacatagtcaaagaaccaactgataatcatcatcataaagttccacacagtaggactgaaggtttaaagccaagggagaggatttcagatgacatcattatttatgatgttactgatgataatgcagatgaagaaaatatcccagttattccagaaactaatgaggatgttatatctgatccctccaactgtagccagtaccctgatattgtcatcgttgaagatgacaatgaagatgagtatgcacctgtcattcagagtggagagcagaatgaaccagccagagaatccctaagttcaggcagtgatggcagcagccctctcatgtctagtgctgtccagctaaatggctcatccagtctgacctcagaagatccagtgaccatgatggattccattttgaatgataacatcaatcttttgggaaaggttgagctgttggattatcttgacagtattgactgcagtttagaggacttccaggccatgctatcaggaagacaatttagcatagacccagatctcctggttgatcttttcactagttctgtgcagatgaatcccacagattacatcaataatacaaaatctgagaataaaggattagaaactaccaagaacaatgtagttcagccagtttcggaagagggaagaaaatctaaatccaaaccagataagcagcttatccagtataccgcctttccacttcttgcattcctcgatgggaaccctgcttcttctgttgaacaggcgagtacaacagcatcatcagaagttttgtcctctgtagataaacccatagaagttgatgagcttctggatagcagcctagacccagaaccaacccaaagtaagcttgttcgcctggagccattgactgaagctgaagctagtgaagctacactgttttatttatgtgaacttgctcctgcacctctggatagtgatatgccacttttagatagctaaatccccaggaagtggactttacatgtatatattcatcaaaatgatgaactatttattttaaagtatcatttggtactttttttgtaaattgctttgttttgtttaatcagatactgtggaataaaagcaccttttgcttttctcactaaccacacactcttgcagagctttcaggtgttactcagctgcatagttacgcagatgtaatgcacattattggcgtatctttaagttggattcaaatggccatttttctccaattttggtaaattggatatcttttttttacaaatacgaccattaacctcagttaaatttttgtttgttttcctgtttgatgctgtctatttgcattgagtgtaagtcatttgaactaatggtataactcctaaagctttctctgctccagttatttttattaaatatttttcacttggcttatttttaaaactgggaacataaagtgcctgtatcttgtaaaacttcatttgtttcttttggttcagagaagttcatttatgttcaaagacgtttattcatgttcaacaggaaagacaaagtgtacgtgaatgctcgctgtctgatagggttccagctccatatatatagaaagatcgggggtgggatgggatggagtgagccccatccagttagttggactagttttaaataaaggttttccggtttgtgtttttttgaaccatactgtttagtaaaataaatacaatgaatgttgagtactagtgtctgttatgtgtcttctttagaggtgacactcacatgaaacaattttttcttctcataggaagcagtagctttaaactgtctgtggttcattattctcaatatgaatcataccaagatatttgtgcctcatctcgaaaatatattgtatattg

SEQ ID NO: 2369 - DNA, 2150 bp, Homo Sapiens
  NM_004508
ctcaggttcccggtgcttcgcgcgtctgccgttgtcacaggccagggaggtggcaccaccaggcgaagcttggcgagattgtgtcgtcaagcgcgtacgggcgccaattggccgggcgatgtggcgtggactggcgctggcgcgagcgattggctgcgcggcccgggggcggggccagtgggcggtgcgcgccgcagactgtgctcaaagcgggcgccatccgggaccggcggttgtctgtggccggaggctgatcagtgttctagaacagatcagacattttgtaatgatgcctgaaataaacactaaccacctcgacaagcaacaggttcaactcctggcagagatgtgtatccttattgatgaaaatgacaataaaattggagctgagaccaagaagaattgtcacctgaacgagaacattgagaaaggattattgcatcgagcttttagtgtcttcttattcaacaccgaaaataagcttctgctacagcaaagatcagatgctaagattacctttccaggttgttttacgaatacgtgttgtagtcatccattaagcaatccagccgagcttgaggaaagtgacgcccttggagtgaggcgagcagcacagagacggctgaaagctgagctaggaattcccttggaagaggttcctccagaagaaattaattatttaacacgaattcactacaaagctcagtctgatggtatctggggtgaacatgaaattgattacattttgttggtgaggaagaatgtaactttgaatccagatcccaatgagattaaaagctattgttatgtgtcaaaggaagaactaaaagaacttctgaaaaaagcagccagtggtgaaattaagataacgccatggtttaaaattattgcagcgacttttctctttaaatggtgggataacttaaatcatttgaatcagtttgttgaccatgagaaaatatacagaatgtgaatatgtaggtaaatgattacagaaaaatttatctgcttaacaaacttagaatgactttttccttttaaatttagttctatcattaatttatcattaaatttagttctatcatttggtactatcattaatgtattatatacactgatactttaaaacttgtgtggaaaaaactaacttataattttgtatcacacaccctggatatgtgttctgtttctaagcgacatttgtgagagattattgtaaaatgagagcgagcaaataaaacttaatttaatctttgcagatacatacttatgggaaatttgaacaaatgagtgaaactctgtttttagtaggctgtgataaacatttccggagcacttgcagaggacttgctatttgccaggtgctttatgtatcattaaatttttctcatagttcagaaaaatgtgcaaaggaaactattgtctcgctccttcaaaacagtcttaattaactttcatattagcagattaaactagcagagcaggttcaagggaaattaaatgatatggaccctaatttgtatcattctgagttgattgtgtggtttattcattctggaaacatgttgatacttacagtcagccactgcttttgataagtgatattgattaggttgaatcttcttgtaaatagtatttaccagttagcaaagtctgtgttttcagaattacagtgagcacagaggtgttcataaaatgggaattgagtcccactcggtaagagttgcttaaacttgacactgttgacatttgggctggataaaacccctgtggtggggtctgtgctgtgcattgcaggatggtgagcagcgtccctctcatgtgacacccacagttatgccggatgttgccagatgcccctaggggacagagtcaacccccaactgaggaccactgtcctacagagtcaggaaatattgtagggagaaaaaaataacaacaacaaaggcctgtgttaatgttaaatagatgagattatggaatgtgtatattaatgttaaaaattgtaccttgatcaatgtactttttataaacttgccatagatatctcagatttgaaacctcaagacagatttattattcttaaatgctgtatgataatgaagaaaaataaaaatttatttcttgcaaagttaaaaaaaaaaaaaaaa

SEQ ID NO: 2370 - DNA, 1776 bp, Homo Sapiens
  NM_004512
gggggctgtagctggtgagaggaagtcctagaggctatggacactctgctgctgggatcaccgagatgagcagcagctgctcagggctgagcagggtcctggtggccgtggctacagccctggtgtctgcctcctccccctgcccccaggcctggggccccccaggggtccagtatgggcagccaggcaggtccgtgaagctgtgttgtcctggagtgactgccggggacccagtgtcctggtttcgggatggggagccaaagctgctccagggacctgactctgggctagggcatgaactggtcctggcccaggcagacagcactgatgagggcacctacatctgccagaccctggatggtgcacttgggggcacagtgaccctgcagctgggctaccctccagcccgccctgttgtctcctgccaagcagccgactatgagaacttctcttgcacttggagtcccagccagatcagcggtttacccacccgctacctcacctcctacaggaagaagacagtcctaggagctgatagccagaggaggagtccatccacagggccctggccatgcccacaggatcccctaggggctgcccgctgtgttgtccacggggctgagttctggagccagtaccggattaatgtgactgaggtgaacccactgggtgccagcacacgcctgctggatgtgagcttgcagagcatcttgcgccctgacccaccccagggcctgcgggtagagtcagtaccaggttacccccgacgcctgcgagccagctggacataccctgcctcctggccgtgccagccccacttcctgctcaagttccgtttgcagtaccgtccggcgcagcatccagcctggtccacggtggagccagctggactggaggaggtgatcacagatgctgtggctgggctgccccatgctgtacgagtcagtgcccgggactttctagatgctggcacctggagcacctggagcccggaggcctggggaactccgagcactgggaccataccaaaggagataccagcatggggccagctacacacgcagccagaggtggagcctcaggtggacagccctgctcctccaaggccctccctccaaccacaccctcggctacttgatcacagggactctgtggagcaggtagctgtgctggcgtctttgggaatcctttctttcctgggactggtggctggggccctggcactggggctctggctgaggctgagacggggtgggaaggatggatccccaaagcctgggttcttggcctcagtgattccagtggacaggcgtccaggagctccaaacctgtagaggacccaggagggcttcggcagattccacctataattctgtcttgctggtgtggatagaaaccaggcaggacagtagatccctatggttggatctcagctggaagttctgtttggagcccatttctgtgagaccctgtatttcaaatttgcagctgaaaggtgcttgtacctctgatttcaccccagagttggagttctgctcaaggaacgtgtgtaatgtgtacatctgtgtccatgtgtgaccatgtgtctgtgaggcagggaacatgtattctctgcatgcatgtatgtaggtgcctggggagtgtgtgtgggtccttggctcttggcctttccccttgcaggggttgtgcaggtgtgaataaagagaataaggaagttcttggaaaaaaaaaaaaaaaaaaaaaaaaaaaaaaaaaaaaaaaaaaaaaaaaaaaaaa

SEQ ID NO: 2371 - DNA, 1637 bp, Homo Sapiens
  NM_004515
ggcaagacgcctcttcagttgtctgctactcagaggaaggggcggttggtgcggcctccattgttcgtgttttaaggcgccatgaggggtgacagaggccgtggtcgtggtgggcgctttggttccagaggaggcccaggaggagggttcaggccctttgtaccacatatcccatttgacttctatttgtgtgaaatggcctttccccgggtcaagccagcacctgatgaaacttccttcagtgaggccttgctgaagaggaatcaggacctggctcccaattctgctgaacaggcatctatcctttctctggtgacaaaaataaacaatgtgattgataatctgattgtggctccagggacatttgaagtgcaaattgaagaagttcgacaggtgggatcctataaaaaggggacaatgactacaggacacaatgtggctgacctggtggtgatactcaagattctgccaacgttggaagctgttgctgccctggggaacaaagtcgtggaaagcctaagagcacaggatccttctgaagttttaaccatgctgaccaacgaaactggctttgaaatcagttcttctgatgctacagtgaagattctcattacaacagtgccacccaatcttcgaaaactggatccagaactccatttggatatcaaagtattgcagagtgccttagcagccatccgacatgcccgctggttcgaggaaaatgcttctcagtccacagttaaagttctcatcagactactgaaggacttgaggattcgttttcctggctttgagcccctcacaccctggatccttgacctactaggccattatgctgtgatgaacaaccccaccagacagcctttggccctaaacgttgcatacaggcgctgcttgcagattctggctgcaggactgttcctgccaggttcagtgggtatcactgacccctgtgagagtggcaactttagagtacacacagtcatgaccctagaacagcaggacatggtctgctatacagctcagactctcgtccgaatcctctcacatggtggctttaggaagatccttggccaggagggtgatgccagctatcttgcttctgaaatatctacctgggatggagtgatagtaacaccttcagaaaaggcttatgagaagccaccagagaagaaggaaggagaggaagaagaggagaatacagaagaaccacctcaaggagaggaagaagaaagcatggaaactcaggagtgacattcccttcactccttttcctacccaagggggaagactggagcctaagctgcctgctactgggctttacatggtgacagacatttccgtgggatagggaagatagcaggaagaaaagtaaactccatagaagtgtcattccactgggttttgatattggcttagctgccagtctcccatttgtgacctatgccatccatctataatggaggataccaacatttcttcctaatattctataatctccaactcctgaaaacccctctctcaactaatactttgctgttgaaatgttgtgaaatgttaagtgtctggaaatttttttttctaagaaaaactattaaagtacttcctagtaaaaaaaaaaaaaaaaaaaaaaaaaa

SEQ ID NO: 2372 - DNA, 3745 bp, Homo Sapiens
  NM_004516
aaagggggcggggcttcagccggtcacgtgttcccgcacctccccggcgcgcgcctgcccgcccgcccgctcgcccccggtccggactcctcctcctcctcttctcgccattgcagttggacccagcagcccggcgcgcaccgcgtggcttttgggggcagaccccggcgggctgtggcaggagggcggcggcggcggctgcggtcgaagaaggggacgccgacaagagttgaagtattgataacaccaaggaactctatcacaatttgaaaagataagcaaaagtttgatttccagacactacagaagaagtaaaaatgcgtccaatgcgaatttttgtgaatgatgaccgccatgtgatggcaaagcattcttccgtttatccaacacaagaggagctggaggcagtccagaacatggtgtcccacacggagcgggcgctcaaagctgtgtccgactggatagacgagcaggaaaagggtagcagcgagcaggcagagtccgataacatggatgtgcccccagaggacgacagtaaagaaggggctggggaacagaagacggagcacatgaccagaaccctgcggggagtgatgcgggtgggcctggtggcaaagggcctcctactcaagggggacttggatctggagctggtgctgctgtgtaaggagaagcccacaaccgccctcctggacaaggtggccgacaacctggccatccagcttgctgctgtaacagaagacaagtacgaaatactgcaatctgtcgacgatgctgcgattgtgataaaaaacacaaaagagcctccattgtccctgaccatccacctgacatcccctgttgtcagagaagaaatggagaaagtattagctggagaaacgctatcagtcaacgaccccccggacgttctggacaggcagaaatgccttgctgccttggcgtccctccgacacgccaagtggttccaggccagagccaacgggctgaagtcttgtgtcattgtgatccgggtcttgagggacctgtgcactcgcgtgcccacctggggtcccctccgaggctggcctctcgagctcctgtgtgagaaatccattggcacggccaacagaccgatgggtgctggcgaggccctgcggagagtgctggagtgcctggcgtcgggcatcgtgatgccagatggttctggcatttatgacccttgtgaaaaagaagccactgatgctattgggcatctagacagacagcaacgggaagatatcacacagagtgcgcagcacgcactgcggctcgctgccttcggccagctccataaagtcctaggcatggaccctctgccttccaagatgcccaagaaaccaaagaatgaaaacccagtggactacaccgttcagatcccaccaagcaccacctatgccattacgcccatgaaacgcccaatggaggaggacggggaggagaagtcgcccagcaaaaagaagaagaagattcagaagaaagaggagaaggcagagcccccccaggctatgaatgccctgatgcggttgaaccagctgaagccagggctgcagtacaagctggtgtcccagactgggcccgtccatgcccccatctttaccatgtctgtggaggttgatggcaattcattcgaggcctctgggccctccaaaaagacggccaagctgcacgtggccgttaaggtgttacaggacatgggcttgccgacgggtgctgaaggcagggactcgagcaagggggaggactcggctgaggagaccgaggcgaagccagcagtggtggcccctgccccagtggtagaagctgtctccacccctagtgcggcctttccctcagatgccactgccgagcaggggccgatcctgacaaagcacggcaagaacccagtcatggagctgaacgagaagaggcgtgggctcaagtacgagctcatctccgagaccgggggcagccacgacaagcgcttcgtcatggaggtcgaagtggatggacagaagttccaaggtgctggttccaacaaaaaggtggcgaaggcctacgctgctcttgctgccctagaaaagcttttccctgacacccctctcgcccttgatgccaacaaaaagaagagagccccagtacccgtcagagggggaccgaaatttgctgctaagccacataaccctggcttcggcatgggaggccccatgcacaacgaagtgcccccaccccccaaccttcgagggcggggaagaggcgggagcatccggggacgagggcgcgggcgaggatttggtggcgccaaccatggaggctacatgaatgccggtgctgggtatggaagctatgggtacggaggcaactcggcgacagcaggctacagtgactttttcacagactgctacggctatcatgattttgggtcttcctagagcgtctaaaagtattgcacacaaaatcaactttttactccaatttcctccaactccaaaacccaaagtgtccgtgctgtgtccctgtgcttcactgggtttctcaaccgtggcttttcaccgcagcttgtctgaaactcttagcctgcagaatttaagacaatggcagtttttatcgtgatttgcctttgaacttggtcctattgaagttcacaataagtggaaaacaattttttcagagaatgtatttttgtgcagaattgcacagaattctagagacagcgttgttcggcatcaaggcaaaagcccacctttgctttttatggaaagcattactttatttaaagagacagacaatgacgcattttaatctacctttgtcttaatttacagcaggttttgtatgaatttttaaccttttaacaaactcccaaatctggttgatgcctttgacagtgatgaaaacgatttcaccacatctgaatccagagaaaccggctttttttcttattgcgagcatgttaaaacgttgggaacatgtggggaattgtatattgcgctgaattaacttctcccgcctcttgtaatgctctggtgggttcttgtttgggaatgcgatattttgtggctggtttagctagagagtgaactctcaaaggtatcaaaactgtgcttccattattagtgcaagaaacagacaggctttaaggggtagatgacgtgaaattttgcaagtcttaattacagctgcagatgcatgggattctggatttttttgttgctttttagtttaatgggactttaaaagtaattgaggagaaagaaccgtgatgttccctgtttctccagtaaaggactggcttttgcttgggcagaggtggtgctgctgggtgtgcagctgccacagactccaaaggcgtagaagtttgtgccaacacacggagtcattctggctctctgctgaggcccctgttttctggcaggtgccctccttggaaactggttttggctctgatcagcggttctttttgcagcaaagcctgcatctgtgttgacttgcaagattttgcgtttattcaggcaaaaactggtcaaaatggttactacatgatttgttcccagaggtttgaaacattcagtgaaactttttaaaactttgattgcatgatgtattttttttttagaaagttattgtttgagaataatgtctttttataccaggaaaatagttatcctgaatgacgttgaaaactccccctcccctttatttttttttaatcaatacatgtgaaagtaacaagcaaaaaaaaaaaaaaaaa

SEQ ID NO: 2373 - DNA, 1817 bp, Homo Sapiens
  NM_004517
agcgccacgggcggggcggggccggcggcgggctgcgggcgcggccggacgggagttccccggagaaggatcctgcagcccgagtcccgaggataaagcttggggttcatcctccttccctggatcactccacagtcctcaggcttccccaatccaggggactcggcgccgggacgctgctatggacgacattttcactcagtgccgggagggcaacgcagtcgccgttcgcctgtggctggacaacacggagaacgacctcaaccagggggacgatcatggcttctcccccttgcactgggcctgccgagagggccgctctgctgtggttgagatgttgatcatgcggggggcacggatcaatgtaatgaaccgtggggatgacacccccctgcatctggcagccagtcatggacaccgtgatattgtacagaagctattgcagtacaaggcagacatcaatgcagtgaatgaacacgggaatgtgcccctgcactatgcctgtttttggggccaagatcaagtggcagaggacctggtggcaaatggggcccttgtcagcatctgtaacaagtatggagagatgcctgtggacaaagccaaggcacccctgagagagcttctccgagagcgggcagagaagatgggccagaatctcaaccgtattccatacaaggacacattctggaaggggaccacccgcactcggccccgaaatggaaccctgaacaaacactctggcattgacttcaaacagcttaacttcctgacgaagctcaacgagaatcactctggagagctatggaagggccgctggcagggcaatgacattgtcgtgaaggtgctgaaggttcgagactggagtacaaggaagagcagggacttcaatgaagagtgtccccggctcaggattttctcgcatccaaatgtgctcccagtgctaggtgcctgccagtctccacctgctcctcatcctactctcatcacacactggatgccgtatggatccctctacaatgtactacatgaaggcaccaatttcgtcgtggaccagagccaggctgtgaagtttgctttggacatggcaaggggcatggccttcctacacacactagagcccctcatcccacgacatgcactcaatagccgtagtgtaatgattgatgaggacatgactgcccgaattagcatggctgatgtcaagttctctttccaatgtcctggtcgcatgtatgcacctgcctgggtagcccccgaagctctgcagaagaagcctgaagacacaaacagacgctcagcagacatgtggagttttgcagtgcttctgtgggaactggtgacacgggaggtaccctttgctgacctctccaatatggagattggaatgaaggtggcattggaaggccttcggcctaccatcccaccaggtatttcccctcatgtgtgtaagctcatgaagatctgcatgaatgaagaccctgcaaagcgacccaaatttgacatgattgtgcctatccttgagaagatgcaggacaagtaggactggaaggtccttgcctgaactccagaggtgtcgggacatggttgggggaatgcacctccccaaagcagcaggcctctggttgcctcccccgcctccagtcatggtactaccccagccatggggtccatccccttcccccatccctaccactgtggccccaagaggggcgggctcagagctttgtcacttgccacatggtgtctcccaacatgggagggatcagccccgcctgtcacaataaagtttattatgaaaaaaaaaaaaaaaaaaaaaa

SEQ ID NO: 2374 - DNA, 5905 bp, Homo Sapiens
  NM_004521
ctcctcccgcaccgccctgtcgcccaacggcggcctcaggagtgatcgggcagcagtcggccggccagcggacggcagagcgggcggacgggtaggcccggcctgctcttcgcgaggaggaagaaggtggccactctcccggtccccagaacctccccagcccccgcagtccgcccagaccgtaaagggggacgctgaggagccgcggacgctctccccggtgccgccgccgctgccgccgccatggctgccatgatggatcggaagtgagcattagggttaacggctgccggcgccggctcttcaagtcccggctccccggccgcctccacccggggaagcgcagcgcggcgcagctgactgctgcctctcacggccctcgcgaccacaagccctcaggtccggcgcgttccctgcaagactgagcggcggggagtggctcccggccgccggccccggctgcgagaaagatggcggacctggccgagtgcaacatcaaagtgatgtgtcgcttcagacctctcaacgagtctgaagtgaaccgcggcgacaagtacatcgccaagtttcagggagaagacacggtcgtgatcgcgtccaagccttatgcatttgatcgggtgttccagtcaagcacatctcaagagcaagtgtataatgactgtgcaaagaagattgttaaagatgtacttgaaggatataatggaacaatatttgcatatggacaaacatcctctgggaagacacacacaatggagggtaaacttcatgatccagaaggcatgggaattattccaagaatagtgcaagatatttttaattatatttactccatggatgaaaatttggaatttcatattaaggtttcatattttgaaatatatttggataagataagggacctgttagatgtttcaaagaccaacctttcagttcatgaagacaaaaaccgagttccctatgtaaaggggtgcacagagcgttttgtatgtagtccagatgaagttatggataccatagatgaaggaaaatccaacagacatgtagcagttacaaatatgaatgaacatagctctaggagtcacagtatatttcttattaatgtcaaacaagagaacacacaaacggaacaaaagctgagtggaaaactttatctggttgatttagctggtagtgaaaaggttagtaaaactggagctgaaggtgctgtgctggatgaagctaaaaacatcaacaagtcactttctgctcttggaaatgttatttctgctttggctgagggtagtacatatgttccatatcgagatagtaaaatgacaagaatccttcaagattcattaggtggcaactgtagaaccactattgtaatttgctgctctccatcatcatacaatgagtctgaaacaaaatctacactcttatttggccaaagggccaaaacaattaagaacacagtttgtgtcaatgtggagttaactgcagaacagtggaaaaagaagtatgaaaaagaaaaagaaaaaaataagatcctgcggaacactattcagtggcttgaaaatgagctcaacagatggcgtaatggggagacggtgcctattgatgaacagtttgacaaagagaaagccaacttggaagctttcacagtggataaagatattactcttaccaatgataaaccagcaaccgcaattggagttataggaaattttactgatgctgaaagaagaaagtgtgaagaagaaattgctaaattatacaaacagcttgatgacaaggatgaagaaattaaccagcaaagtcaactggtagagaaactgaagacgcaaatgttggatcaggaggagcttttggcatctaccagaagggatcaagacaatatgcaagctgagctgaatcgccttcaagcagaaaatgatgcctctaaagaagaagtgaaagaagttttacaggccctagaagaacttgctgtcaattatgatcagaagtctcaggaagttgaagacaaaactaaggaatatgaattgcttagtgatgaattgaatcagaaatcggcaactttagcgagtatagatgctgagcttcagaaacttaaggaaatgaccaaccaccagaaaaaacgagcagctgagatgatggcatctttactaaaagaccttgcagaaataggaattgctgtgggaaataatgatgtaaagcagcctgagggaactggcatgatagatgaagagttcactgttgcaagactctacattagcaaaatgaagtcagaagtaaaaaccatggtgaaacgttgcaagcagttagaaagcacacaaactgagagcaacaaaaaaatggaagaaaatgaaaaggagttagcagcatgtcagcttcgtatctctcaacatgaagccaaaatcaagtcattgactgaataccttcaaaatgtggaacaaaagaaaagacagttggaggaatctgtcgatgccctcagtgaagaactagtccagcttcgagcacaagagaaagtccatgaaatggaaaaggagcacttaaataaggttcagactgcaaatgaagttaagcaagctgttgaacagcagatccagagccatagagaaactcatcaaaaacagatcagtagtttgagagatgaagtagaagcaaaagcaaaacttattactgatcttcaagaccaaaaccagaaaatgatgttagagcaggaacgtctaagagtagaacatgagaagttgaaagccacagatcaggaaaagagcagaaaactacatgaacttacggttatgcaagatagacgagaacaagcaagacaagacttgaagggtttggaagagacagtggcaaaagaacttcagactttacacaacctgcgcaaactctttgttcaggacctggctacaagagttaaaaagagtgctgagattgattctgatgacaccggaggcagcgctgctcagaagcaaaaaatctcctttcttgaaaataatcttgaacagctcactaaagtgcacaaacagttggtacgtgataatgcagatctccgctgtgaacttcctaagttggaaaagcgacttcgagctacagctgagagagtgaaagctttggaatcagcactgaaagaagctaaagaaaatgcatctcgtgatcgcaaacgctatcagcaagaagtagatcgcataaaggaagcagtcaggtcaaagaatatggccagaagagggcattctgcacagattgctaaacctattcgtcccgggcaacatccagcagcttctccaactcacccaagtgcaattcgtggaggaggtgcatttgttcagaacagccagccagtggcagtgcgaggtggaggaggcaaacaagtgtaatcgtttatacatacccacaggtgttaaaaagtaatcgaagtacgaagaggacatggtatcaagcagtcattcaatgactataacctctactcccttgggattgtagaattataacttttaaaaaaaatgtataaattatacctggcctgtacagctgtttcctacctactcttcttgtaaactctgctgcttcccaacacaactagagtgcaattttggcatcttaggagggaaaaaggacagtttacaactgtggccctatttattacacagtttgtctatcgtgtcttaaatttagtctttactgtgccaagctaactgtaccttataggactgtactttttgtattttttgtgtatgtttattttttaatctcagtttaaattacctagctgctactgcttcttgtttttcttttcctattaaaacgtcttcctttttttttcttaagagaaaatggaacatttaggttaaatgtctttaaattttaccacttaacaacactacatgcccataaaatatatccagtcagtactgtattttaaaatcccttgaaatgatgatatcagggttaaaattacttgtattgtttctgaagtttgctcctgaaaactactgtttgagcactgaaacgttacaaatgcctaataggcatttgagactgagcaaggctacttgttatctcatgaaatgcctgttgccgagttattttgaatagaaatattttaaagtatcaaaagcagatcttagtttaagggagtttggaaaaggaattatatttctctttttcctgattctgtactcaacaagtcttgatggaattaaaatactctgctttattctggtgagcctgctagctaatataagtattggacaggtaataatttgtcatctttaatattagtaaaatgaattaagatattataggattaaacataattttatacggttagtactttattggccgacctaaatttatagcgtgtggaaattgagaaaaatgaagaaacaggacagatatatgatgaattaaaaatatatataggtcaattttggtctgaaatccctgaggtgtttttaacctgctacactaatttgtacactaatttatttctttagtctagaaatagtaaattgtttgcaagtcactaataatcattagataaattattttcttggccatagccgataattttgtaatcagtactaagtgtatacgtatttttgccactttttcctcagatgattaaagtaagtcaacagcttattttaggaaactgtaaaagtaatagggaaagagatttcactatttgcttcatcagtggtaggggggcggtgactgcaactgtgttagcagaaattcacagagaatggggatttaaggttagcagagaaacttggaaagttctgtgttaggatcttgctggcagaattaactttttgcaaaagttttatacacagatatttgtattaaatttggagccatagtcagaagactcagatcataattggcttatttttctatttccgtaactattgtaatttccacttttgtaataattttgatttaaaatataaatttatttatttatttttttaatagtcaaaaatctttgctgttgtagtctgcaacctctaaaatgattgtgttgcttttaggattgatcagaagaaacactccaaaaattgagatgaaatgttggtgcagccagttataagtaatatagttaacaagcaaaaaaagtgctgccaccttttatgatgattttctaaatggagaaacatttggctgcatccacatagacctttatgttttgttttcagttgaaaacttgcctcctttggcaacattcgtaaatgaagcagaatttttttttctcttttttccaaatatgttagttttgttcttgtaagatgtatcatgggtattggtgctgtgtaatgaacaacgaattttaattagcatgtggttcagaatatacaatgttaggtttttaaaaagtatcttgatggttcttttctatttataatttcagactttcataaagtgtaccaagaatttcataaatttgttttcagtgaactgctttttgctatggtaggtcattaaacacagcacttactcttaaaaatgaaaatttctgatcatctaggatattgacacatttcaatttgcagtgtctttttgactggatatattaacgttcctctgaatggcattgatagatggttcagaagagaaactcaatgaaataaagagaatatttattcatggcgattaattaaattatttgcctaacttaagaaaactactgtgcgtaactctcagtttgtgcttaactccatttgacatgaggtgacagaagagagtctgagtctacctgtggaatatgttggtttattttcagtgcttgaagatacattcacaaatacttggtttgggaagacaccgtttaattttaagttaacttgcatgttgtaaatgcgttttatgtttaaataaagaggaaaattttttgaaatgtaaaaaaaaaaaaaaaaaa

SEQ ID NO: 2375 - DNA, 6927 bp, Homo Sapiens
  NM_004522
gatggctgagcgcgcaggagcccgggaggtctgagccgggcgaggctcgctccctgcgcatcgcctcctccgcccgccgcgtggtcgcgggcaggtgggccggggggcgctgggcaggggcggggcagggccagggcaggccggtctgcagccggaggggccggagcggagaagctgcccaccttcccgggctcggagcggccggggctgctcagccggccgggctcgcgatgacctgctgagaagcgtcgtcggaggctgcaggaggcggcctagctgtgggcggtgcagctcgcggcctcctccctcgtcgttcccggccccggccccccacccatccccgtgccccctccctaccgccggccgagatggcggatccagccgaatgcagcatcaaagtgatgtgccggttccggcccctcaacgaagcggagatcctccgcggggacaaattcatccccaaatttaaaggcgatgagaccgtggtgatcgggcaagggaagccatatgtcttcgacagagtgctacctcccaacacgacccaagagcaggtttacaatgcatgtgcgaagcaaattgtcaaagatgtccttgaaggttataacgggacgatttttgcgtatgggcagacttcatcaggaaaaacccacaccatggaggggaagctgcatgacccccagctcatggggatcatcccacgaattgcccatgatatctttgaccatatctactccatggatgagaacctggagtttcacataaaggtttcctattttgagatctacttggacaaaataagggacttacttgatgtatccaagaccaacttggctgttcatgaagataaaaacagagtcccgtatgtaaaggggtgcactgagcggtttgtgtcgagccctgaggaagtcatggatgtaatagatgaaggcaaagcaaaccgacacgtggctgtgacaaacatgaatgaacacagctctagaagtcacagtatcttcctgataaatattaaacaagagaatgtagagactgaaaaaaaactcagtgggaaactttatttggttgatttggctgggagcgaaaaggtcagcaaaactggtgccgagggagctgttcttgacgaagctaaaaatatcaataagtctttgtctgctcttggaaatgtgatctctgctttggcagaagggacaaaaacacatgtgccataccgggacagcaagatgactcggattcttcaggactctttgggtgggaactgcagaaccaccatcgtcatttgctgttctccttctgtcttcaatgaggctgagaccaagtccacactgatgttcggacagagagctaagaccatcaagaatacagtctctgtgaacctagaactgacagcagaagaatggaagaagaaatatgaaaaagagaaagagaaaaacaagactttgaagaatgttatccagcatctggagatggagctaaacaggtggaggaatggagaagctgtgcctgaggatgaacagatcagtgccaaggaccagaagaacctggagccttgtgataacacccccatcatagacaatattgctcctgttgttgctggcatctctacagaggagaaagagaagtacgatgaggagatctccagtctctacagacaactggatgacaaggatgatgaaattaaccagcagagccagctggctgaaaagctgaagcaacagatgttggatcaggatgagcttttagcttccacaagaagagactatgagaagatacaggaggagctgacacgtctccagattgaaaatgaggcagccaaggatgaggtgaaagaagttctccaggccctggaggagctggctgtcaattatgaccagaaatcacaggaagtggaggataagacccgggccaatgagcagctgacagacgagctggcccagaaaacgactacattgacaaccacacagagagagctgagccagctacaagagcttagcaaccaccagaagaaaagggcaactgagatcctgaatttgctgttgaaagatctgggggagataggtggaattattggcaccaatgatgtgaaaactttggcagatgtgaatggagtcattgaggaggagtttaccatggcccgcctgtacatcagcaagatgaagtcagaggtcaagtccctggtgaaccgcagcaaacagctcgagagcgcccagatggactccaacaggaagatgaatgccagcgagcgggagctggcagcctgccagctgctcatctcccagcacgaagccaagatcaagtctctgacagactacatgcagaacatggaacagaagaggaggcagctagaagagtcccaggactcgctcagcgaagagctggcaaagctccgagcccaggaaaaaatgcacgaagtcagcttccaggataaggagaaggaacatctgacgcggttgcaggatgctgaagaaatgaagaaggcgctggagcagcagatggagagccaccgggaagctcaccagaagcagctgtccagactccgagacgaaattgaggagaagcagaaaatcattgatgagattcgggatttgaatcagaaactgcaactggaacaggagaagcttagttctgattataacaagctgaaaatagaggaccaagagagagaaatgaagctggaaaagctcttattgctcaacgataaaagggaacaagccagagaagacctcaaagggctggaggagacagtgtctagagaattgcagacactgcacaaccttcggaaactctttgtccaggatctgaccacccgagttaaaaaaagtgtggagttggacaacgatgatggagggggcagtgctgcccagaagcagaaaatttccttcttggagaataacctggagcagctcaccaaagttcacaagcagctggtccgggacaacgcagacctgcgctgtgaactgcccaagctggagaagcggctgcgtgccacggcggagcgcgtcaaggctctggagagcgcgctgaaggaggccaaggagaacgccatgcgggaccgtaagcgctaccagcaggaggtggatcgtatcaaggaggccgtgcgggccaagaacatggccagaagggcccattcagcccagatcgccaagcccatccgccccggacactacccggcctcatctccaacggccgtccatgccattcgagggggaggaggcagctcttcaaattccactcactaccagaaataaatacaaaatatgactccacgtagcatgtcaaggactacattaatcaccaattcctttatttttccccccctacagtttccattttttttttatacttgcttactccagccatctgcagtacaccagtttcaggtcttttgagctgtgtagagtttctgtgtgtacagatgtgtgctcggacttttctctttttgagaaatctgaaggagatggttgcagaagatccacttactactgagaaccattaccaccgactcggcctccggggtgttgggtggtttctgggtggttcctggagcctcctctgggcagtgcactgtcccatctgtacgccctaatgtgccattccctagaggggaacaaccaagtgccgtggaggcagatgatcatggtctgcctcaactgtctggtttcctgtaaaataaacacattgttttatatttttagggaacaaaaagtgctgctatagggttcaaagttttccttctgaacacttttccgaaacaaattaccccaaagacacattttgaatatcctggtcacatctttggatctgtaaaatataccttttagtatggcacctgttaaaatgcaaagcaaatttctttggggcagaaaaacaatctgacagtagcagtgtagaatttgttcattcaaatacatctgtgtaaatgcaaaaagtcataaaattcacctccgagctgcttgcttttgaacctgcagcaactagtcttagccggcccggtttgaacatcgttctttcagaagtgctgaaaatgctgcaaagttggataagtggaaatgtggctgcccctctcctcactacttcctctctgatcgttctgaagcttgcattgggaatggctgctttctctaaccattttcagcttgagtgggtattgctgaagaaatccaacatcattccagcagttgaaaaaggaagccttcgggagaaagtgcttgtcaaaattttgttctttgtgcttgtgtatgagtaagttgccatgaataagttattattttaacccataattggcgactgtttatatgaattctttctttggcaccaaataggtttcatcttcttaggcacaattagaaaaaatccacatagatggatattttacatttagttattgctttatccaaatacatgaatctaaagctgaatcaacccttacttccagttgtgcttattaagaagatcaatttccaagtagtaaagttttcagggaaactgactgtgctgctatttgttttgacaaatttgggggtaagtcaatgacaaccaaaccaatctcggtggaaactcctatcctatcatgttgtgtgcccaagatgagtgagctggcactgtgccctgaagctttcaccactgtaatgaaatatatgccaggggagactttgggcttttctcatgactgtgtgggtcgaaggtagctcaagtgtgtgtgtgtgtgtgtgtgtgtgtgtgtgtgtgtgtgtgtatgtgtgtaaagtgctaagaactgtgcattgacatccaaacatttcttgtacaaaatttccctagcaaagcaaacctgctttgacttaatttatttgttaaatgttgcactttgtttatgtatgttttgtttttggtggggaataaggagagagaggacgacaaattctattgaagtatttattttgtgaagatggcaattttgcatttgtttaaatttttttcattctttaattttgttatcagtgccagcccaatatacctgctctaccattatttgcggtctgataaaagggtccttgtggggcaggttttgcaaagcttatcaggtaataacatatgccacataaccttgttgatatgtttgcttctgatttgggaagctaaacattggtgtttgagaggattgccaattattaattgtcattaccactactctccattactttttgtttggaaattgaacaaaggtcagtaatggtttttggctcttgttaatatccatcataaaatagattgttttagattctttccagggtgatttttccctgggtaccccgtttctacttctaaagaattgcttggcactttcatgtttcaaagggaaacattcgcttgtagttccattttacttgatctctacaagggactgacaacatttgctttatttttattcacagagaaagttggctttgatgtctcttaaagataattctgctagttgctgatcagccagtcagttcacctagcttcaatctttataggacttctaatctaattttcctatagtgtgactaaaagggaggcaaattattggaacggattattcaaatggatccttaaatattgctatgtataataagccagttattatatcaggaccatgttctctgtaggccactttctaaaaaagccacatatgtgcaattttcaggtttttagactattgctccctgtactttaaatgtaaaaaccacacttctgaacaactaagctcatgaatatgattttggttatatgcagcttttgactagcatgtattgtgtctttttctcctctatgaataattttatatttcatgctacttcttgaaagtttactctttgatgctctaagagaacagccagatggtttatatgaataatctttatctgcaggatggtggattggtaaattaggagaatgttgtttgagatatcaagatttatgtctgggaactaaaatatataatgccaaatgtgtttttgtcaattactagagaattctgtgcaaacatatcatctcttcaaatgctgcacactttgcttttgttaaacagcaggtagtagacagaacaataacagtttcgcgttaagacttttaaaggaaatagaatcgtgattaagaaatcagaatttatagatatattgggataaatgaagaaataaaaatgtttgtctagaatgtagcatctagtgactttttaaagccctaacgtttacataaagaagctctagttcttatagaaataacaaagcaaataaaagttcttaacaatcccctctttcgaagtgcatttttttaaagcagggcaggagacatttggactctagctatatgacatactgggaaaggcagagggtggagggaagatttcacttcattgtctagcccagaatcttgagcaagctaaagaaaccatcataatctaaaattgcttcatttaacactaacaatttagactttttaaaccaagcattgaataatggctggataactgccgaagtaagcgccgctccatgaagtctgcttacttatttaaaaattgtgtatcagttttaaatactgttcattgtgtgcagatataaggggaatagggcattctgtagaattatacatgtctagtttgtaaagtgtgtcctgtgtactgcagatgtgtgttctctgggctttatgtatctgtacagtagctttcacattaaaaaaattgtggacaaacttgtccggggggtttgaggggagaatggtggtttatatcaataacgatgctgtactatagtccatgtaacaaaagatctggaagtcaccctcctctggcccacggaaaattttggtaatcttctaggttctaaaatgaagatgtatgggtactctggcagactgcatgttgtataatttgaaaaatactaaaagtggaaaataaaattgaattaaactttg

SEQ ID NO: 2376 - DNA, 5101 bp, Homo Sapiens
  NM_004523
agcgcagccattggtccggctactctgtctctttttcaaattgaggcgccgagtcgttgcttagtttctggggattcgggcggagacgagattagtgatttggcggctccgactggcgcgggacaaacgccacggccagagtaccgggtagagagcggggacgccgacctgcgtgcgtcggtcctccaggccacgccagcgcccgagagggaccagggagactccggcccctgtcggccgccaagcccctccgcccctcacagcgcccaggtccgcggccgggccttgattttttggcggggaccgtcatggcgtcgcagccaaattcgtctgcgaagaagaaagaggagaaggggaagaacatccaggtggtggtgagatgcagaccatttaatttggcagagcggaaagctagcgcccattcaatagtagaatgtgatcctgtacgaaaagaagttagtgtacgaactggaggattggctgacaagagctcaaggaaaacatacacttttgatatggtgtttggagcatctactaaacagattgatgtttaccgaagtgttgtttgtccaattctggatgaagttattatgggctataattgcactatctttgcgtatggccaaactggcactggaaaaacttttacaatggaaggtgaaaggtcacctaatgaagagtatacctgggaagaggatcccttggctggtataattccacgtacccttcatcaaatttttgagaaacttactgataatggtactgaattttcagtcaaagtgtctctgttggagatctataatgaagagctttttgatcttcttaatccatcatctgatgtttctgagagactacagatgtttgatgatccccgtaacaagagaggagtgataattaaaggtttagaagaaattacagtacacaacaaggatgaagtctatcaaattttagaaaagggggcagcaaaaaggacaactgcagctactctgatgaatgcatactctagtcgttcccactcagttttctctgttacaatacatatgaaagaaactacgattgatggagaagagcttgttaaaatcggaaagttgaacttggttgatcttgcaggaagtgaaaacattggccgttctggagctgttgataagagagctcgggaagctggaaatataaatcaatccctgttgactttgggaagggtcattactgcccttgtagaaagaacacctcatgttccttatcgagaatctaaactaactagaatcctccaggattctcttggagggcgtacaagaacatctataattgcaacaatttctcctgcatctctcaatcttgaggaaactctgagtacattggaatatgctcatagagcaaagaacatattgaataagcctgaagtgaatcagaaactcaccaaaaaagctcttattaaggagtatacggaggagatagaacgtttaaaacgagatcttgctgcagcccgtgagaaaaatggagtgtatatttctgaagaaaattttagagtcatgagtggaaaattaactgttcaagaagagcagattgtagaattgattgaaaaaattggtgctgttgaggaggagctgaatagggttacagagttgtttatggataataaaaatgaacttgaccagtgtaaatctgacctgcaaaataaaacacaagaacttgaaaccactcaaaaacatttgcaagaaactaaattacaacttgttaaagaagaatatatcacatcagctttggaaagtactgaggagaaacttcatgatgctgccagcaagctgcttaacacagttgaagaaactacaaaagatgtatctggtctccattccaaactggatcgtaagaaggcagttgaccaacacaatgcagaagctcaggatatttttggcaaaaacctgaatagtctgtttaataatatggaagaattaattaaggatggcagctcaaagcaaaaggccatgctagaagtacataagaccttatttggtaatctgctgtcttccagtgtctctgcattagataccattactacagtagcacttggatctctcacatctattccagaaaatgtgtctactcatgtttctcagatttttaatatgatactaaaagaacaatcattagcagcagaaagtaaaactgtactacaggaattgattaatgtactcaagactgatcttctaagttcactggaaatgattttatccccaactgtggtgtctatactgaaaatcaatagtcaactaaagcatattttcaagacttcattgacagtggccgataagatagaagatcaaaaaaaggaactagatggctttctcagtatactgtgtaacaatctacatgaactacaagaaaataccatttgttccttggttgagtcacaaaagcaatgtggaaacctaactgaagacctgaagacaataaagcagacccattcccaggaactttgcaagttaatgaatctttggacagagagattctgtgctttggaggaaaagtgtgaaaatatacagaaaccacttagtagtgtccaggaaaatatacagcagaaatctaaggatatagtcaacaaaatgacttttcacagtcaaaaattttgtgctgattctgatggcttctcacaggaactcagaaattttaaccaagaaggtacaaaattggttgaagaatctgtgaaacactctgataaactcaatggcaacctggaaaaaatatctcaagagactgaacagagatgtgaatctctgaacacaagaacagtttatttttctgaacagtgggtatcttccttaaatgaaagggaacaggaacttcacaacttattggaggttgtaagccaatgttgtgaggcttcaagttcagacatcactgagaaatcagatggacgtaaggcagctcatgagaaacagcataacatttttcttgatcagatgactattgatgaagataaattgatagcacaaaatctagaacttaatgaaaccataaaaattggtttgactaagcttaattgctttctggaacaggatctgaaactggatatcccaacaggtacgacaccacagaggaaaagttatttatacccatcaacactggtaagaactgaaccacgtgaacatctccttgatcagctgaaaaggaaacagcctgagctgttaatgatgctaaactgttcagaaaacaacaaagaagagacaattccggatgtggatgtagaagaggcagttctggggcagtatactgaagaacctctaagtcaagagccatctgtagatgctggtgtggattgttcatcaattggcggggttccatttttccagcataaaaaatcacatggaaaagacaaagaaaacagaggcattaacacactggagaggtctaaagtggaagaaactacagagcacttggttacaaagagcagattacctctgcgagcccagatcaacctttaattcacttgggggttggcaattttatttttaaagaaaacttaaaaataaaacctgaaaccccagaacttgagccttgtgtatagattttaaaagaatatatatatcagccgggcgcggtggctcatgcctgtaatcccagcactttgggaggctgaggcgggtggattgcttgagcccaggagtttgagaccagcctggccaacgtggcaaaacctcgtctctgttaaaaattagccgggcgtggtggcacactcctgtaatcccagctactggggaggctgaggcacgagaatcacttgaacccaggaagcggggttgcagtgagccaaaggtacaccactacactccagcctgggcaacagagcaagactcggtctcaaaaacaaaatttaaaaaagatataaggcagtactgtaaattcagttgaattttgatatctacccatttttctgtcatccctatagttcactttgtattaaattgggtttcatttgggatttgcaatgtaaatacgtatttctagttttcatataaagtagttcttttataacaaatgaaaagtatttttcttgtatattattaagtaatgaatatataagaactgtactcttctcagcttgagcttacataggtaaatatcaccaacatctgtccttagaaaggaccatctcatgttttttttcttgctatgacttgtgtattttcttgcatcctccctagacttccctatttcgctttctcctcggctcactttctccctttttatttttcaccaaaccatttgtagagctacaaaaggtatcctttcttattttcagtagtcagaattttatctagaaatcttttaacacctttttagtggttatttctaaaatcactgtcaacaataaatctaaccctagttgtatccctcctttcagtatttttcacttgttgccccaaatgtgaaagcatttcattcctttaagaggcctaactcattcaccctgacagagttcacaaaaagcccacttaagagtatacattgctattatgggagaccacccagacatctgactaatggctctgtgcccacactccaagacctgtgccttttagagaagctcacaatgatttaaggactgtttgaaacttccaattatgtctataatttatattcttttgtttacatgatgaaactttttgttgttgcttgtttgtatataatacaatgtgtacatgtatctttttctcgattcaaatcttaacccttaggactctggtatttttgatctggcaaccatatttctggaagttgagatgtttcagcttgaagaaccaaaacagaaggaatatgtacaaagaataaattttctgctcacgatgagtttagtgtgtaaagtttagagacatctgactttgatagctaaattaaaccaaaccctattgaagaattgaatatatgctacttcaagaaactaaattgatctcgtagaattatcttaataaaataatggctataatttctctgcaaaatcagatgtcagcataagcgatggataatacctaataaactgccctcagtaaatccatggttaataaatgtggtttctacattaaaaaaaaaaaaaaaaaaaaaaaaa

SEQ ID NO: 2377 - DNA, 6551 bp, Homo Sapiens
  NM_004536
tggcacagatctccagaaacccttgtaatttcctgagtgacaggggtgatagaaacatcttttattagaatacttggtcttggttcctgacacaagagcttctaagacctttggaatctccaagtgataagagtgtatgacagtgagctaactggtggctgggatcctttagacaacttcaggatgggggctatcccctgaaagactaaggcatgattagaggtctgggatttgcagccccacgcctcgacctccagagagggtaaaagggctggagattgattaaccaccagttgccagtgatttaaccaatcatgcctaagtgatggcacctccattaaaaaataaaccacaggtttggagagctttcggtttggttaaccccaaccacataccaagaaggcgatgcacctcaaactgcatgaagacaaaaggtcctgtgctcacctgggacccttctggacgttgccctgtgtacctcttcgactgcctgttcatctacgacgaaccccgggtattgaccccagacaacaatgccacttcatattggggacttcgtctgggattccaaggtgcattcattgcaaagttccttaaatattttctcactgcttcctactaaaggacggacagagcatttgttcttcagccacatactttccttccactggccagcattctcctctattagactagaactgtggataaacctcagaaaatggccacccagcagaaagcctctgacgagaggatctcccagtttgatcacaatttgctgccagagctgtctgctcttctgggcctagatgcagttcagttggcaaaggaactagaagaagaggagcagaaggagcgagcaaaaatgcagaaaggctacaactctcaaatgcgcagtgaagcaaaaaggttaaagacttttgtgacttatgagccgtacagctcatggataccacaggagatggcggccgctgggttttacttcactggggtaaaatctgggattcagtgcttctgctgtagcctaatcctctttggtgccggcctcacgagactccccatagaagaccacaagaggtttcatccagattgtgggttccttttgaacaaggatgttggtaacattgccaagtacgacataagggtgaagaatctgaagagcaggctgagaggaggtaaaatgaggtaccaagaagaggaggctagacttgcgtccttcaggaactggccattttatgtccaagggatatccccttgtgtgctctcagaggctggctttgtctttacaggtaaacaggacacggtacagtgtttttcctgtggtggatgtttaggaaattgggaagaaggagatgatccttggaaggaacatgccaaatggttccccaaatgtgaatttcttcggagtaagaaatcctcagaggaaattacccagtatattcaaagctacaagggatttgttgacataacgggagaacattttgtgaattcctgggtccagagagaattacctatggcatcagcttattgcaatgacagcatctttgcttacgaagaactacggctggactcttttaaggactggccccgggaatcagctgtgggagttgcagcactggccaaagcaggtcttttctacacaggtataaaggacatcgtccagtgcttttcctgtggagggtgtttagagaaatggcaggaaggtgatgacccattagacgatcacaccagatgttttcccaattgtccatttctccaaaatatgaagtcctctgcggaagtgactccagaccttcagagccgtggtgaactttgtgaattactggaaaccacaagtgaaagcaatcttgaagattcaatagcagttggtcctatagtgccagaaatggcacagggtgaagcccagtggtttcaagaggcaaagaatctgaatgagcagctgagagcagcttataccagcgccagtttccgccacatgtctttgcttgatatctcttccgatctggccacggaccacttgctgggctgtgatctgtctattgcttcaaaacacatcagcaaacctgtgcaagaacctctggtgctgcctgaggtctttggcaacttgaactctgtcatgtgtgtggagggtgaagctggaagtggaaagacggtcctcctgaagaaaatagcttttctgtgggcatctggatgctgtcccctgttaaacaggttccagctggttttctacctctcccttagttccaccagaccagacgaggggctggccagtatcatctgtgaccagctcctagagaaagaaggatctgttactgaaatgtgcgtgaggaacattatccagcagttaaagaatcaggtcttattccttttagatgactacaaagaaatatgttcaatccctcaagtcataggaaaactgattcaaaaaaaccacttatcccggacctgcctattgattgctgtccgtacaaacagggccagggacatccgccgatacctagagaccattctagagatcaaagcatttcccttttataatactgtctgtatattacggaagctcttttcacataatatgactcgtctgcgaaagtttatggtttactttggaaagaaccaaagtttgcagaagatacagaaaactcctctctttgtggcggcgatctgtgctcattggtttcagtatccttttgacccatcctttgatgatgtggctgttttcaagtcctatatggaacgcctttccttaaggaacaaagcgacagctgaaattctcaaagcaactgtgtcctcctgtggtgagctggccttgaaagggtttttttcatgttgctttgagtttaatgatgatgatctcgcagaagcaggggttgatgaagatgaagatctaaccatgtgcttgatgagcaaatttacagcccagagactaagaccattctaccggtttttaagtcctgccttccaagaatttcttgcggggatgaggctgattgaactcctggattcagataggcaggaacatcaagatttgggactgtatcatttgaaacaaatcaactcacccatgatgactgtaagcgcctacaacaattttttgaactatgtctccagcctcccttcaacaaaagcagggcccaaaattgtgtctcatttgctccatttagtggataacaaagagtcattggagaatatatctgaaaatgatgactacttaaagcaccagccagaaatttcactgcagatgcagttacttaggggattgtggcaaatttgtccacaagcttacttttcaatggtttcagaacatttactggttcttgccctgaaaactgcttatcaaagcaacactgttgctgcgtgttctccatttgttttgcaattccttcaagggagaacactgactttgggtgcgcttaacttacagtactttttcgaccacccagaaagcttgtcattgttgaggagcatccacttcccaatacgaggaaataagacatcacccagagcacatttttcagttctggaaacatgttttgacaaatcacaggtgccaactatagatcaggactatgcttctgcctttgaacctatgaatgaatgggagcgaaatttagctgaaaaagaggataatgtaaagagctatatggatatgcagcgcagggcatcaccagaccttagtactggctattggaaactttctccaaagcagtacaagattccctgtctagaagtcgatgtgaatgatattgatgttgtaggccaggatatgcttgagattctaatgacagttttctcagcttcacagcgcatcgaactccatttaaaccacagcagaggctttatagaaagcatccgcccagctcttgagctgtctaaggcctctgtcaccaagtgctccataagcaagttggaactcagcgcagccgaacaggaactgcttctcaccctgccttccctggaatctcttgaagtctcagggacaatccagtcacaagaccaaatctttcctaatctggataagttcctgtgcctgaaagaactgtctgtggatctggagggcaatataaatgttttttcagtcattcctgaagaatttccaaacttccaccatatggagaaattattgatccaaatttcagctgagtatgatccttccaaactagtaaaattaattcaaaattctccaaaccttcatgttttccatctgaagtgtaacttcttttcggattttgggtctctcatgactatgcttgtttcctgtaagaaactcacagaaattaagttttcggattcattttttcaagccgtcccatttgttgccagtttgccaaattttatttctctgaagatattaaatcttgaaggccagcaatttcctgatgaggaaacatcagaaaaatttgcctacattttaggttctcttagtaacctggaagaattgatccttcctactggggatggaatttatcgagtggccaaactgatcatccagcagtgtcagcagcttcattgtctccgagtcctctcatttttcaagactttgaatgatgacagcgtggtggaaattgccaaagtagcaatcagtggaggtttccagaaacttgagaacctaaagctttcaatcaatcacaagattacagaggaaggatacagaaatttctttcaagcactggacaacatgccaaacttgcaggagttggacatctccaggcatttcacagagtgtatcaaagctcaggccacaacagtcaagtctttgagtcaatgtgtgttacgactaccaaggctcattagactgaacatgttaagttggctcttggatgcagatgatattgcattgcttaatgtcatgaaagaaagacatcctcaatctaagtacttaactattctccagaaatggatactgccgttctctccaatcattcagaaataaaagattcagctaaaaactgctgaatcaataatttgtcttggggcatattgaggatgtaaaaaaagttgttgattaatgctaaaaaccaaattatccaaaattattttattaaatattgcatacaaaagaaaatgtgtaaggcttgctaaaaaacaaaacaaaacaaaacacagtcctgcatactcaccaccaagctcaagaaataaatcatcaccaatacctttgaggtccctgagtaatccaccccagctaaaggcaaacccttcaatcaagtttatacagcaaaccctccattgtccatggtcaacagggaaggggttggggacaggtctgccaatctatctaaaagccacaatatggaagaagtattcaatttatataataaatggctaacttaacggttgaatcactttcatacatggatgaaacgggtttaacacaggatccacatgaatcttctgtgggccaagagatgttccttaatccttgtagaacctgttttctatattgaactagctttggtacagtagagttaacttactttccatttatccactgccaatataaagaggaaacaggggttagggaaaaatgacttcattccagaggcttctcagagttcaacatatgctataatttagaattttcttatgaatccactctacttgggtagaaaatattttatctctagtgattgcatattatttccatatcatagtatttcatagtattatatttgatatgagtgtctatatcaatgtcagtgtccagaatttcgttcctaccagttaagtagttttctgaacggccagaagaccattcgaaattcatgatactactataagttggtaaacaaccatacttttatcctcatttttattctcactaagaaaaaagtcaactcccctccccttgcccaagtatgaaatatagggacagtatgtatggtgtggtctcatttgtttagaaaaccacttatgactgggtgcggtggctcacacctgtaatcccagcactttgggaggctgaggcgggcgaatcatttgaggtgaggaattcgagaccagcctggccagcatggtgaaaccccatctctactaaaaatacaaaaattagccaggtgtggtggcacatgcctgtagtcccagccactagggcggctgagacgcaagacttgcttgaacccgggaggcagaggttgcagtgagccaagatggcgccactgcattccagcctgggcaacagagcaagaccctgtctgtctcaaaacaaaaaacaaaaccacttatattgctagctacattaagaatttctgaatatgttactgagcttgcttgtggtaaccatttataatatcagaaagtatatgtacaccaaaacatgttgaacatccatgttgtacaactgaaatataaataattttgtcaattatacctaaataaaactggaaaaaaatttctggaagtttatatctaaaaatgttaatagtgcgtacctctaggaagtgggcctggaagccattcttacttttcagtctctcccattctgtactgttttttgttttactttcgtgcctgcattatttttctatttaaaacaaaaataaatctagtttagcact

SEQ ID NO: 2378 - DNA, 2868 bp, Homo Sapiens
  NM_004539
atccggaagttgcctctgccctcaccaaagatggcggccccggcgccgctcgcccacctctcgtaaccaatggaaccgcggcgctcggccgattctcgcaggcgccctcagatctacgctctctgatgcaacgccggaatcgcggaaaccgccggtgcacgttggagtcataagacggcgtcggtgttgcagtctgtgtccttggaggtgaccagggccactgcaggcatggtgctagcagagctgtacgtctctgaccgagagggaagcgatgccacgggagatggaaccaaggagaaaccatttaaaacaggtctaaaggctttgatgacagtagggaaagaaccatttcctaccatttacgtagattcacaaaaagaaaatgagaggtggaatgttatttctaaatcacagttgaagaacattaaaaagatgtggcatagggaacaaatgaagagtgaatcccgggaaaagaaagaggcagaagatagtttacgaagagaaaagaacctggaagaagcaaagaagattaccattaaaaatgatccaagtctcccagagccaaaatgtgtgaagattggtgcgttagaaggatatagaggccaaagagtaaaggtgtttggctgggtccacaggctgcgcaggcaaggaaagaatttaatgtttctggtgttgcgagatggtacaggttatcttcagtgtgtcttggcggatgagttgtgtcagtgctacaatggagttctcttgtccacggagagcagtgttgcagtgtatggaatgctaaatcttaccccaaagggcaagcaggctccaggtggccatgagctgagttgtgacttctgggaactaattgggttggcccctgctggaggagctgacaacctgatcaatgaggagtctgacgttgatgtccagctcaacaacagacacatgatgatccgaggagaaaacatgtccaaaatcctaaaagcacgatccatggtcaccaggtgctttagagatcacttctttgatagggggtactatgaagttactcctccaacattagtgcaaacacaagtagaaggtggtgccacactcttcaagcttgactattttggggaagaggcatttttgactcaatcctctcagttgtacttggagacctgcctcccagccctgggagatgttttttgtattgctcagtcataccgggcagagcagtccagaacacgaaggcacctggctgagtacactcacgtggaagctgagtgtcctttcctgacttttgacgacctcctgaaccggttggaggacttggtttgtgatgtggtagatcgaatattgaagtcacctgcagggagcatagtgcatgagctcaacccgaactttcagccccccaaacggcctttcaaacggatgaactattcagatgctatcgtttggctaaaagaacatgatgtaaagaaagaagatggaactttctatgaatttggagaagatatcccagaagctcctgagagactgatgacagacaccattaatgaaccaatcttgctgtgtcgatttcctgtggagatcaagtccttctacatgcagcgatgtcctgaggattcccgtcttactgaatctgtcgacgtgttgatgcccaatgttggtgagattgtgggaggctcaatgcgtatctttgatagtgaagaaatactggcaggttataaaagggaagggattgaccccactccctattactggtatacggatcagagaaaatacggtacatgtccccatggaggatatggcttgggcttggaacgattcttaacgtggattctgaataggtatcacatccgagacgtgtgcttataccctcgatttgtccagcgttgcacgccataaccattttctccagaagcgtggaggaaagattatgaaaggaacaggctctttaaaaaagaaaacaaaaagccagaatcttcctttttttgtttcattggggtttctctttctgtttttctttctactaccataaaaactatctcaaatcacctgaacatcaagtgatattaaggttgtcatcttaagaaaaaatatccatttttttcttaagttcgggaaacaaagttcggggaaaatacctggcatgaaactgtagttagggatacatttcagcattttactcactttatccaagttattcattttattcaagttatatgtatgtataattcaacaattttagattatggtgtaagatactccagtaacttatctttctgtccttttaagtgtaccttgaattctttgatttattttattgcatcaatgaattaaaacaaaaatcttgggggaagaaattggcaatatcgtataaaaatctgctcatattagaacacagtataattcagcagtaaacactagaatcaaatgaatagccttttgtatcagttattaatcttttctaactctgcttagctgctaataatcctgaggcatagaaattgaagaatttgtaaaaatagaattgccttaaaggatttgaagtaagaacataattttggggagagttttttagtgattcacagtatccctcttagcattaatttaaggtaaagaggcagattgattttccctctttcctggtaattcctaagtaattaagaataaataagttccaaaagaaattgtagctggaatcttaataacaattgtgagtggctgtttgagttgcccccaccatgtccttagatctaatctgtgctaccttattaactcacagcaggcttactgaatggcttcatttcagatttagttgatttctccaccaaatgcatgtcatgtattctcaataggctgtattcccagcagtcaataaatgaacacccgtaaaaa

SEQ ID NO: 2379 - DNA, 502 bp, Homo Sapiens
  NM_004541
agattccgtcgcttcttccggagccgtacgtggcaccgccccgctcgcgggcggccgcggggcttgctgggaagagaggcgaagccaggtcacctttcaaggacccagaagtagggttttggcctaggtaacggggcagagatgtggttcgagattctccccggactctccgtcatgggcgtgtgcttgttgattccaggactggctactgcgtacatccacaggttcactaacgggggcaaggaaaaaagggttgctcattttgggtatcactggagtctgatggaaagagataggcgcatctctggagttgatcgttactatgtgtcaaagggtttggagaacattgattaaggaagcattttcctgattgatgaaaaaaataactcagttatggccatctacccctgctagaaggttacagtgtattatgtagcatgcaatgtgttatgtagtgcttaataaaaataaaatgaaaaaaatgcaaaaaaaaaaaaaaaaa

SEQ ID NO: 2380 - DNA, 4928 bp, Homo Sapiens
  NM_004544
gcaccccggccgtgacgtcacggcagcgcgccggccgcgagagagggccccgtcgcgaccgcgtccccttgggtccttgatcctgagctgaccgggtagccatggccttgcggctcctgaagctggcagcgacgtccgcgtccgcccgggtcgtggcggcgggcgcccagcgcgtgagaggaattcatagcagtgtgcagtgcaaactgcgctatggaatgtggcatttcctacttggggataaagcaagcaaaagactgacagaacgcagcagagtgataactgtagatggcaatatatgtactggaaaaggcaaacttgcaaaagaaatagcagagaaactaggcttcaagcactttcctgaagcggggattcattatccagacagtaccacaggagatgggaagcccctcgccaccgactataatggcaactgtagtttggagaaattttacgatgatccgagaagcaatgatggcaacagttaccgcctgcagtcctggttgtacagcagtcgcctgctgcagtactcagatgccttggagcacttgctgaccacaggacaaggtgttgtgttggagcgctccatcttcagtgactttgtgttcctggaggcgatgtacaaccagggattcatccgaaagcagtgtgtggaccactacaacgaggtgaagagcgtcaccatctgcgattacctgcccccccacctggtgatttacatcgatgtgcccgttccagaggtccagaggcggattcagaagaaaggagatccacatgaaatgaagatcacctctgcctatctacaggacattgagaatgcctataagaaaacctttctccctgagatgagtgaaaaatgtgaggttttacaatattctgcaagggaagctcaagattcaaaaaaggtggtagaggacattgaatacctgaagttcgataaagggccgtggctcaagcaggacaatcgcactttataccacctgcgattactggttcaggataagtttgaggtgctgaattacacaagcattcctatctttctcccggaagtcaccattggagctcatcagactgaccgtgtcttacatcagttcagagagctgccgggccgcaagtacagccctgggtacaacaccgaggtgggagacaagtggatctggctgaagtgaacgggccgccttctgctccagctgcatcacagtgatggccaagctgcatcagccgcactctcctggacgccatatagctttaagatcgggggagggtaaataatgcaaaaattgcacagtggaagaaggggtctcacaaaaagcaatccatcctgtagtataggtaatggagttgggggaagcagcttccattctggatgtttggaaccctttagctttgttttggaatggcccaccattctcactggaaaacagtggtctgctgtgaaaggccagctctcggcagcccctgtggtttcagcgctgccgctctgtgtcattcaggttgtgcacattgtttttcttctgacttccagaaataaaagtgtttccatgggaatttccccatcgtacgtctatgtgcgtgcgggcacgtcgaaactgcacacgtgcacacacgctgctctgggccctgtttggtgtggtgtggtttaattgaggcttacattatgctgaagagtttttctaaaggcctactgtatttattttagtaatgtgctacattagagtagaaaaaataagaacgtgaagaagaaatagcaaaaggagaaaattaccacagatttacagaacaatatgttttaagagagacgttgagaaagattcacgtggccgtcctcagcgtctcaaactcctttgaagggagatttgagcttaggctgttgatgacataagatgcaaaagcaaaataatatactctctttattacccagaaaatcaagttgccagtcaaaactgagaaatgagaaagaaaatcagatttctttattcatctctgttgaagcctagaaaaccaaaacaagctggttgtggttcagcatcatggtttaggaatcaagctgtcagttgtgagtcctactgaactgtgggttttccactgtaaagctccactgtgtccattaggaatcaggctgccagttgtgagtcctactgaactgtgggttttccactgtaaagctccactgtgtccaatatggtagctcctagccacatgtgggtattgaaatttaaatgagctaaaatgtaatagagtttaaaattgggttccttggttgcactggccatagttcaggcactccacagccgcctgtgggcagtagttccagtgctggtgcagaggacgatgctctgctccccgcggaagctctaccaggcctcgctgctgcggagcatgcgaagaagatgcacactccttccctccttgcgtccgcctgcctttttccctctccccttccttccctccttctttcctcctccttccctcccttcctttcttccttccatctgtccttgttttcctcccttcccttcctccctgcctctttccttccctccttctcttccttccttccgtctgtccttgttttcctccctgcctctttccttccctccttctcttccttccttccttccgtctgtccttgttttcctcccttcccttcctccctgcctccttccttgttttaagaatttgaaaataaagtttcccaggagttttgaattggagtcgagatttaagtggctgaagttttgcatttcactaggaaaccaacagctttaatcatgaaatgaaagcacagctgggcattgggccagtcacagagtgtcttttgctctgagcacttcacaaacccattgtggaggggaggaaagaaaaagaaagccatctttaattatcttagctgttcctaatgtctttggctgcaaagagctagctgtttccttcaaccttggtggttgcacgggtagtgtcctcagcagtgagagggcaggtctgccctgtggtcaggattgcccttgtgaggggcagagctctccaaccatgcagggctccgtgtcggcatggtgtggactcgggtgctctgatcatcccctgtgtttgcgtctgaccctgtgtggttgcattcccttgatggagtgggaagtatgtaatttgtagtgctgaggacattcgtctgtttgattttctggtgttttcaatgacatgcatgttcagcagagaaagatgaataaacactgtccaattcttctctccacatagaagcctcaagaagaggtgaggagatgccccgatttccttatttcagagcagtacatgcgttcgtctcacgaaagctcttacaactaaaacaacagcaccaacaaaccaggatcaaaataatcgtgcattttccaggattccatgttggacttctcagtgctttggagatcaggaaataatcatgctgttgcagcagtatggttttgtgtctggattttattcatacaggcatgtgtttacaggcatgagaattctgtattgaaaagaaagtccttgtttttttctaacgtatctttctgttccatcaactgttaaaaccaaattgttaagaacattgagcttcttaggagagattacatgcagctacttaggaccacctcagcaaaatggagttgcctgggtagatagcagcagcagctcaccagccccacgctgccaggctgctggctgctgtccaccaggcagctgtggaacctccatgttctgcctaggtgttgtggcaagaacagcagggaaacaggcggccgcctccaggccacaggtggacccagggaccttcagttacgccgcttcaattgaattcgtggtggtttctctgctacagcagaagtggaagaagctcttgtcttgtttggcatttgtcccattttttggctaataattggctttgaatttctctgtgccctgcttaccaattatagctttctggattggctgttcttagcagtgcaaatgtcaatgcaaagaagcaagcaggcggctactttctgggaagaagcatagtccgtgctcacactggatataaatctgcaagatttgggggtttggcaaaataggggtggagggaaagctgccatggctgtcagaaattggggctttttgaagaaaagcttgtgtaggcatcagccactggctggccagaattccatgaatggaagcaggtgcccgagtgatctggggctttacatgtggatataaatagaagccgggagcctgaggctttgctttaggaaaatcatgagccagaaaacagaggaggtgattgtcagtagtcacctcacgccgctagtgttttctaatactctctcgaattgtcaaagcaaaggaccttataacagcaacacgtgtgtgactcgaagcagcgagcttcccttgggaaaaggagcctcttctcagcagagggtcccagcctttctgtccttccccatcggaatgccaggctctgtgagtttggatgttggacattgccacctgaattccaggaggccggggagctccagtgatggacttgtccccaaaagagtggtgctgttctcagagccataaatgttccactgaaagtgtctgtcccctggctcacgctggctgcgcttgcttgaaggaggctgatttaagggttctaataggaagacaaatgaaactgtcaaattttatctttaagcatgtgagtaagtttgctcattcgcttttactattgatgtatagttttaaaattcttaatttaaaaattattttaatagtaaatttttcacaagtgaacactttttatctttaaattaaaattctgaagctccctagttagttagatccaattgctggttacattttgggaagctctcattttagtgctatgtagtttcattgaataaacatgtttttaatgagaaaaaaaaaaaaaa

SEQ ID NO: 2381 - DNA, 971 bp, Homo Sapiens
  NM_004551
acacttccgtttccggtccgtgcccttggggctccgtgtcctgctgtctttccgtccgctgcctagtctgcatctgagtaacatggcggcggcggcggtagccaggctgtggtggcgcgggatcttgggggcctcggcgctgaccagggggactgggcgaccctccgttctgttgctgccggtgaggcgggagagcgccggggccgacacgcgccccactgtcagaccacggaatgatgtggcccacaagcagctctcagcttttggagagtatgtggctgaaatcttgcccaagtatgtccaacaagttcaggtgtcctgcttcaatgagttagaggtctgtatccatcctgatggcgtcatcccagtgctgactttcctcagggatcacaccaatgcacagttcaaatctctggttgacttgacagcagtggacgtcccaactcggcaaaaccgttttgagattgtctacaacctgttgtctctgcgcttcaactcacggatccgtgtgaagacctacacagatgagctgacgcccattgagtctgctgtctctgtgttcaaggcagccaactggtatgaaagggagatctgggacatgtttggagtcttctttgctaaccaccctgatctaagaaggatcctgacagattatggcttcgagggacatcctttccggaaagactttcctctatctggctatgttgagttacgttatgatgatgaagtgaagcgggtggtggcagagccggtggagttggcccaagagttccgcaaatttgacctgaacagcccctgggaggctttcccagtctatcgccaacccccggagagtctcaagcttgaagccggagacaagaagcctgatgccaagtagctccagggaacgcatgtggatcctagacagcgccttatctatgattgagtgtccgtgtaaataaattcctacttagacttacaaaaaaaaaaaa

SEQ ID NO: 2382 - DNA, 584 bp, Homo Sapiens
  NM_004552
gctgcaaacgtctcgctgaggtcatcctttacggcaggcgtccgcgtcgctagctagtcgttctgaagcggcggccagagaagagtcaagggcacgagcatcgggtagccatgcctttcttggacatccagaaaaggttcggccttaacatagatcgatggttgacaatccagagtggtgaacagccctacaagatggctggtcgatgccatgcttttgaaaaagaatggatagaatgtgcacatggaatcggttatactcgggcagagaaagagtgcaagatagaatatgatgatttcgtagagtgtttgcttcggcagaaaacgatgagacgtgcaggtaccatcaggaagcagcgggataagctgataaaggaaggaaagtacacccctccacctcaccacattggcaagggggagcctcggccctgaacagagcagctgctgatgtctggaggctgattttcctgttctctgttctccactggaaaggttgtttacgacaaacctccttgtcaaagtgtgtaaaaataaaggattgctccatcctatttgttctattttctcttggaaaaaaaaaaaaaa

SEQ ID NO: 2383 - DNA, 6453 bp, Homo Sapiens
  NM_004555
cggcagggcgcgagagcgcacccgcggcggcggtggcggcgactgtgggggggcggcggggaacattggctaagccgacagtggaggcttaggcaccggtggcgggcggctgcggttcctggtgctgctcggcgcgcggccagctttcggaacggaacgctcggcgtcgcgggccccgcccggaaagtttgccgtggagtcgcgacctcttggcccgcgcggcccggcatgaagcggcgttgaggagctgctgccgccgcttgccgctgccgccgccgccgcctgaggaggagctgcagcaccctgggccacgccgatgactactgcaaactgtggcgcccacgacgagctcgacttcaaactcgtctttggcgaggacggggcgccggcgccgccgcccccgggctcgcggcctgcagatcttgagccagatgattgtgcatccatttacatctttaatgtagatccacctccatctactttaaccacaccactttgcttaccacatcatggattaccgtctcactcttctgttttgtcaccatcgtttcagctccaaagtcacaaaaactatgaaggaacttgtgagattcctgaatctaaatatagcccattaggtggtcccaaaccctttgagtgcccaagtattcaaattacatctatctctcctaactgtcatcaagaattagatgcacatgaagatgacctacagataaatgacccagaacgggaatttttggaaaggccttctagagatcatctctatcttcctcttgagccatcctaccgggagtcttctcttagtcctagtcctgccagcagcatctcttctaggagttggttctctgatgcatcttcttgtgaatcgctttcacatatttatgatgatgtggactcagagttgaatgaagctgcagcccgatttacccttggatcccctctgacttctcctggtggctctccagggggctgccctggagaagaaacttggcatcaacagtatggacttggacactcattatcacccaggcaatctccttgccactctcctagatccagtgtcactgatgagaattggctgagccccaggccagcctcaggaccctcatcaaggcccacatccccctgtgggaaacggaggcactccagtgctgaagtttgttatgctgggtccctttcaccccatcactcacctgttccttcacctggtcactcccccaggggaagtgtgacagaagatacgtggctcaatgcttctgtccatggtgggtcaggccttggccctgcagtttttccatttcagtactgtgtagagactgacatccctctcaaaacaaggaaaacttctgaagatcaagctgccatactaccaggaaaattagagctgtgttcagatgaccaagggagtttatcaccagcccgggagacttcaatagatgatggccttggatctcagtatcctttaaagaaagattcatgtggtgatcagtttctttcagttccttcaccctttacctggagcaaaccaaagcctggccacacccctatatttcgcacatcttcattacctccactagactggcctttaccagctcattttggacaatgtgaactgaaaatagaagtgcaacctaaaactcatcatcgagcccattatgaaactgaaggtagccgaggggcagtaaaagcatctactgggggacatcctgttgtgaagctcctgggctataacgaaaagccaataaatctacaaatgtttattgggacagcagatgatcgatatttacgacctcatgcattttaccaggtgcatcgaatcactgggaagacagtcgctactgcaagccaagagataataattgccagtacaaaagttctggaaattccacttcttcctgaaaataatatgtcagccagtattgattgtgcaggtattttgaaactccgcaattcagatatagaacttcgaaaaggagaaactgatattggcagaaagaatactagagtacgacttgtgtttcgtgtacacatcccacagcccagtggaaaagtcctttctctgcagatagcctctatacccgttgagtgctcccagcggtctgctcaagaacttcctcatattgagaagtacagtatcaacagttgttctgtaaatggaggtcatgaaatggttgtgactggatctaattttcttccagaatccaaaatcatttttcttgaaaaaggacaagatggacgacctcagtgggaggtagaagggaagataatcagggaaaaatgtcaaggggctcacattgtccttgaagttcctccatatcataacccagcagttacagctgcagtgcaggtgcacttttatctttgcaatggcaagaggaaaaaaagccagtctcaacgttttacttatacaccagttttgatgaagcaagaacacagagaagagattgatttgtcttcagttccatctttgcctgtgcctcatcctgctcagacccagaggccttcctctgattcagggtgttcacatgacagtgtactgtcaggacagagaagtttgatttgctccatcccacaaacatatgcatccatggtgacctcatcccatctgccacagttgcagtgtagagatgagagtgttagtaaagaacagcatatgattccttctccaattgtacaccagccttttcaagtcacaccaacacctcctgtggggtcttcctatcagcctatgcaaactaatgttgtgtacaatggaccaacttgtcttcctattaatgctgcctctagtcaagaatttgattcagttttgtttcagcaggatgcaactctttctggtttagtgaatcttggctgtcaaccactgtcatccataccatttcattcttcaaattcaggctcaacaggacatctcttagcccatacacctcattctgtgcataccctgcctcatctgcaatcaatgggatatcattgttcaaatacaggacaaagatctctttcttctccagtggctgaccagattacaggtcagccttcgtctcagttacaacctattacatatggtccttcacattcagggtctgctacaacagcttccccagcagcttctcatcccttggctagttcaccgctttctgggccaccatctcctcagcttcagcctatgccttaccaatctcctagctcaggaactgcctcatcaccgtctccagccaccagaatgcattctggacagcactcaactcaagcacaaagtacgggccaggggggtctttctgcaccttcatccttaatatgtcacagtttgtgtgatccagcgtcatttccacctgatggggcaactgtgagcattaaacctgaaccagaagatcgagagcctaactttgcaaccattggtctgcaggacatcactttagatgatgaccaatttatatctgacttggaacaccagccatcaggttcagcagagaaatggcctaaccacagtgtgctctcatgtccagctcctttctggagaatctagaggtgaacgagataattgggagagacatgtcccagatttctgtttcccaaggagcaggggtgagcaggcaggctcccctcccgagtcctgagtccctggatttaggaagatctgatgggctctaacagtgcttactgcagccttgtgtccaccaccaacttctcagcatgtttctctccttggaccttgggtttccaactctgcagccttcaggtctggggccaggagtgggacccaccatttgtggggaaagtagcattcctccacctcaggccttgggtagatttggcaaaagaacaggagcagcataggctgtttgagctttggggaaatgaactttgctttttatatttaactaggatacttttatatgatgggtgctttgagtgtgaatgcagcaggctctcttgtttccgaggtgctgcttttgcaggtgacctggttacttagctaggattggtgatttgtactgctttatggtcatttgaagggccctttagtttttatgataatttttaaaataggaacttttgataagaccttctagaagcaaaaaaaaaaaaaaaaaaaaaaaaaagaaaaaaaaagaaaagaaaaaaagaaaaagaaaaaaatatcccaagcccacacctatgcctcagaaagtcagcatgtgtcctgaagacgttcatagatttataggaaataaagccaaatgtagctcatacctctttataaaactaaactgttgttagataaaatgagaagagaccattccatcattgaagtgttggaatataaaaagacattccagagcatagccttttggtaactttctaggtaatcttgcaatctctccatactggctccatgttgaaattgctttttccctcaggaccctgggtaagatggctacatttaaggtgactctgaatggtggggttctagcttggtcactttcatttcttgccatcataaaaactagtaggctgtggagtgcgcttcctgtttgtgtcatctggtcgtagaaccttttccaaacagaagcatctgcctttggctgttctgtgacctttgaagccagtctcagtggtttaggcagctttgcagttctaactctagctagaggccaggctgtgtgcagagctaaagcacaaatgagcagtacatcagcatgggcagagaaaatacaggactccagatgggaaggttttaagagtcacactggcatggaaggcttatctgccattctatttatagcctgaaatgattctggcctaccctgtcctgtctgtatgatctaaaaaccagccttttccccagaaggctctgagcacatccagaagtgataacctgaccctccacaccaaagacaccctggtgctgctgctggtgagactggtgtccaaggcagggcccagcagaaactgcagcctgctgtctaccaaaggaggtacccgagttgggtactttaaaaaaaaaaaaaacctgcccttacccctctccctaatgggattttttttacctgttcctgggcccattacagagcctctgaagtttgcagtatgctttcaaatgaaataatatacttccattgattcaggaagcagattttttgagtgcctatatgtgagacagtgtgctggttgaaggcctgatgctgttattccaggagactgcaggcccttgatgccaggactctctctactaaggccagttcaggtctgggaaagggagctggcctattgcccaccacctgttgtcagtaggttaggagctgttgactcaggatgaggaagtatggtctttaaaaaaaacaaaatatattttagatttctcccctaaagttagttagagaaaaaggtctattcttcagcagatcactgtggcccctcttggagctgggtgttttcaaattttcttgaaaagtgagttgtgtcacagaatgtggatagtgagatttgcttctgggcctgtggttggacgcccacagcttcctttggaggggcaagaagttggcctctcggttgacattccagagaaatggccagacttgcccctacccttttgcccctggtgtagctgcctcacatgaggttattgcaagagttccccttgcaataccctttgtgccctcaagaattaaaagcctctatgatccagagttgctatgcaccaaattttgatgccttctaaataccttgatgcctgtagcactagaaatgctttcctatttaaaataaacattaaattttaaaatagagctttgtatactatgtaagcagttttatatcagctttgtaaaagctttggtgttaagagtcaatattttttggctttgtagataaagacttaaatttttgtgcaacatagtggtgttaaagcacacatccattggactatgcaaatcaatttctactagcagcactgagcaactgggcacgtgctagtacgcaccccctcctactctaactgtgctagctcttgggttgaggaatggaatgggtagccttctgcttactggagatgcacagagaaacatggctgaaaacagctttaaaaagaacatgtctttgggttcatgtgtggtgctgctgcccgggtgtaaactatccccacccagggccagccattatcaccagacctcttctgggcctggctgtgaagccctgtttttggtattcagaatggatctttaaggctcagatgggctcaaattgaaaccttgtgttttataaaatggatgtttagtaaaggaactggttctcagttatgtttacagcacttggaattgtgtgttcttgtacattttgtattttaaaaccttttatgggagtgcagtgctccttacacaaatacaaagggaagaagagccagcagttgaggctcctcagttttagtgctgaaataataaacagtgacaggtcaacagtaaaaaaaaaaaaaaaaaa

SEQ ID NO: 2384 - DNA, 2581 bp, Homo Sapiens
  NM_004556
aatgaatgaatgaatgaatgagtgaatgaatcaacgaaggagtgagtcaaggcccgggaaccacagactccaagcctacgcagagcccgggaagggggattccggaggggcggggcctctttccggaagcgcccgccgggggcggggagggggcggggccatccgcgtgaggcgaccctgttggtccggaggggcggggcgaggaggaggacccgcttgggcggttcggctgcccacagtaaccgctgggtggacctggccagcgctccgaaccttgtcctcgctgcgcgccggcccctcggagccccacagcccgggaaggaggccgccgcgggccgggcgcccgctctgccaagcggacccgcaacccggaaaggcggcgcggcggagcctggagccggatcctgctcagaccgggccccggccggccagagccgcgggcatgtcggaggcgcggaaggggccggacgaggcggaggagagccagtacgactctggcattgagtctctgcgctctctgcgctccctacccgagtccacctcggctccagcctccgggccctcggacggcagcccccagccctgcacccatcctccgggacccgtcaaggaaccacaggagaaggaagacgcggatggggagcgggctgattccacctatggctcctcctcgctcacctacaccctgtccttgctggggggccccgaggctgaggacccggccccacgcctgccactcccccacgtgggggcgctgagccctcagcagctggaagcactcacttacatctccgaggacggagacacgctggtccacctggcagtgattcatgaggccccagcggtgctgctctgttgcctggctttgctgccccaggaggtcctggacattcaaaataacctttaccagacagcactccatctggctgtacatctggaccaaccgggcgcagttcgggcactggtgctgaagggggccagccgggcactacaggaccggcatggtgacacagcccttcatgtggcctgccagcgccagcacttggcctgtgcccgctgcctgctggaagggcggccagagccaggcagaggaacatctcactctctggacctccagctgcaaaactggcaaggtctggcttgtctccacattgccacccttcagaagaaccaaccactcatggaattgctgcttcggaatggagctgacattgatgtgcaggagggcaccagtggtaagacagcgctgcacctggctgtggaaacccaagagcggggcctggtacagttcctgctccaggctggtgcccaggtagatgcccgcatgctgaacgggtgcacacccctgcacctggcagctggccggggtctcatgggcatctcatccactctgtgcaaggcgggtgctgactccctgctgcggaatgtggaggatgagacgccccaggacctgactgaggaatcccttgtccttttgccctttgatgacctgaagatctcagggaaactgctgctgtgtaccgactgaagccaggcagggtctgggatcctcagggctccacctctccatctggaagccggagccataactgctgcagtttgggcccaggctatgtgctcttctggtgccctagggactgctgtggccagagcctggggccagccagtacagtcctgagccgaggaggagggactgcaagtggaagagagccagtctggaaggaagagctttccaggtggacagggcttcttggaagacccccaaagccccaggtatcctgggtgaagcctgtttgcctctcttgaaaatggcaggtgctcttgttttacccatgttgggtcagcctgaaactgccaaccagtaggaagcatggactctcctgagtgagaagagactgaaataggagcaagcagaaccctgagaggtgtcccatcttattgctgttgaggaccctgaaacaccgttgtttaaagacttcacacagaaggctctgaactgagccactggggaagggaagtttcagtaacatgacactaaaatggcagagacgttaaaaaaagtttttcccttctagagctgttttgcgcgcatgcatgtctgtgtgcattggggctttttagacaggcctgccctgtgactttgtggtagaggcagagagaaggaaattgtcccctgagcacggtagggccttgctgggtggggtcagaggccagtagttccaggcctttctctgtgtccagcacagacccttgtccttgctgtggaaatgatgagggatggagggacaagaggaagaatgagaggacacacgccctggagccctcaccactgccctgggggttgccatctggaggagcctggggataagggtaacccagggaggctgggcacgagggagctgactccacgtttttccccccgttcctcaccttcgagggccctgctaggtcacccctatgctggcatgaagagcatggggcaataaaccagcacagtctctgaccacttggagcgtctcatccagtgagagagacagccgttaaaagcataaacatccaaataaagatgcctttccaagtt

SEQ ID NO: 2385 - DNA, 1945 bp, Homo Sapiens
  NM_004565
gattagtcaggcctcagaaagatggcgtcctcggagcaggcagagcagccgagccagccaagctctactccaggaagtgaaaatgtgctgcctcgagagccgctgattgccacggcagtgaagtttctacagaattcccgggtccgccagagcccacttgcaaccaggagagcattcctaaagaagaaagggctgacagatgaagagattgatatggccttccagcagtcgggcactgctgccgatgagccttcgtccttgggcccagccacacaggtggttcctgtccagccccctcacctcatatctcagccatacagtcccgcaggctcccgatggcgagattacggcgccctggccatcatcatggcaggcattgcatttggctttcaccagctctacaagaaatacctgctccccctcatcctgggcggccgagaggacagaaagcagctggagaggatggaggccggtctctctgagctgagtggcagcgtggcccagacagtgactcagttacagacgaccctcgcctccgtccaggagctgctgattcagcagcagcagaagatccaggagcttgcccacgagctggccgctgccaaggccaccacatccaccaactggatcctggagtcccagaatatcaacgaactcaagtccgaaattaactccttgaaagggcttcttttaaatcggaggcagttccctccatccccatcagccccgaagatcccctcctggcagatcccagtcaagtcaccgtcaccctccagccctgcggccgtgaaccaccacagcagcagcgacatctcacctgtcagcaacgagtccacgtcgtcctcgcctgggaaggagggccacagccccgagggctccacggtcacctaccacttgctgggcccccaggaggaaggcgagggggtggtggacgtcaagggccaggtgcggatggaggtgcaaggcgaggaggagaagagggaggacaaggaggacgaggaggatgaggaggatgatgatgtgagccatgtggacgaggaggactgcctgggggtgcagagggaggaccgccggggcggggatgggcagatcaacgagcaggtggagaagctgcggcggcccgagggcgccagcaacgagagtgagcgggactagggctgcgcctgctgcctccagccctgaggatggcatctagtgtgcccgtgcgtggccataccctgcctccctctctggccctgggagggcagcttggagcccaggtagggggcagagctgtcctcagctgcactgcggcctggtggcagtgtggggagtcacacttctgtccacctggcctcctctcgcctggccgccagccccagccccagccccagccccaggcccagctgcctttggctttgatctcaagtcaggctgaaggcagcgaagcctcggggcccaagcccctccccagccccctctcccggacagacgccttgcccagggtgtgtttgctgagtgtcttgactaccgtgacaccacgcatggccagagctagcgtccctactgcctcccgactcctcagtggaggaggagctgcggtccctctggtgtctgccatccccctccctccctgggcccggccctggacccgtcaggtgcctgtccccagccccaaccccactcatgccccgtcgtcctcccagacaaatgaaaccacgctgcgcttccgatgcccccgcttgccgtgtaatggttcagctaatcccatggcgagatgggggctcactccggaggaggagccaggcagcagggccttcctgaccaacagccagctctgtccttccccccaggaaacacatgttcatttgtgtgatcatgtatagacctcagaacggaagataggactgtatataattgtaataaataccagttgccactatttaaaaaaaaaaaaaaaaaaaaa

SEQ ID NO: 2386 - DNA, 4553 bp, Homo Sapiens
  NM_004566
acgcgtctgcggccagcccggactctttaaaagccggcggtgcgcggggcatcccagccaagccggagaggaggcgagcagcagggcctggtggcgagagcgcggctgtcactgcgcccgagcatcccagagctttccgagcggacgagccggccgtgccgggcatccccagcctcgctaccctcgcagcacacgtcgagccccgcacaggcgagggtccggaacttagcccaaagcacgtttcccctggcagcgcaggaaacgcccggccgcgcgccggcgcacgcccccctctcctcctttgttccgggggtcggcggccgctctcctgccagcgtcgggatctcggccccgggaggcgggccgtcgggcgcagccgcgaagatgccgttggaactgacgcagagccgagtgcagaagatctgggtgcccgtggaccacaggccctcgttgcccagatcctgtgggccaaagctgaccaactcccccaccgtcatcgtcatggtgggcctccccgcccggggcaagacctacatctccaagaagctgactcgctacctcaactggattggcgtccccacaaaagtgttcaacgtcggggagtatcgccgggaggctgtgaagcagtacagctcctacaacttcttccgccccgacaatgaggaagccatgaaagtccggaagcaatgtgccttagctgccttgagagatgtcaaaagctacctggcgaaagaagggggacaaattgcggttttcgatgccaccaatactactagagagaggagacacatgatccttcattttgccaaagaaaatgactttaaggcgtttttcatcgagtcggtgtgcgacgaccctacagttgtggcctccaatatcatggaagttaaaatctccagcccggattacaaagactgcaactcggcagaagccatggacgacttcatgaagaggatcagttgctatgaagccagctaccagcccctcgaccccgacaaatgcgacagggacttgtcgctgatcaaggtgattgacgtgggccggaggttcctggtgaaccgggtgcaggaccacatccagagccgcatcgtgtactacctgatgaacatccacgtgcagccgcgtaccatctacctgtgccggcacggcgagaacgagcacaacctccagggccgcatcgggggcgactcaggcctgtccagccggggcaagaagtttgccagtgctctgagcaagttcgtggaggagcagaacctgaaggacctgcgcgtgtggaccagccagctgaagagcaccatccagacggccgaggcgctgcggctgccctacgagcagtggaaggcgctcaatgagatcgacgcgggcgtctgtgaggagctgacctacgaggagatcagggacacctaccctgaggagtatgcgctgcgggagcaggacaagtactattaccgctaccccaccggggagtcctaccaggacctggtccagcgcttggagccagtgatcatggagctggagcggcaggagaatgtgctggtcatctgccaccaggccgtcctgcgctgcctgcttgcctacttcctggataagagtgcagaggagatgccctacctgaaatgccctcttcacaccgtcctgaaactgacgcctgtcgcttatggctgccgtgtggaatccatctacctgaacgtggagtccgtctgcacacaccgggagaggtcagaggatgcaaagaagggacctaacccgctcatgagacgcaatagtgtcaccccgctagccagccccgaacccaccaaaaagcctcgcatcaacagctttgaggagcatgtggcctccacctcggccgccctgcccagctgcctgcccccggaggtgcccacgcagctgcctggacaaaacatgaaaggctcccggagcagcgctgactcctccaggaaacactgaggcagacgtgtcggttccattccatttccatttctgcagcttagcttgtgtcctgccctccgcccgaggcaaaacgtatcctgaggacttcttccggagagggtggggtggagcagcgggggagccttggccgaagagaaccatgcttggcaccgtctgtgtcccctcggccgctggacaccagaaagccacgtgggtccctggcgccctgcctttagccgtggggcccccacctccactctctgggtttcctaggaatgtccagcctcggagaccttcacaaagccttgggagggtgatgagtgctggtcctgacaggaggccgctggggacactgtgctgttttgtttcgtttctgtgatctcccggcacgtttggagctgggaagaccacactggtggcagaatcctaaaattaaaggaggcaggctcctagttgctgaaagttaaggaatgtgtaaaacctccacgtgactgtttggtgcatcttgacctgggaagacgcctcatgggaacgaacttggacaggtgttgggttgaggcctcttctgcaggaagtccctgagctgagacgcaagttggctgggtggtccgcaccctggctctcctgcaggtccacacaccttccaggcctgtggcctgcctccaaagatgtgcaagggcaggctggctgcacggggagagggaagtattttgccgaaatatgagaactggggcctcctgctcccagggagctccagggcccctctctcctcccacctggacttggggggaactgagaaacactttcctggagctgctggcttttgcacttttttgatggcagaagtgtgacctgagagtcccaccttctcttcaggaacgtagatgttggggtgtcttgccctggggggcttggaacctctgaaggtggggagcggaacacctggcatccttccccagcacttgcattaccgtccctgctcttcccaggtggggacagtggcccaagcaaggcctcactcgcagccacttcttcaagagctgcctgcacactgtcttggagcatctgccttgtgcctggcactctgccggtgccttgggaaggtcggaagagtggactttgtcctggccttcccttcatggcgtctatgacacttttgtggtgatggaaagcatgggacctgtcgtctcagcctgttggtttctcctcattgcctcaaaccctggggtaggtgggacggggggtctcgtgcccagatgaaaccatttggaaactcggcagcagagtttgtccaaatgacccttttcaggatgtctcaaagcttgtgccaaaggtcacttttctttcctgccttctgctgtgagccctgagatcctcctcccagctcaagggacaggtcctgggtgagggtgggagatttagacacctgaaactgggcgtggagagaagagccgttgctgtttgttttttgggaagagcttttaaagaatgcatgtttttttcctggttggaattgagtaggaactgaggctgtgcttcaggtatggtacaatcaagtgggggattttcatgctgaaccattcaagccctccccgcccgttgcacccactttggctggcgtctgctggagaggatgtctctgtccgcattcccgtgcagctccaggctcgcgcagttttctctctctccctggatgttgagtctcatcagaatatgtgggtagggggtggacgtgcacgggtgcatgattgtgcttaacttggttgtatttttcgatttgacatggaaggcctgttgctttgctcttgagaatagtttctcgtgtccccctcgcaggcctcattctttgaacatcgactctgaagtttgatacagataggggcttgatagctgtggtcccctctcccctctgactacctaaaatcaatacctaaatacagaagccttggtctaacacgggacttttagtttgcgaagggcctagatagggagagaggtaacatgaatctggacagggagggagatactatagaaaggagaacactgcctactttgcaagccagtgacctgccttttgaggggacattggacgggggccgggggcgggggttgggtttgagctacagtcatgaacttttggcgtctactgattcctccaactctccaccccacaaaataacggggaccaatatttttaactttgcctatttgtttttgggtgagtttcccccctccttattctgtcctgagaccacgggcaaagctcttcattttgagagagaagaaaaactgtttggaaccacaccaatgatatttttctttgtaatacttgaaatttatttttttattattttgatagcagatgtgctatttatttatttaatatgtataaggagcctaaacaatagaaagctgtagagattgggtttcattgttaattggtttgggagcctcctatgtgtgacttatgacttctctgtgttctgtgtatttgtctgaattaatgacctgggatataaagctatgctagctttcaaacaggagatgcctttcagaaatttgtatattttgcagttgccagaccaataaaatacctggttgaaatacatggacgaagtaaaaaa

SEQ ID NO: 2387 - DNA, 3503 bp, Homo Sapiens
  NM_004567
ctcatcccggccccgggatggcgtccccacgggaattgacacagaaccccctgaagaagatctggatgccatacagcaatgggcggcccgctctgcacgcttgccagcgcggtgtgtgcatgaccaactgcccaactctcattgtcatggtgggcctgcccgccaggggcaagacctacatctccaagaagctgactcgatacctgaactggattggtgtgcccactcgggagttcaatgttggccagtatcgccgggacgtggtcaagacctacaaatcttttgaattttttctccccgacaatgaagagggcctgaaaatcaggaagcagtgtgccctggcagccctccgtgacgtccggcggttccttagtgaggaggggggacatgtggcggtttttgatgccacaaacaccacccgagaacggagagcgaccatctttaattttggagaacagaatggctacaagaccttttttgtcgagtccatctgtgtggatcctgaggtcatagctgccaacatcgtgcaagtgaaactgggcagccctgactatgtcaaccgcgacagtgatgaggctacggaggacttcatgaggcgcattgagtgctatgagaactcctacgagtcgctagatgaggacctggatagggacctgtcctatatcaagatcatggatgtgggccagagctacgtggtgaaccgtgtggctgaccacatccagagccgcatcgtatattacctcatgaacatccacgtgaccccccgctccatctacctctgccggcacggggagagcgagctcaacctcaagggccggattggcggggacccaggactgtcccctcggggcagggagtttgccaagagtctagcccagttcatcagtgaccaaaatatcaaggatctgaaggtctggacaagccagatgaagaggacaatccagacggctgaggcactgggtgtgccctatgaacagtggaaggtcctcaacgagatcgatgcgggcgtctgtgaggaaatgacctacgaggaaattcaggataattatccactggagttcgccctgcgggaccaggacaagtaccggtaccggtaccctaaaggggagtcctacgaggacctggtccagagactggagcctgtcatcatggagctggagaggcaagagaatgtgctggtcatctgccaccaggctgtgatgcgctgcctgctggcctacttcctcgacaaggcagcagaacagctgccctacctcaagtgtccgctgcacacagtcctgaagctgactcctgtggcatatggttgtaaagtggagtccatattcctgaacgtggctgctgtgaacacgcaccgggacaggcctcagaacgtggacatctcaagacctccagaggaagcccttgtcacggtgcctgctcaccagtgaccatgttcatccactgtgaccactaggcaggcactgctctctgcagagggggtcattccaggccctccagtgtgtgtgatagtcaccatgccatgcagggatattcttgaagccacacatggctggcggaacccagagcccccaccccagcccacctggctctttgttgacagtcggcgacaaggttgtgcgtggctcctgacctgctgctaagagtcacttgaccagactgcatctgcatgggctgcgcggaggttgcccagccccagtttcttccggcgcagctcttaggtgttcactctcgccagctcagttggctttgtgaagtgtgaaaccctacaatgtgaaaggaaagtgcttgctgtgatgttcctactgtggcccagctgcccagcatggacctggtgactctccacagggcctctaccatcctctctgtggccacttcctgagccagaggccaggtcttcatggggccctgagcttctgctgcctctggtgagagggagagcccttcccatccttacccaccaggaactagagccccaaccacagcagatgcttcctgggcagccactggccaggccgttgtatccatgtcacccttagttgtgggcattcatgaaagcaatgcgcttgcttcagcacattgggatgcacagaaacgtgagggcaggggggcagttgtggtcgcccctccccagttgtgcatgtacccggctacttaggtatgcttaggggagctggtggccaggggtgccccttcaggcctgctctcacagtgaaaccacttcaagacagggcaggaagttaccttcctggtgcacacaccgaagtgctcgagggagaggctgccgccccctctccccttccctggctgtggacactggcagccaatggggaggcggcctctcccctgttgctgcccgtgtccacacaggaatgtacactggtggcagaaacatgcatttgccataaataattcagaaacacttgtatggtcctgtaaaacttctctggtgtttgttgacttctgcctgtgggtctgaggaagggagaaggcagaacccataggcagtccctgggcaagggaggattttcccggccgcagcacagccttccattcatgtgcacgtgagtctggtgaaaatggccttgtgaagtccagtgtctgtcatgcccctgagttcttttggtcccagagaggcagcctgggcagtctgtttacagctggcaaacagactggctggcaagttgtggggctgggtcagaaagtgtctggacttgtaatcgggtgccctgctgtccacaggtggactctggggaagccaggcccctggatcccaagtcctttgtgtccggagcctttcctggcctgtgcctggagggtagcacatctttccagcctcccagggctttgcagcctgcagatgccacctgtccctgagagaagttagcgtccctggccctggccggtggtctctcatccttgtgtgctgctctgctaagagatgtccaaggcggagccggggcaagatccttccagactcatctgtcagagccccaagccctttagacccagagcccaaggaccatgcctttgggacattaggactgcagcctttgcttctgtgtattttggagttttggtgacttttgtcacctggacacactcatttgttagccatagtgggttcccttggtcagcaacagtgcatgtacctctggatgtcatctgaggtgagaccaccgaggccttttctctctgtgtacagaggggagttaggagttgctggactggatgcattacgaggactggggacagggtagagggacatccagggatcagggcatgagtgggggcaaccccccggcctctgccctggcatggtctccgcatgggctgaggtgtagctgattggctgccacatttcggccatgctggctggcgtgcccatgttgcagatattttcccgagttccccagaatggatggtattgaatctcagccacatgcaacactgtgtccagcattctttgcaataaatactttttaaaaaataaaaaaaaaaaaaaa

SEQ ID NO: 2388 - DNA, 1439 bp, Homo Sapiens
  NM_004569
acgcggctgccggaagcgggtctggagcgggcgagacgaccagggccggcgagcgcagtgcagcgccgcgcggtgcgggcggccgagtgggggcgtcatggaggatgagcggagcttttcggatatctgcggcggccgcctggcgctgcagcgccgctactactccccgtcctgccgggaattctgcctcagctgccctcggctctcgctgcgttcgctcaccgctgtcacctgcacggtgtggctggcggcctacggactcttcaccctctgcgagaacagcatgatcctctctgctgccatcttcatcaccctcttaggtctgcttggttatctccattttgtgaagattgatcaggagactctgttaatcattgattcccttggcattcagatgacttcatcttatgcttcaggcaaagaaagcactaccttcatagaaatgggcaaggtcaaggatattgtcatcaatgaggccatttacatgcagaaggtgatttactacctctgcatcttattgaaagatccagtggaaccacatgggatatcccaagtagtacccgtcttccagagtgccaagccccggctggactgcttgattgaagtatacaggagctgccaggagatcctggcacaccagaaagccacatcaacaagcccatgagccccagcgttcagaaggccagcattgtcttccatgggagatgactcttaagccataggggctggttttccgtactccaaaccatcaggtggacacagtcctaggaaccattatggatgtagtgcatcttagagccatagagcaggtgactggaaatctaactcagtatatttccgtgtattatagtgttttccttgtaaggttttgcctactttaccaaaggaggggagaccttaagaattttgacacagtatgtcaaaagtaatgtcagcaaagaacactttcggaaattgctaagcatgttcaggtttactttgttgatgtttgtgaagcaaaacaatgggaaactgacatcagatgtcttgagaaagctatattttccaatagtaccccttgtgtaaagttacgaaaaaaacaagcccttcagtactggttagcaggaagaaatgtcctacaaaagacgagtctgtcaacctagtgcctgtgttctgtacagggcttatttatttactgttaataaacagatcttccaaaacacacagttacctggttcacagatagctgctttttattgacaaacaagatcatagtatttcagtcatggtgtcaagcacattaatacttttctgttactcagcatttttttttatatcagttcaaaagctacttttgccaagaaggatgagacaaaaggccagacagaaattggactttggttttcagacatgggactctcatgttaacaaagaataaataagcaaatattgaatcctta

SEQ ID NO: 2389 - DNA, 4694 bp, Homo Sapiens
  NM_004573
agaagaggcgggggcttcctgcttcagcctccttgggcagaagcagtgaccacaggcccccatggcaggcagggcgggtgggaggagggtgatttacaaggcagatgggcctctggctacagctcagtcctgcactcagccagggccaccccaggggctataagagcaactagatttctggagcagctcggggatgggtgccatttgagcccagcttggctccccctcctggctggcctccttcctgcccttctgcctgcctgtgtctgctgagattctgcaaagaggaacgcttggcaccatgtctctgctcaaccctgtcctgctgccccccaaggtgaaggcctatctgagccaaggggagcgcttcatcaaatgggatgatgaaactacagttgcctctccagttatcctccgtgtggatcctaagggctactacttatactggacgtatcaaagtaaggagatggagtttctggatatcaccagcatccgggatactcgctttgggaagtttgccaagatgcccaagagccagaagctccgggacgtcttcaacatggactttcctgataacagtttcctgctgaagacactcacggtggtgtccggcccggacatggtggacctcaccttccacaacttcgtctcctacaaggagaacgtgggcaaggcctgggctgaggacgtactggccctagtcaaacatccgctgacggccaacgcctcccgcagcaccttcctggacaagatccttgtgaagctcaagatgcagctcaactctgaagggaagattccggtgaagaactttttccagatgtttcctgctgaccgcaagcgggtggaagctgctctcagtgcctgccacctccccaaaggcaaaaatgacgccatcaatcctgaggacttcccagaacctgtctacaagagtttcctcatgagcctctgtcctcggccagaaatagatgagatcttcacttcttaccatgctaaggccaaaccctacatgacgaaggagcacctgaccaaattcatcaaccagaaacagcgggactcccggcttaactccctgctgttcccgccagcacggcctgaccaggtgcagggcctcatcgacaagtatgagcccagtggcatcaatgcacagaggggccagctgtcacctgaaggcatggtctggtttctctgtgggccagagaacagcgtgctggcccaggacaagctgctgctccaccacgacatgacgcagccactcaatcattacttcatcaactcgtcccacaacacctacctgacagccggccagttctcaggcctctcctcggctgagatgtaccgccaggtgctgctctctggctgccgttgcgtggagctagactgctggaaggggaaaccccctgacgaggagcccattatcacccatggcttcaccatgaccacagacatcttcttcaaagaagcaattgaggctattgcagaaagcgcctttaagacctccccctatcccatcatcctgtcgtttgagaaccatgtggactcaccccgccagcaggctaagatggctgagtattgccggacgatctttggggatatgctgctcacagagcccctggaaaagttcccactaaaaccaggtgtccccctgcccagccctgaggatctcaggggcaagatcctcatcaagaacaagaagaaccagttttctggccccacctcctccagtaaggatactggtggggaggctgagggcagcagcccacccagtgcccctgcaggtgagggcacagtgtgggctggcgaggaagggactgagctggaggaggaggaggtggaagaggaagaggaggaggagtcaggaaacctggatgaagaagagattaagaagatgcagtcggatgagggcacagcgggcctggaagtgacggcttatgaggagatgtccagcctagtcaattacatccagcccaccaagttcgtctcctttgagttctctgcccaaaagaaccgaagttatgtcatctcgtccttcacagagctcaaggcatatgacctgctctccaaggcctcggtgcagtttgtggactacaacaagcgccagatgagccgcatttaccccaagggaacccgcatggactcctccaactacatgccccagatgttctggaatgctggatgccagatggttgccctcaacttccagacgatggacttgcccatgcagcagaacatggcagtatttgagttcaacgggcagagcggctacctcctcaagcatgagttcatgcgccggccggacaagcagttcaaccccttctcagtggaccgcatcgacgtggtggtggccaccaccctttccattacggtgatctctgggcagttcctgtcagaacgcagcgtgcgcacctatgtagaagtggagctgtttggccttcctggggaccccaagaggcgctatcgaactaagctgtcacccagtactaactccatcaatcctgtctggaaggaggagccctttgtctttgagaagatcttgatgcctgagctggcctccctcagagtggctgtgatggaggaaggcaacaagtttcttggacaccgcatcatccccatcaatgccctaaattctgggtaccaccacctgtgcctgcacagtgagagcaacatgcccctcaccatgcctgcgctcttcatcttcctggagatgaaggactacatacctggtgcttgggcagatctcactgtggccctcgccaaccccattaagttcttcagtgcccatgacacgaagtctgtgaagctcaaggaggccatgggaggtctgcctgagaagcccttcccactggcgagtccagttgccagccaggtcaatggggcgttggccccaacgagcaatgggtcaccagcagccagggccggggccagggaagaggctatgaaagaagctgcggagccgcggaccgccagcctggaggagctccgggagctaaagggcgtggtgaagctgcagcggcggcacgagaaggagctgcgagagttggagcggcgcggagcgcggcgctgggaggagctgctgcagcggggcgcggcgcagctggcggagctcgggccaccgggcgtggggggcgtcggggcctgcaagctcggtcccggcaagggctctcgcaagaagaggagcctgccccgcgaggagagcgccggagccgcgccgggcgagggccctgagggcgtggacgggcgcgtgcgggagctgaaagacaggctggagctggagctgctgcggcagggcgaggagcagtacgagtgcgttctgaagcgcaaggagcagcacgtggccgagcaaatctccaaaatgatggagctggccagagagaaacaggcggcagagctgaaggccctgaaggagacgtcggagaacgacaccaaagagatgaagaaaaagctggagacaaagagactggagcggatccagggcatgaccaaagtcaccacagacaagatggcccaggagaggttgaagagagagattaacaactcccacatccaggaagtagtgcaggtgatcaagcagatgacggagaacttggagaggcaccaggagaagctggaggagaagcaggcggcttgcctggaacagatacgggagatggaaaagcagttccagaaggaggcgctggcagagtacgaggccaggatgaagggtctggaggcagaggtgaaggagtcggtgagggcctgcctcaggacctgctttccctccgaggccaaggacaagcctgagagggcctgcgagtgccccccagagctgtgtgagcaggacccactcatagcaaaggcagatgcccaggagagccgcctctgatgcccccatcccactgggacatttagcaaggaggttcagccccttctctgggatgtggttctattcccccaggaaaaaggagccccagccttctgaggctgtgggaacctgtggctgccttggacgctgcagccccctcctcaacggccaggccagagtctgagacaggacccaggcaccctcacggcagggcctctctggggcctagaagtcttctcaagctgacttcctacctccccctccatctctagataagtgtcatatatttgttgagggcaaaagactatggactggaaggcagaaagtgggatcctggccccactctgcctttcctattgagcaaccagctctgggctcagtttcctcacctggagggttggacccactcacctccactctagccccgaaccctcctgccccaggcttccaggccccatcaggcctgccctgagttggccttgtccactccttgaggcagatcctggcactacctcacagctccctggggacggccactccctggctgagggccctcccctcccctctgcctgtccggaacgggaggctgaaatggaaaagctgccttggccctgcttggctgagtcacaaggggcagtgggctcttgggtgctgttccaccctgaccctggctcacccctcttcctaggcctgggggcaggcagttcctaccatgtacccctctcaggctgcctgcctgacaaggtcagcatcatttgctctcctgaatttatgaggtttatttatttttctctttcctactcctattaaagaacctcgtcccagtgtttcctgcttaaaaaaaaaaaaaaaaaaa

SEQ ID NO: 2390 - DNA, 2824 bp, Homo Sapiens
  NM_004580
gttttgaaagttgatggagcgaactgcttttccaaagactcttttgaaaaactttttaagtaggccattctgactttaacatttctctttgtcttaacattagacaaaaagtaaccttcctgaagaggacatgtgattggaagttgtcaattgttgaagcattggtaactccagtctctaacgttttagaaaatcataacaagcggttctctaccctgtaaaggtgaactactgagttcttcattatgtctgatggagattatgattacctcatcaagtttttagctttgggagactctggtgtagggaagaccagtgtactttaccaatatacagatggtaaatttaactccaaatttatcacaacagtgggcattgatttcagggaaaaaagagtggtgtacagagccagtgggccggatggagccactggcagaggccagagaatccacctgcagttatgggacacagcagggcaggagaggtttcgtagcttaacgacagcgttcttcagagatgctatgggttttcttctactttttgatctgacaaatgagcaaagtttcctcaatgtcagaaactggataagccagctacagatgcatgcatattgtgaaaacccagatatagtgctgtgtggaaacaagagtgatctggaggaccagagagtagtgaaagaggaggaagccatagcactcgcagagaaatatggaatcccctactttgaaactagtgctgccaatgggacaaacataagccaagcaattgagatgcttctggacctgataatgaagcgaatggaacggtgtgtggacaagtcctggattcctgaaggagtggtgcgatcaaatggtcatgcctctacggatcagttaagtgaagaaaaggagaaaggggcatgtggctgttgagaagtcaagtaagcgacatagtagttcaggtggcccatgcctgggatcttctctatgattgatacatggcacagtgagagattaatgggcattgtgtacaaattgcttctcaccatccccattagacctacgaataaagcatccggttctaaaattaatttgttgcagctttgtaaatatttctttaagattcagcctgagagttaggagaaatatttcagagccaaaagtgccttatacaaccttagcctattatagtaaatcattcaaggattcagaattttgcagtcacagaagagtgtatttattatgtagaatgaatgagggtactgtcacctgccttaatgtaggtaggcccagagtcttacatttaagatcttacatgcagttataaaaccgccacagtcttcaatccagatttgaagactcatgccataggtgacattctaaaataccattaaagccacttaaatgttaaataagaatatacatgcacatcagctcaatgtctttgagtattaattttatgtaagcattctatttaacatgaatataggacaaatcatggctatatctatagaccttggataaactggattgaccaattatacactcacggtgacttttttattggtgggaaggggattggggtggggcaggctggcttaatgtaatatgagcaaccaaagtgggacttctgtctccccgctatattcccattgctctgaatggttgattgaagggtcagggaactagattttatggctttagttcactgtgattgtacatttatacttggcctatgtgctggccgcacctgaacatagctggtgcttatgccgagttatttgcgatgagtaaatatttagtttctttttcttcatatttataatgttgatctggcatcctcaggctgcagctttattagcttataacttactcatctctatctttaccagcaggctctgtattgttgatatttgcaacttgttttgcttttccattggtggaattgaaataattagtttttaattacataagatgcctgtttgctatttggtggaagatagatgttcatattgaagcagtcacatttgtactgtagttcaataaaagaaaaatgaagtattctgtagcctatatttttcatagagctcatgagcatttactgtacttgctgggtcttgccaagatcatttattccgctgcattgccaaagtgtcttcataccaaattaaaggtggttttaatatatgtttcatggaagttgtttataaaattcaaaggtatttcatttaggtgaaaagtcttatttattaaagtggtttgaataaagtagatcaaaacttccagagatcttaatggctatataggaagaaatatcactcaccataatttaaataaagaataaaaatacttgtattttgtggtggcaaatgtttggtagaactgtaattagaaaaatacaagtatatttgcgtgatggttacactagaagcccagactttacgactacacaatatattcatgtatctaaactgtacttgtaccccctaaatttatttttaaaaaaggaaaaataaaagtatcatgaaaaaacctatttttttttccactgtccttccactactcccataacaaacttatccatggttggtaaaattttacatatttctatccttgaaatgaaggcttcttttaaattccaaagaagtcatggaggcctgtgcatttgaattgtatatgctagtgaggaaaagatttagacatttcaagagcagggttggccaggcgcggtggctcacacctgtaatcccagcactttgggaggccgaggagggcggatcacgaggtcaggagatcgagaccatcctggctaacacagtgaaaccccatctctactaaaaaaaaaa

SEQ ID NO: 2391 - DNA, 1526 bp, Homo Sapiens
  NM_004582
gcatctgcgcaggcgcccggctcctaagtctacccaggaactgaccctgctctctcctttccctgttagacatgggcactccacagaaggatgttattatcaagtcagatgcaccggacactttgttattggagaaacatgcagattatatcgcatcctatggctcaaagaaagatgattatgaatactgtatgtctgagtatttgagaatgagtggcatctattggggtctgacagtaatggatctcatgggacaacttcatcgcatgaatagagaagagattctggcatttattaagtcttgccaacatgaatgtggtggaataagtgctagtatcggacatgatcctcatcttttatacactcttagtgctgtccagattcttacgctgtatgacagtattaatgttattgacgtaaataaagttgtggaatatgttaaaggtctacagaaagaagatggttcttttgctggagatatttggggagaaattgacacaagattctctttttgtgcggtggcaactttggctttgttggggaagcttgatgctattaatgtggaaaaggcaatcgaatttgttttatcctgtatgaactttgacggtggatttggttgcagaccaggttctgaatcccatgctgggcagatctattgttgcacaggatttctggctattacaagtcagttgcatcaagtaaattctgatttacttggctggtggctttgtgaacgacaattaccctcaggcgggctcaatggaaggccggagaagttaccagatgtatgctactcatggtgggtcctggcttccctaaagataattggaagacttcattggattgatagagagaaactgcgtaatttcattttagcatgtcaagatgaagaaacggggggatttgcagacaggccaggagatatggtggatccttttcataccttatttggaattgctggattgtcacttttgggagaagaacagattaaacctgttaatcctgtcttttgcatgcctgaagaagtgcttcagagagtgaatgttcagcctgagctagtgagctagattcattgaattgaaagttgcatagtatagttttgccattttaacatttctgtatttgaagtgcttatcgaatctaaaagtgactactgttaatattttgtatattgtgttaaattaattttaataaattatataattatacatattgtaaaataaagaccggtattttattttctgctttttattctgaagtcctgttattctgactacagttctttgtgtatacttctgtgtctgttatgttcaataactgagctaacataaaataactctaggtttctacttgatttttcccccatgtatacctttcatctgttctatagcaagttgatgtaaattggtttgtcaacaagaatgttaactgatgaaagtggatagaacccatacatgaattaaatgatgcacaaaataaatggctgttgaaatttgaaaaaaaaaaaaaaaaaaaaaaaaaaaaaa

SEQ ID NO: 2392 - DNA, 2128 bp, Homo Sapiens
  NM_004584
gggccggcaggggcggtgcgcgggaagggaccccggacccggaggtcgcggagagctgggcagtgttggccgctggcggagcgctggggcagcatgaagtgcctggtcacgggcggcaacgtgaaggtgctcggcaaggccgtccactccctgtcccgcatcggggacgagctctacctggaacccttggaggacgggctctccctccggacggtgaactcctcccgctctgcctatgcctgctttctctttgccccgctcttcttccagcaataccaggcagccacccctggtcaggacctgctgcgctgtaagatcctgatgaagtctttcctgtctgtcttccgctcactggcgatgctggagaagacggtggaaaaatgctgcatctccctgaatggccggagcagccgcctggtggtccagctgcattgcaagttcggggtgcggaagactcacaacctgtccttccaggactgtgagtccctgcaggccgtcttcgacccagcctcgtgcccccacatgctccgcgccccagcacgggttctgggggaggctgttctgcccttctctcctgcactggctgaagtgacgctgggcattggccgtggccgcagggtcatcctgcgcagctaccacgaggaggaggcagacagcactgccaaagccatggtgactgagatgtgccttggagaggaggatttccagcagctgcaggcccaggaaggggtggccatcactttctgcctcaaggaattccgggggctcctgagctttgcagagtcagcaaacttgaatcttagcattcattttgatgctccaggcaggcccgccatcttcaccatcaaggactctttgctggacggccactttgtcttggccacactctcagacaccgactcgcactcccaggacctgggctccccagagcgtcaccagccagtgcctcagctccaggctcacagcacaccccacccggacgactttgccaatgacgacattgactcttacatgatcgccatggaaaccactataggcaatgagggctcgcgggtgctgccctccatttccctttcacctggcccccagccccccaagagccccggtccccactccgaggaggaagatgaggctgagcccagtacagtgcctgggactcccccacccaagaagttccgctcactgttcttcggctccatcctggcccctgtacgctccccccagggccccagccctgtgctggcggaagacagtgagggtgaaggctgaaccaagaacctgaagcctgtacccagaggccttggactagacgaagccccagccagtggcagaactgggtctctcagccctggggatcagaaaggtgggcttgctggagctgagctgtttcactgcctctcgcaggccccagctggctgtcactgtaaagctgtcccacagcggtcgggcctgggccgttatctccccacaacccccagccaatcaggactttccagacttggccctgaactactgacgttcctacctcttatttctcattgagcctcaggctatactccagctggccaaggctggaaacctgtctccctcaggctcaccttcctaaggaaaatgtcatagtaggtgctgctggcccctggtgatccagcttctctgccaatcatgacctgttccttcctgaagtcctgggcatgcatctgggacccccgtggagctgacaagttttccttgctttcctgatactctttggcgctgacttggaattctaagagccttggacccgagtgtgtggctagggttgccctggctggggcccggtgccgagactcccaagcggctctgtgcagaagagctgccaggcagtgtcttagatgtgagacggaggccatggcgagaatccagctttgacctttattcaagagaccagatgggttgccccaggatccggctgccagccctgaggccaagcacggctggagacccacgacctggcctgccgttgccctgagctgcagcctcggccccaggatcctgctcacagtcaccgcaggtgcaggcaggaagcagccctgggggactggacgctgctattgattcattaaaaaaagaaaagaaaaatacaaaaaaa

SEQ ID NO: 2393 - DNA, 779 bp, Homo Sapiens
  NM_004585
attctctccttcagcataaaagctgatccacaaacaagaggagcaccagacctcctcttggcttcgagatggcttcgccacaccaagagcccaaacctggagacctgattgagattttccgccttggctatgagcactgggccctgtatataggagatggctacgtgatccatctggctcctccaagtgagtaccccggggctggctcctccagtgtcttctcagtcctgagcaacagtgcagaggtgaaacgggagcgcctggaagatgtggtgggaggctgttgctatcgggtcaacaacagcttggaccatgagtaccaaccacggcccgtggaggtgatcatcagttctgcgaaggagatggttggtcagaagatgaagtacagtattgtgagcaggaactgtgagcactttgtcacccagctgagatatggcaagtcccgctgtaaacaggtggaaaaggccaaggttgaagttggtgtggccacggcgcttggaatcctggttgttgctggatgctcttttgcgattaggagataccaaaaaaaagcgacagcctgaagcagccacaaaatcctgtgttagaagcagctgtgggggtcccagtggagatgagcctcccccatgcctccagcagcctgaccctcgtgccctgtctcaggcgttctctagatcctttcctctgtttccctctctcgctggcaaaagtatgatctaattgaaacaagactgaaggatcaataaacagccatctgccccttcaaaaaaaaaaaaaaa

SEQ ID NO: 2394 - DNA, 1768 bp, Homo Sapiens
  NM_004589
ggaagcggaacgctaccggaaatcgcggggagggtcaaaggagacccggtctccgaggctcatggcgatgctggtcctagtacccggacgagttatgcggcctctgggtggccaactttggcgcttcttgcctcgcggactcgagttttggggcccagccgaggggactgcgagagtcttgctgaggcagttctgcgcgcggcaagcggaggcgtggcgtgcctcggggcgccctggctattgcctgggaacccggcccctcagcactgcgaggccgccacccccgtggtcgcagaagggccccggagactccacgcgcccctcgaagcccgggcctgtttcctggaagtctttagcaatcacatttgctattggaggagctttactggctggaatgaagcacgtcaagaaagaaaaggcagagaagttagagaaggaacggcagcgacacatcggcaagcctttacttgggggaccgttttccctcacaactcatactggggagcgtaaaactgacaaggactacttgggtcagtggttattgatttattttggcttcactcattgccctgatgtctgtccagaagaactagaaaagatgattcaagtcgtggatgaaatagatagcattacaactctgccagatctaactccacttttcatcagcattgacccagagagggacacaaaagaagccatcgcaaattatgtgaaagaattttctcccaaactggttggcttgactggcacgagagaagaggtcgatcaagtggccagagcatacagagtgtattacagccctggccccaaggacgaagatgaagactacatagtggatcacacaataataatgtacttgattggaccagatggtgagtttctagattattttggccagaacaagaggaagggagaaatagctgcttcaattgccacacacatgaggccatacagaaaaaagagctagccaaagcagtgttgctggatgcagtattctcttgctaagaggaaggaaactgtctcgcataggagcctatataaatataaacatatatacgtgcactctacagaatggccttcataccatgagaacatttctgttttggatggggatgttacccttgcgttcaaccaaaattgattcttggaactgtaaagattacaacccaaagtctcccaggaagctgtggggagaccagaggatcaagctgaagtgaagccagtgaagagcccacctgtggaaggacatggcggggcgaggcacagccagtgcattcctgcctgcggacaggccctcccagcagctttgccgcctctccatcgtcttgggcccttgctcaaatagctgtgggactgaatttcacagaaaagaatataatttccatagtgctcttgcttgcctcttcttgagttctttgctcttctgagttcttggtggctaataacagtcagattagggtctctgccattcagagttgatgcttgaaaactttagttttccttattaatgaatatcactatcagatttgactaatgaagaggaaatctattgtttgggggaaaaaaaacatcagtttgatttctctaggggttcttttatgtgatttttagctaagtggtgtgccaggttttcagtgacataccaaatggaaataagaggatattgatcacgagtgtgatgctgagtacctttctgcatatactggattgtactttgtgtaaagtaaacatactcagttttgctgttcagacaaaaaaaaaaaaaaaa

SEQ ID NO: 2395 - DNA, 3245 bp, Homo Sapiens
  NM_004592
attttgtggcccgctatggcggcggtgttgaggttgggtacgggatgcggggtctttgactgaaggggtaggccaagtggaggtatcagggacgtcgcgcggcacagaagaggaccagcctggacgccggggacgctgtcatgtacggcgcgagcgggggccgcgccaaacccgagaggaaaagcggcgcgaaggaggaggccgggccaggcggtgccggcggtgggggcagccgagtggagctcttggttttcggctatgcctgcaagctgttccgggacgacgagcgggccctggctcaggaacagggacagcacctcatcccctggatgggggaccacaagatcctcatcgacagatatgatggacgtggtcacctgcatgacctttctgagtacgatgctgagtattccacgtggaacagagattatcagctgtctgaagaggaggcgcgaatagaggccctgtgtgatgaagagaggtatttagccttgcatacggacttgcttgaggaggaggcaaggcaagaggaagaatacaagcgattgagtgaagcactagcagaggatgggagctacaatgccgtggggttcacttacggtagcgactattacgacccgtcagagccgacggaggaggaggagccttccaaacagagagaaaaaaatgaggccgaaaatttagaggaaaatgaagagcccttcgttgcccccttaggattgagcgtcccgtctgacgtggagttgccaccaaccgctaaaatgcacgccatcatcgagcgcacggccagcttcgtgtgcaggcagggagcacagtttgagatcatgctgaaggccaagcaggcccggaactcccagtttgactttctgcgcttcgaccactacctcaacccctactataagttcatccagaaagccatgaaagagggacgctacactgtcctggcagaaaacaaaagtgacgagaaaaaaaaatcaggagtcagctctgacaatgaagatgatgatgatgaagaagatgggaattaccttcatccctctctctttgcctccaagaagtgtaaccgccttgaagagctgatgaagcccttgaaggtagtggacccagatcatcccctcgcagcacttgttcgtaaggcacaggctgacagttccactcccaccccacacaacgcagacggtgcgcctgtgcagccctcccaggtggagtacacggcagactcgaccgtggcagccatgtattacagctactacatgctaccggacggcacttactgcctggcgccgccccctcccggaatcgacgtgactacttactacagcacccttcctgctggcgtgaccgtgtctaactcccctggagtgacgaccaccgccccaccacctcctgggaccacaccactaccgcccccaaccacagcagagactagcagcggggccacctccacaaccaccaccacaagtgcacttgcccccgtggccgccatcatccccccgccccccgacgtccagcccgtgattgacaagctggccgagtatgtcgccaggaacggcctgaagttcgagaccagtgttcgtgccaagaatgatcaaagatttgagttcctgcagccgtggcaccagtataatgcttattatgagtttaagaagcagttcttcctccagaaagaagggggcgatagcatgcaggctgtgtctgcaccagaagaggctcccacagactctgctcccgagaagccaagtgatgctggggaggatggcgcgcctgaagacgcagccgaggtgggagcacgggcaggctcaggcgggaagaaggaggcatcgtccagtaagaccgtcccggacgggaagctggtgaaagcttcctttgctccaataagctttgcaatcaaggccaaagaaaatgatctgcttcccctggaaaaaaatcgtgttaagctagatgatgacagtgatgatgatgaagaaagcaaagaaggccaagaaagttctagtagtgctgcaaacactaacccagcagttgccccaccctgtgtagttgttgaggagaagaagcctcaacttacccaggaggagctagaagcaaagcaagcaaagcaaaagctggaagatcgcctcgcagctgctgcccgggaaaagctggcccaggcgtctaaggagtcaaaagagaaacagcttcaagcagaacgtaaaaggaaagcggcgttatttttacagaccctcaaaaatcctctgccggaagcagaagctgggaaaattgaggagagtcctttcagtgtcgaggaatccagcactacgccctgccctctactgactggaggcaggcctctgcctactttagaagttaaaccacccgataggccttcgagcaaaagcaaagatccaccgagagaagaagagaaagaaaagaaaaagaaaaagcacaaaaaaagatctcgaacaagatcacgttctcccaagtaccattcgtcatccaagtccaggtctagatcacactcaaaagcaaagcattctcttcccagtgcctatcggacagtgcggcggtcgaggtcccgctcccggtcccctcggaggagagcccactcccctgagagacggagggaagagaggagtgtgcccactgcctaccgcgtgagccgcagccctggggccagcaggaagcggacccgctccagaagtccccacgagaagaagaagaagaggcggtcccggtcgcggaccaagtccaaggccaggtctcagtcggtgtcacccagcaagcaggcagcgccccggcccgcggcccccgcggcccactcggcgcactcagccagcgtctcccctgtggagagtcggggctccagccaggagcgctccaggggagtctctcaggaaaaagaagcccagatctcttcagcaatcgtttcttccgtgcagagcaaaatcactcaggatctcatggccaaagtcagagcgatgcttgcagcttccaaaaacctgcaaaccagcgcttcctgagacggggccagcggaggcagagccgggaggctgcgtgggcttctgggcaggctcacgcagacgccggccacaccatccacctggccgcctccatggacccttggtggcttttgtaaattaatttttgatgacattttgagttttaagatttctgaccagcagtctcttacctgtatatttgtaaatatatcatgtttctgtgaaaatgtattatgaaataaaatgggaggaaacaccttttctagctag

SEQ ID NO: 2396 - DNA, 1646 bp, Homo Sapiens
  NM_004596
ggcggggccaggagagaaagctttgtggtttggtctcagggaagtagcaggcgccggttgagagaactacggccctgtcggaaggtaacctccggtgcaaacgaccatcggcggcaggcgagcggtacgcttggcgtccgggccttcctgggcccgtctgaggaaacttgctgctcgaggccaggctgcctaggacctgtcccttttttctatactggctcccacatccgggttttttctccgggacggcccttcggatgcttgggccaatgggaatcgccatttagggtgctccgcccaccgggtcgcgtagagcatcctggaagtcgtagtaaatctctcgagagttctctccgcacgcgggctggagaagcgggtcctacgcacgctttgttgtcgcgctttgcctccgtccttgcccctactcccgccttacctgacttccttttcggaggaagatccttgagcagccgacgttgggacaaaggatttggagaaacccagggctaaagtcacgtttttcctcctttaagacttacctcaacacttcactccatggcagttcccgagacccgccctaaccacactatttatatcaacaacctcaatgagaagatcaagaaggatgagctaaaaaagtccctgtacgccatcttctcccagtttggccagatcctggatatcctggtatcacggagcctgaagatgaggggccaggcctttgtcatcttcaaggaggtcagcagcgccaccaacgccctgcgctccatgcagggtttccctttctatgacaaacctatgcgtatccagtatgccaagaccgactcagatatcattgccaagatgaaaggcaccttcgtggagcgggaccgcaagcgggagaagaggaagcccaagagccaggagaccccggccaccaagaaggctgtgcaaggcgggggagccacccccgtggtgggggctgtccaggggcctgtcccgggcatgccgccgatgactcaggcgccccgcattatgcaccacatgccgggccagccgccctacatgccgccccctggtatgatccccccgccaggccttgcacctggccagatcccaccaggggccatgcccccgcagcagcttatgccaggacagatgccccctgcccagcctctttctgagaatccaccgaatcacatcttgttcctcaccaacctgccagaggagaccaacgagctcatgctgtccatgcttttcaatcagttccctggcttcaaggaggtccgtctggtacccgggcggcatgacatcgccttcgtggagtttgacaatgaggtacaggcaggggcagctcgcgatgccctgcagggctttaagatcacgcagaacaacgccatgaagatctcctttgccaagaagtagcaccttttccccccatgcctgccccttcccctgttctggggccacccctttcccccttggctcagccccctgaaggtaagtccccccttgggggccttcttggagccgtgtgtgagtgagtggtcgccacacagcattgtacccagagtctgtccccagacattgcacctggcgctgttaggccggaattaaagtggctttttgaggtttggtttttcacaatcaaaaaaaaaaaaaaaaaa

SEQ ID NO: 2397 - DNA, 3522 bp, Homo Sapiens
  NM_004602
acttcctgccgggctgcgggcgcctgagcggctcttcagcgtttgcgccggcggctgccgcgtctctctcggctcccgcttcctttgaccgcctcccccccccggcccggcggcgcccgcctcctccacggccactccgcctcttccctcccttcgtcccttcttcctctcccttttttccttcttccttcccctcctcgccgccaccgcccaggaccgccggccgggggacgagctcggagcagcagccaggtggagttttgctcttgtcgcccaggctggagtgcagtggcgtgatctcggctcactgcaacctccacctcccaggttcaagcgattttcccacttcagcctcccgataagctgagattacagagtttattaaccacttaacctctcagaactgaacaaagacaacattgttcctggaacgccctctttttaaaaaagaaagcataacccctactgtagaactaaatgcactgtgcatgaaacttggaaaaaaaccaatgtataagcctgttgacccttactctcggatgcagtccacctataactacaacatgagaggaggtgcttatcccccgaggtacttttacccatttccagttccacctttactttatcaagtggaactttctgtgggaggacagcaatttaatggcaaaggaaagacaagacaggctgcgaaacacgatgctgctgccaaagcgttgaggatcctgcagaatgagcccctgccagagaggctggaggtgaatggaagagaatccgaagaagaaaatctcaataaatctgaaataagtcaagtgtttgagattgcacttaaacggaacttgcctgtgaatttcgaggtggcccgggagagtggcccaccccacatgaagaactttgtgaccaaggtttcggttggggagtttgtgggggaaggtgaagggaaaagcaagaagatttcaaagaaaaatgccgccatagctgttcttgaggagctgaagaagttaccgcccctgcctgcagttgaacgagtaaagcctagaatcaaaaagaaaacaaaacccatagtcaagccacagacaagcccagaatatggccaggggatcaatccgattagccgactggcccagatccagcaggcaaaaaaggagaaggagccagagtacacgctcctcacagagcgaggcctcccgcgccgcagggagtttgtgatgcaggtgaaggttggaaaccacactgcagaaggaacgggcaccaacaagaaggtggccaagcgcaatgcagccgagaacatgctggagatccttggtttcaaagtcccgcaggcgcagcccaccaaacccgcactcaagtcagaggagaagacacccataaagaaaccaggggatggaagaaaagtaaccttttttgaacctggctctggggatgaaaatgggactagtaataaagaggatgagttcaggatgccttatctaagtcatcagcagctgcctgctggaattcttcccatggtgcccgaggtcgcccaggctgtaggagttagtcaaggacatcacaccaaagattttaccagggcagctccgaatcctgccaaggccacggtaactgccatgatagcccgagagttgttgtatgggggcacctcgcccacagccgagaccattttaaagaataacatctcttcaggccacgtaccccatggacctctcacgagaccctctgagcaactggactatctttccagagtccagggattccaggttgaatacaaagacttccccaaaaacaacaagaacgaatttgtatctcttatcaattgctcctctcagccacctctgatcagccatggtatcggcaaggatgtggagtcctgccatgatatggctgcgctgaacatcttaaagttgctgtctgagttggaccaacaaagtacagagatgccaagaacaggaaacggaccaatgtctgtgtgtgggaggtgctgaaccttttctggccatgaaccattataaaatcccaacatatatactgaaaatactgaaactgctttgaaaatttggaatttctgatacctccagtgggccgagagacacggtgggtaaaggatgtgggcagcagcagggaagacaacagaaacacaaggaggcggctgtggccgggctggactgtgctggggtttgttgtgatggccactcggtgacctggcggtccctacgcaatagcagctgcctgtggggaagaagggctgcccagccagctggttctcccgggacaccagcagatccacaccctgggcacctccgtgtttggtcttttttttcccctgtgtgaaagaagaaacggcacgaccccttctcaagctggctcactcagacacattgggacaaaccctggacagccatgccagagagaggcctttgaccggccccagagctaaaagcaccagagaaaatcaaatgcttcctactcagcgtgacccaacttttctagtgtgccacggccccaccacctcctgcagtacccacaccatcaccactgctttctcttccaacagtgatctgtattcttagtttcattattttcttttgattgatatgacactatataaaattttcatttgagaatttctcaattgtatctagttaaatagcacagtttggaaacttgtctgagactgactttatcaataatctaaccgacaaagatcatatccatgtgtatgtggttagacatttttatttcattgactaacccaggacagtttcagtgatgcaaattgtgtgccctctggttcagctgaaacagtcctggactttcaaaaaccttgaataagtctcccacagttgtataaattggacaatttaggaattttaaactttagatgatcatttggttccatttttatttcatttttatttttgttaatgcaaacaggacttaaatgaactttgatctctgttttaaagattattaaaaaacattgtgtatctatacatatggctcttgaggacttagctttcactacactacaggatatgatctccatgtagtccatataaacctgcagagtgattttccagagtgctcgatactgttaattacatctccattagggctgaaaagaatgacctacgtttctgtatacagctgtgttgcttttgatgttgtgttactgtacacagaagtgtgtgcactgaggctctgcgtgtggtccgtatggaaagcctggtagccctgcgagttaagtactgcttccattcattgtttacgctggaatttttctccccatggaatgtaagtaaaacttaagtgtttgtcatcaataaatggtaatactaaatttttttgttaatttattctcaaatgccactactgctaggttggtcccctcccaacttgcccctatcctttttttatttttaagaaaaaaactttgtaatgcttgtgattccatctgggcaaaagtctgaagatctgaaataactttatatcaaaccattgatcaataaacagctactaatgaaaaaa

SEQ ID NO: 2398 - DNA, 2138 bp, Homo Sapiens
  NM_004603
gtcgcgcatgcggggctcacacggctgcagccggcgccgctgccactcccgggagcatgaaggaccgaacccaggagctccgcacggccaaggacagcgatgatgatgatgatgtcgctgtcaccgtggaccgagaccgcttcatggatgagttctttgagcaggtggaggagattcgaggcttcattgacaagatcgcagagaacgtggaggaggtgaagcggaagcacagtgccatcctggcatcccccaaccccgatgagaagacgaaggaggagctggaagaactcatgtccgacataaagaagacagcaaacaaagttcgttccaagttaaagagcatcgagcagtccatcgagcaagaggaaggcctgaaccgctcctccgctgacctgaggatccggaagacacagcactccacgctgtccagaaagtttgtggaggtcatgtcggagtacaacgccacgcagtccgactaccgcgagcgctgcaaaggccgcatccagaggcagctggagatcaccggcaggaccacgaccagtgaggagctggaggacatgctggagagtgggaaccccgccatctttgcctctgggatcatcatggactccagcatctcgaagcaggctctgagcgagattgagacgcggcacagtgagatcatcaagctggagaacagcatccgtgagctacacgacatgttcatggacatggccatgctcgtggagagccagggagagatgattgacaggatcgagtacaatgtggaacacgcggtagactatgtggagagggccgtgtctgacaccaagaaggccgtcaagtaccagagcaaggcgcgccggaagaaaatcatgatcatcatctgctgtgtgatcctgggcatcgtcatcgcctccactgttgggggcatcttcgcctagaagccacccaaactgccactccactccaggtgggccactccaaggaggccctggctgctgccacctggctgggctgccctcccaacccccgcctctggctcagagcaccctccctcccggcccccatgctcccttctctgccatgggccctccgtccccgccccgtgtcgtgtgcatgatctctgtgagtgtgcgtctgtacgggaagaggcagagggaggcagccagcggggcgtgatgcagtgtgcacagcgaggagcagacccaggcagggccgccagggtgacacaggccacccttccttgccttcagtaactcggtgggcccaggttctgctcttccctggggaccctaacctcgcctccagctgacctgccctgtcctctccagctgtccccacaagcagagccctgaggggtggggaccagctggccacatggtgctgcttttcaggttaggggagaggtggccctgagggacagcccagctctgagtctcagtcgctgatcactgccagggaggctcaggctgccatggctccaggctccctcccctgcctaggggcaaagtccatcgggtcctgggcctcagcttcccttcccacattcctccggccccaggagcaaccccttgggctaggtctgaccccaggtgtccctctggaaggggctggctggtgccctatttccagccaccccagcagctagggaggcaaagcaggctgcagtcagtccctcaagccagcgttgcatgtttgggatggtggctcctgttgtcttgcgctctgggaagtcagatgtcatttcaggcctgcagtctcatcctgcccttgccatcctcccatcgatgtgccacgtgggtgtcacgtgtcccagatgcagtattcggcagccagccggggagggctacctcctcctcctcaccaccttggggcttctcatgggaaatgtgcccccgccccaggaccctctcccttgtggacaggcagggagatgcatgcgagtgcatgcagcaggggatggggccgtgtccgtgtgccccaccctccctcggctttactcctgcccagtgactgtgaccactgtccgtgttgccttcttgaacagcgattccccccaaccccttcaccaaaggtcttggtacaaccagctgcccattttgtgaaatttttatgtagaataaacatttgtatctgtaccaggaaaaaaaaaaaaa

SEQ ID NO: 2399 - DNA, 679 bp, Homo Sapiens
  NM_004607
gcatgcgcgccggcgaccacgcctaaatagccgcagcctctgcgcgtcgccctccacggttaccccggctctccgcccctccttctcgcggcgctcgagggaccatggccgatcctcgcgtgagacagatcaagatcaagaccggcgtggtgaagcggttggtcaaagaaaaagtgatgtatgaaaaagaggcaaaacaacaagaagaaaagattgaaaaaatgagagctgaagacggtgaaaattatgacattaaaaagcaggcagagatcctacaagaatccaggatgatgatcccagattgccagcgcaggttggaagccgcatatttggatcttcaacggatactagaaaatgaaaaagacttggaagaagctgaggaatataaagaagcacgtttagtactggattcagtgaagttagaagcctgaaacttttctcgtatggggtggtttttgcattaaatcctggggtccattttacaatccattatttttgaccactgctatgtgttcaagtagtatgagaatgtgattgtttttatctggttacatatatatttctttgtctaatttaatatgtcaaataaatgagttcatctaataaaattgtttattttatactttacaaaatttttaaattaaccttttatcattaaaccacatagactttatgacag

SEQ ID NO: 2400 - DNA, 3937 bp, Homo Sapiens
  NM_004613
ataagttagcgccgctctccgcctcggcagtgccagccgccagtggtcgcacttggagggtctcgccgccagtggaaggagccaccgcccccgcccgaccatggccgaggagctggtcttagagaggtgtgatctggagctggagaccaatggccgagaccaccacacggccgacctgtgccgggagaagctggtggtgcgacggggccagcccttctggctgaccctgcactttgagggccgcaactacgaggccagtgtagacagtctcaccttcagtgtcgtgaccggcccagcccctagccaggaggccgggaccaaggcccgttttccactaagagatgctgtggaggagggtgactggacagccaccgtggtggaccagcaagactgcaccctctcgctgcagctcaccaccccggccaacgcccccatcggcctgtatcgcctcagcctggaggcctccactggctaccagggatccagctttgtgctgggccacttcattttgctcttcaacgcctggtgcccagcggatgctgtgtacctggactcggaagaggagcggcaggagtatgtcctcacccagcagggctttatctaccagggctcggccaagttcatcaagaacataccttggaattttgggcagtttgaagatgggatcctagacatctgcctgatccttctagatgtcaaccccaagttcctgaagaacgccggccgtgactgctcccgccgcagcagccccgtctacgtgggccgggtggtgagtggcatggtcaactgcaacgatgaccagggtgtgctgctgggacgctgggacaacaactacggggacggcgtcagccccatgtcctggatcggcagcgtggacatcctgcggcgctggaagaaccacggctgccagcgcgtcaagtatggccagtgctgggtcttcgccgccgtggcctgcacagtgctgaggtgcctgggcatccctacccgcgtcgtgaccaactacaactcggcccatgaccagaacagcaaccttctcatcgagtacttccgcaatgagtttggggagatccagggtgacaagagcgagatgatctggaacttccactgctgggtggagtcgtggatgaccaggccggacctgcagccggggtacgagggctggcaggccctggacccaacgccccaggagaagagcgaagggacgtactgctgtggcccagttccagttcgtgccatcaaggagggcgacctgagcaccaagtacgatgcgccctttgtctttgcggaggtcaatgccgacgtggtagactggatccagcaggacgatgggtctgtgcacaaatccatcaaccgttccctgatcgttgggctgaagatcagcactaagagcgtgggccgagacgagcgggaggatatcacccacacctacaaatacccagaggggtcctcagaggagagggaggccttcacaagggcgaaccacctgaacaaactggccgagaaggaggagacagggatggccatgcggatccgtgtgggccagagcatgaacatgggcagtgactttgacgtctttgcccacatcaccaacaacaccgctgaggagtacgtctgccgcctcctgctctgtgcccgcaccgtcagctacaatgggatcttggggcccgagtgtggcaccaagtacctgctcaacctcaacctggagcctttctctgagaagagcgttcctctttgcatcctctatgagaaataccgtgactgccttacggagtccaacctcatcaaggtgcgggccctcctcgtggagccagttatcaacagctacctgctggctgagagggacctctacctggagaatccagaaatcaagatccggatccttggggagcccaagcagaaacgcaagctggtggctgaggtgtccctgcagaacccgctccctgtggccctggaaggctgcaccttcactgtggagggggccggcctgactgaggagcagaagacggtggagatcccagaccccgtggaggcaggggaggaagttaaggtgagaatggacctgctgccgctccacatgggcctccacaagctggtggtgaacttcgagagcgacaagctgaaggctgtgaagggcttccggaatgtcatcattggccccgcctaagggacccctgctcccagcctgctgagagcccccaccttgatcccaatccttatcccaagctagtgagcaaaatatgccccttcttgggccccagaccccagggcagggtgggcagcctatgggggctctcggaaatggaatgtgcccctggcccatctcagcctcctgagcctgtgggtccccactcaccccctttgctgtgaggaatgctctgtgccagaaacagtgggagccctgaccttggctgactggggctggggtgagagaggaaagacctacattccctctcctgcccagatgccctttggaaagccattgaccacccaccatattgtttgatctacttcatagctccttggagcaggcaaaaaagggacagcatgccccttggctggatcagggaatccagctccctagactgcatcccgtacctcttcccatgactgcacccagctccaggggcccttgggacagccagagctgggtggggacagtgataggcccaaggtcccctccacatcccagcagcccaagcttaatagccctccccctcaacctcaccattgtgaagcacctactatgtgctgggtgcctcccacacttgctggggctcacggggcctccaacccatttaatcaccatgggaaactgttgtgggcgctgcttccaggataaggagactgaggcttagagagaggaggcagccccctccacaccagtggcctcgtggttattagcaaggctgggtaatgtgaaggcccaagagcagagtctgggcctctgactctgagtccactgctccatttataaccccagcctgacctgagactgtcggagaggctgtctggggcctttatcaaaaaaagactcagccaagacaaggaggtagagaggggactgggggactgggagtcagagccctggctgggttcaggtcccacgtctggccaggcactgccttctcctctctgggcctttgtttccttgttggtcagaggagtgattgaaccagctcatctccaaggatcctctccactccatgtttgcaatgcttttatatggcccagccttgtaaataaccacaaggtccactccctgctccacgaagccttaagccataggcccaggatatttctgagagtgaaaccatgactgtgaccaccttctgtccccagccctgtcctggttccttcctatgcccaggtaccacccttcagaccccagttctaggggagaagagccctggacacccctgctctacccatgagcctgcccgctgcaatgcctagacttcccaacagccttagctgccagtgctggtcactaaccaacaaggttggcaccccagctaccccttctttgcagggctaaggcccccaaacatagcccctgccccggaggaagcttggggaacccatgagttgtcagctttgactttatctcctgctctttctacatgactgggcctcccttgggctggaagaattggggattctctattggaggtgagatcacagcctccagggccccccaaatcccagggaaggacttggagagaatcatgctgttgcatttagaactttctgctttgcacaggaaagagtcacacaattaatcaacatgtatattttctctatacatagagctctatttctctacggttttataaaagccttgggttccaaccaggcagtagatgtgcttctgaaccgcaaggagcaaacactgaaataaaatagtttatttttcacactcaaaaaaaaaaaaaaaaaa

SEQ ID NO: 2401 - DNA, 5114 bp, Homo Sapiens
  NM_004614
ggaataagtgacatcatgagtgtgtgccaggtgtctgattacagaaggtgttcaattaatctgcaatcattaattaacccttcagtcgctggtattatttgccatccatcctccgagtgttgccaagttatgggtgcgttctgccagcgtcctagcagtggtaaggcttctggctgccagcggcgaacctctcccttcgagtatttctcctcttgctgagatgaaatgcgaccgggtctctttaagggccaggcgccgggatccaggcggcgcccaacggctggactagcagtcgtccgcgccgactcgcacaagaaggaaccccgggcctctggatccgctcgcccggctatgctgctgtggccgctgcggggctgggccgcccgggcgctgcgctgctttgggccgggaagtcgcgggagcccggcctcaggccccgggccgcggagggtgcagcgccgggcctggcctcccgataaagaacaggaaaaagagaaaaaatcagtgatctgtgtcgagggcaatattgcaagtgggaagacgacatgcctggaattcttctccaacgcgacagacgtcgaggtgttaacggagcctgtgtccaagtggagaaatgtccgtggccacaatcctctgggcctgatgtaccacgatgcctctcgctggggtcttacgctacagacttatgtgcagctcaccatgctggacaggcatactcgtcctcaggtgtcatctgtacggttgatggagaggtcgattcacagcgcaagatacatttttgtagaaaacctgtatagaagtgggaagatgccagaagtggactatgtagttctgtcggaatggtttgactggatcttgaggaacatggacgtgtctgttgatttgatagtttaccttcggaccaatcctgagacttgttaccagaggttaaagaagagatgcagggaagaggagaaggtcattccgctggaatacctggaagcaattcaccatctccatgaggagtggctcatcaaaggcagccttttccccatggcagcccctgttctggtgattgaggctgaccaccacatggagaggatgttagaactctttgaacaaaatcgggatcgaatattaactccagagaatcggaagcattgcccataggaggcaaaaggtctatggctcatgtctgaaaaatgcctgctgctgccaagttagctattgggagcaatctggaaaaacttgctcccaggagggctttgtgtctggccagcttgattttcctaatggtctcatctcctttgctagtgtctttgtcatgcgtctctggccctcgtgggtaaatgacaaacgggaccaatgggtttgccaagccctttgctgttcgcagcctcacattcccccggtgcctctcccatggctttgtgctgctgagtcgctctcatgaagcccttagggagagcacctgttgtgtgcctgacaccacgctggagctgtgtaccaatcgtctcagccttcattaggaggccgaggtaggagtcttatatcccaggtgaggaatttgaagctcagaaaggttgaggggctccccagaggtcacacagcctgtgtgcagtggagctggcaccattcagactttcagccgactcagcaactttcccttgccctgggctgcctcctcctgagagctgttccccaccgccctgcctcttccggttggaggctctcatgtctctttggggagagctggcagtgtgcggagctgataacattttcccaatattgagcagttcccaaggacagtcagcatttctagacttccacaaaattatgctgcatttggctggagcccggtgttcagtggtttccctgcccgaggtcgctgcagccccatctaccacatcttcatgtggacattgagattcacatgctggctcctgaagggtgctcagtctccttggtgattaaggtcctgcttgaactgctgccaactccatgtcagggaagtcgcttttggtgcctggctggtttgcccagagccaagctggggcaaggggcagccagccctggcttccaaggctcccgtactgtctgtgtccttgtataaggagctttgctcttggaattactgaaagtctgtggcccaagagagagacacaagtggccttaagtctttttgaagtgttatttcatccagggaaatgcctcgagccatagagcctgaaatcatctttgttggctcagaaaataccttagcttcactcagctggactgcattgaaggcgaggctgccccttggatcaagcagaaaacaagagaaagaaagaacgttccctttggggatagtctggaaagttgggatttgcaaataaaggctctggaagcattgctggtcctgaagctttggaggtgggcagagagagcttcaagaagactagatgcaaaccctggaaaggattaaggctcaactctggagaaacaggccacagcctctcagagcagctgttggctgtaaatagaggtagcaaggccgctcccaggcccctgtgagtgtgggcacctgtgcatgcaatgctccgactctgcagaggtgccaagtgcccctgctgggccagtcccagagagttaggaagtcaaggcctgcaactcctggttcttcctgtttggaccagttcttgtgccattggcaggatgagaggcagcagccaggcgggagctgtgtctagcagcacctgtagcccacgtgctgctaattagctggaaaactggcgaaggcagaacctttgctaccaggaatcttgacatgtggggtctgtctttgagaatttgtaaatgaacagtccaatatttcctctcggctcattttgcacatccatttttggggaaatgtgatttctctctctttttttttttttttttttgcctaaggcacaatctcaagaggtcctgagaccacgtacccatgatttttttcttgctctgtgatacccaataactccttcacctaagccctgttgttgattttgaagtgcttcctaggccagtgattttagcttctgccagctgcttttgccagtagattaacgtgtttttatttttcaaactccgtgtttcctaacgtggagtgtatgggtctaagagagcctgctgtcctccctgccttccaccttggagaggaggctggacgcatcagcagtggccagggcaggtcgcaaaatctcccagcctagagaccacacctgaaacggctgaagccagcttgcacaagggctgctgtccctctgcggcaggcagagctggtgggggcaggggtcacagagcagtcatagacaccatggaccagggcaggagaagggcagatggcacatgggcacaacagggccttgtccttagagcactggggggtcatggctgggaggggcatggcaggggctggcatccctgtagagccagaggggccacccagggcagtgacattccagatatgttgggctcacctcatccttgctgtgagactggagttccatggggacatgaagtcagtacaccgcagagctgctcagctgctctacctctcgctgacttttttgttgcacatatacattttctttcaattagcatttatttcagcttttatttaagctttttgacagtacatgtaaaatatatgattataaccatttaaaaataccttatgtacctggttttttttggaaactagatagaaatatatttatcttttacataaaagaagtgtgtagtggggtggtccagggctttgtggtggcttagtggccatcggggtcccaggctcttcccacctttctcttttgggtccacctcttggctcctggcttccttcctctggggcctgactgtccaggatggcagctggagctcctgctctgggcacggttggcatcagagcccactgctccccatccactctttaatccagatgctggtaatgtccctttccaaggcataactaagataagctggaaggttcttacgaggctttgctagaggccctgggaggtggggggaaaggcaagagggcagtgcccacccatagaccgggtcacatgacctggcatcagcgccgtggggtcctttgggcttcacctccctctcccctctgcccccacgtcatcccaccctcatcctcaccctcaccattcccatcccgtaccgtaatgtcccttgcaaggcctaactctgtgaggaatgaaaccacctcatccttgttccaataacatgagtgaccgaatttacaaacgagtgaatgtggacctctggaaacattacccagcttgtttttacttttcactttctctttctgcccctttcatttccgtaggagccctttacctagatgagaagtgtccccccgcctggggaatatatcagtcagaacaatcttcctgcagacatgcaccattagacccgagtgacggtggtgccatttaaacctcagagcaggtaaaaggtggtcctgaaacctgtctacccacagggtgctatggaatctgaatcacttcttttttcctagagccctggggtggggagctccctcaagtgttcacatgtgtgtggaatgaggaacacccatctccttggccctctccaccctgaagagttagttattaaaataattggcaagctcttgcaaatgtcagtcatccattgttcagaatggaatagcaataatacatccctggctgccctgggcttggccaggattactcactgaaggcctcagggttactggcacacactttcttttcctaataatcccatcccctcagctttcctaaggctagagtgaatttcgtgttcctttagtttacataagatggtgaacttggcaaaagctatcattaaacagaagctaagagaaagcctatgtcgtggaatccagaatgggtattgccattcactgctgtccacagaagctgtcttgaatttctttctgtgtcttttctttttttttctttaagactgttgtttaccagactgggctctgtggaacacaggtgtcctgggagatggttaatcattacaaaatattggtaacaatctaaagatgcatacataagagagtggtcaaataaaccattttccattca

SEQ ID NO: 2402 - DNA, 1816 bp, Homo Sapiens
  NM_004615
gcctcttccccctcccgcgcgcccgcccgccgcctgccgccgccgccgccgccgccggagctctgtagtatggcatcgaggagaatggagaccaaacctgtgataacctgtctcaaaaccctcctcatcatctactccttcgtcttctggatcactggggtgatcctgctggctgttggagtctggggcaaacttactctgggcacctatatctcccttattgccgagaactccacaaatgctccctatgtgctcatcggaactggcaccactattgttgtctttggcctgtttggatgctttgctacatgtcgtggtagcccatggatgctgaaactgtatgccatgtttctgtccctggtgttcctggctgagctcgtagctggcatttcagggtttgtgtttcgtcatgagatcaaggacaccttcctgaggacttacacggacgctatgcagacttacaatggcaatgatgagaggagccgggcagtggaccatgtgcagcgcagcctgagctgctgtggtgtgcagaactacaccaactggagcaccagcccctacttcctggagcatggcatcccccccagctgctgcatgaacgaaactgattgtaatccccaggatctacacaatctgactgtggccgccaccaaagttaaccagaagggttgttatgatctggtaactagtttcatggagactaacatgggaatcatcgctggagtggcgtttggaatcgcattctcccagttaattggcatgctgctggcctgctgtctgtcccggttcatcacggccaatcagtatgagatggtgtaaggagaagtctttcaagaatgacggaataagagacctgttttaaaaaggaactgcagcaatctttgaaagacttccaaagaatgttagagcacagtacataatacacttgccctgctccctctcccccttaccccacaacgtgcaactgacactcccacccagtctctgctccacctttcagcccacgtcacgtgtagtgtccattttgtgaagccctgttgtgccacagagtgtagccaggtccccctgcagctagtcctagtgaacctcaccccgaggccctgcatgggccagcccctccatctgtacttggtccaactgcaactcatcatcggtgactggttatcacaccatcgctggcccctttgggccctgcatgtagtgtgggaggctcctgttagctcctcactgtggtaaatgccacacacctttaagtagataagcagacgatagttatctgttcttttgacttaatctcatttggtttgattttccctctactaaggctttcctaccttcttcaggctgcctaagacatgtaacgaaacacttcaataattgtccatgaggagaaaaaaagcatgtgtcatgcatgaaggaaactgaacttgaggtggcctccttgcttgttacatacctgggtatgtgtaggcagtttagtgcatctttgcctctcggttgaaacctgtataaccctgttacaaagctgtgttgttgcttcttgtgaaggccatgatattttgtttttccccaattaattgctattgtgttattttactacttctctctgtattttttcttgcattgacattatagacattgaggacctcatccaaacaatttaaaaatgagtgtgaagggggaacaagtcaaaatatttttaaaagatcttcaaaagtaatgcctctgtctagcatgccaacaagaatgcattgatattgtgaacatttgtgatatatgtattaataaatagagcaattacaagcaaaaaaaaaaa

SEQ ID NO: 2403 - DNA, 4116 bp, Homo Sapiens
  NM_004618
ggagaaggcgggcggaagttccacgccaagatactggattcggtgctgaggcggcggctgcggcacgggaaaggctcagtgactgaagctccaaaggccagcaggctggtggggacgtgaccgaagcgaggctctggttccctttcggtgggcgccatttgagcctcatctctggcttccccaggatgcgccggcagccggggagcggctccgggcgcgaggtctgaggatgatctttcctgtcgcccgctacgcgctccggtggctgcgacggcccgaagaccgtgccttttcccgcgccgccatggagatggccctccgaggcgtgcggaaagtcctctgtgtggccgaaaaaaacgacgcggccaaggggatcgccgacctgctgtcaaacggtcgcatgaggcggagagaaggactttcaaaattcaacaagatctatgaatttgattatcatctgtatggccagaatgttaccatggtaatgacttcagtttctggacatttactggctcatgatttccagatgcagtttcgaaaatggcagagctgcaaccctcttgtcctctttgaagcagaaattgaaaagtactgcccagagaattttgtagacatcaagaaaactttggaacgagagactcgccagtgccaggctctggtgatctggactgactgtgatagagaaggcgaaaacatcgggtttgagattatccacgtgtgtaaggctgtaaagcccaatctgcaggtgttgcgagcccgattctctgagatcacaccccatgccgtcaggacagcttgtgaaaacctgaccgagcctgatcagagggtgagcgatgctgtggatgtgaggcaggagctggacctgaggattggagctgcctttactaggttccagaccctgcggcttcagaggatttttcctgaggtgctggcagagcagctcatcagttacggcagctgccagttccccacactgggctttgtggtggagcggttcaaagccattcaggcttttgtaccagaaatcttccacagaattaaagtaactcatgaccacaaagatggtatcgtagaattcaactggaaaaggcatcgactctttaaccacacggcttgcctagttctctatcagttgtgtgtggaggatcccatggcaactgtggtagaggtcagatctaagcccaagagcaagtggcggcctcaagccttggacactgtggagcttgagaagctggcttctcgaaagttgagaataaatgctaaagaaaccatgaggattgctgagaagctctacactcaagggtacatcagctatccccgaacagaaacaaacatttttcccagagacttaaacctgacggtgttggtggaacagcagacccccgatccacgctggggggcctttgcccagagcattctagagcggggtggtcccaccccacgcaatgggaacaagtctgaccaagctcaccctcccattcaccccaccaaatacaccaacaacttacagggagatgaacagcgactgtacgagtttattgttcgccatttcctggcttgctgctcccaggatgctcaggggcaggagaccacagtggagatcgacatcgctcaggaacgctttgtggcccatggcctcatgattctggcccgaaactatctggatgtgtatccatatgatcactggagtgacaagatcctccctgtctatgagcaaggatcccactttcagcccagcaccgtggagatggtggacggggagaccagcccacccaagctgctcaccgaggccgacctcattgccctcatggagaagcatggcattggtacggatgccactcatgcggagcacatcgagaccatcaaagcccggatgtacgtgggcctcaccccagacaagcggttcctccctgggcacctgggcatgggacttgtggaaggttatgattccatgggctatgaaatgtctaagcctgacctccgggctgaactggaagctgatctgaagctgatctgtgatggcaaaaaggacaaatttgtggttctaaggcagcaagtgcagaaatacaagcaggttttcattgaagcggtggctaaagcaaagaaattggacgaggccttggcccagtactttgggaatgggacagagttggcccagcaagaagatatctacccagccatgccagagcccatcaggaagtgcccacagtgcaacaaggacatggtccttaagaccaagaagaatggcgggttctacctcagctgcatgggtttcccagagtgtcgctcagctgtgtggcttcctgactcggtgctggaggccagcagggacagcagtgtgtgtccagtttgtcagccacaccctgtgtacaggttaaagttaaagtttaagcgcggtagccttcccccgaccatgcctctggagtttgtttgctgcatcggcggatgcgacgacaccctgagggagatcctggacctgagattttcagggggcccccccagggctagccagccctctggccgcctgcaggctaaccagtccctgaacaggatggacaacagccagcacccccagcctgctgacagcagacagactgggtcctcaaaggctctggcccagaccctcccaccacccacggctgctggtgaaagcaattctgtgacctgcaactgtggccaggaggctgtgctgctcactgtccgtaaggagggccccaaccggggccggcagttctttaagtgcaacggaggtagctgcaacttcttcctgtgggcagacagccccaatccgggagcaggagggcctcctgccttggcatatagacccctgggcgcctccctgggatgcccaccaggcccagggatccacctaggtgggtttggcaaccctggtgatggcagtggtagtggcacatcctgcctttgcagccagccctccgtcacacggactgtgcagaaggatggacccaacaaggggcgccagttccacacatgtgccaagccgagagagcagcagtgtggctttttccagtgggtcgatgagaacaccgctccagggacttctggagccccgtcctggacaggagacagaggaagaaccctggagtcggaagccagaagcaaaaggccccgggccagttcctcagacatggggtccacagcaaagaaaccccggaaatgcagcctttgccaccagcctggacacacccgtcccttttgtcctcagaacagatgagctcagggtagggtagagaacgccactttctcagacctgtcccctttgtgtttagaaatgagttaaccaggaccaagtggccatttagtgtcctggaaacttagaggacagtgttggcctttggagtcgggccttcttgtgttaaggggcacaaggtccagatcactctggagcaggccagctctgctggacagtgaccctcttcccaggcctcaggagtgaccatagccactgctgaaaagtcacgcagctgctccctcggaccccccaaggatggttgctgttagcagaggattggtgcagtcccagctgaagcccactgtgtgccaaaggaagaagctcccagggctgcttccttcacctgcagaaagccccaagtgagccaccagcactcatggggcagtccctgtccaggctgcccagggcttctcatagacgtcctgagaaggacggtgtaatgcaaggaaatggctgtggtaacactgatccttcagaagaagcttcattccctcttaatctagttaagccaggacatccagaattcattgctttaataaagaacccaggccgggtgcagtggctcatgcctgtaatcccagcactttgggaggctgtggggggcggattgcctgagctcaggagttcgagaccagccagggcaacatggtgaaaccctgtctctactaaaatacaaaaaattagccaggtgtggcggtgtgcgcctgtagacccggctactcaggaggctgaggcaggagaattgcttgaacccgggaggcggaggttgcagttagctgagattgcgccactggacgacagagcgagactcagtctcaaaaaaaatttaaaaatttaaaaaaataaaaagaatccaaccccgg

SEQ ID NO: 2404 - DNA, 3988 bp, Homo Sapiens
  NM_004619
agacgcacgtgagggaaatcagatgactggacttgtagatactaacggttctgaagcggaatggcttattcagaagagcataaaggtatgccctgtggtttcatccgccagaattccggcaactccatttccttggactttgagcccagtatagagtaccagtttgtggagcggttggaagagcgctacaaatgtgccttctgccactcggtgcttcacaacccccaccagacaggatgtgggcaccgcttctgccagcactgcatcctgtccctgagagaattaaacacagtgccaatctgccctgtagataaagaggtcatcaaatctcaggaggtttttaaagacaattgttgcaaaagagaagtcctcaacttatatgtatattgcagcaatgctcctggatgtaatgccaaggttattctgggccggtaccaggatcaccttcagcagtgcttatttcaacctgtgcagtgttctaatgagaagtgccgggagccagtcctacggaaagacctgaaagagcatttgagtgcatcctgtcagtttcgaaaggaaaaatgcctttattgcaaaaaggatgtggtagtcatcaatctacagaatcatgaggaaaacttgtgtcctgaatacccagtattttgtcccaacaattgtgcgaagattattctaaaaactgaggtagatgaacacctggctgtatgtcctgaagctgagcaagactgtccttttaagcactatggctgtgctgtaacggataaacggaggaacctgcagcaacatgagcattcagccttacgggagcacatgcgtttggttttagaaaagaatgtccaattagaagaacagatttctgacttacacaagagcctagaacagaaagaaagtaaaatccagcagctagcagaaactataaagaaacttgaaaaggagttcaagcagtttgcacagttgtttggcaaaaatggaagcttcctcccaaacatccaggtttttgccagtcacattgacaagtcagcttggctagaagctcaagtgcatcaattattacaaatggttaaccagcaacaaaataaatttgacctgagacctttgatggaagcagttgatacagtgaaacagaaaattaccctgctagaaaacaatgatcaaagattagccgttttagaagaggaaactaacaaacatgatacccacattaatattcataaagcacagctgagtaaaaatgaagagcgatttaaactgctggagggtacttgctataatggaaagctcatttggaaggtgacagattacaagatgaagaagagagaggcggtggatgggcacacagtgtccatcttcagccagtccttctacaccagccgctgtggctaccggctctgtgctagagcatacctgaatggggatgggtcagggagggggtcacacctgtccctatactttgtggtcatgcgaggagagtttgactcactgttgcagtggccattcaggcagagggtgaccctgatgcttctggaccagagtggcaaaaagaacattatggagaccttcaaacctgaccccaatagcagcagctttaaaagacctgatggggagatgaacattgcatctggctgtccccgctttgtggctcattctgttttggagaatgccaagaacgcctacattaaagatgacactctgttcttgaaagtggccgtggacttaactgacctggaggatctctagtcactgttatggggtgataagaggacttcttggggccagaactgtggaggagagcacatttgattatcatattgacctggatttagactcaaagcacatttgtatttgcctttttccttaacgtttgaagtcagtttaaaacttctgaagtgctgtctttttacattttactctgtcccagtttgaaacttaaaactcttagaatattctcttattatttatatttttatatttcttgaaagatggtaagtttcttgaagtttttggggcgtttctcttttactggtgcttagcgcagtgtctcgggcactctaaatattgagtgttatggaggacacagaggtagcagaatcccagttgaaaatgttttgatattttattgtttggcctattgattctagacctggccttaagtctgcaaaagccatctttataaggtaggctgttccagttaagtagtgggtgatgtagttacaaagataatatgctcagtttggacctttttttcagttaaatgctaaatatatgaaaattactatacctctaagtattttcatgaaattcaccagcagtttgcaagcacagttttgcaaggctgcataagaactggtgaatggggtaagcattttcattcttcctgctgaagtaaagcagaaagtactgcatagtatatgagatatagccagctagctaaagttcagattttgttaggttcaaccctatgaaaaaaactattttcataggtcaaaaatggtaaaaaattagcagtttcataagattcaaccaaataaatatatatatacacacacacatacatatacacctatatatgtgtgtatacaaacagttcgaatgtattttggtgacagtaataaatcaatgtgaggatggatagaatttagtatatgatagagaaaatgtcataaatggataaaaggaatttacaacttgaggagaaaacctttacaatttcctatgggtgtcagaagtactctcagcgaaaactgatggctaaaacagtatctactattctctgataactttttttttgagacagagtttcattgtcacccaggctggagtacagtggcatgatctcagctcactgcaaactctgcctcccgaattcaagtgattctcctgcctcagcctcctgagtagctgggattacaggcgcccgtcaccacacccaggtaatttttgtatttttagtagagacggagttttgccatgttggccaagctgatctcaaactcctgacctcaagtgatctgcccgcctcggcctcccaaagtgctgagattacaggcatgacccaccgcgtcaagcctctgacaactattgaatttgtaagctgctatgcaaatgggcatttatataaacttgtgatgtttcttgtcagaattctgagtactctgtgaagaacagaaatgatcatattcttatgcatctatctgtatgggtctgaaggtgtatatacaaactgagatgagtccttatgactcttgataagcctgagtttaacaacaacaaaaatgccaagttgtcctgagcccttctgcgttgttatgccacttccctactgctcatatgcacgctggctcccctgggcacgcaaggatgagtatgggccatgggcccctgtagagctgcttacctggtgatgaccatgcaccttacaatttctgaacagttaaccctatagaagcatgctttatatgagtgtcttctgggaagaggaaccttcttaatctcttctgtgggattttcaaaatgctaaagactcacactgcagcaatcatcccagatgattaaattcaaagaaataggttcacaacaggaatatactgaagaactagagtgtcactgctggtgaactgtggcacggttgctcaacacatcacctcggacaaattcaggaagcatttctttagcccacaagtccagacccaggtgctctgtatgtttgtttttaatattcatcatatccaagttcactctgtcttcctgagcagtggaagatcatattgctgtaacttcttttaagtagttgatgtggaaaacattttaaagtgaatttgtcaaaatgctggttttgtgttttatccaacttttgtgcatatatataaagtatgtcatggcatggtttgcttaggagttcagagttccttcatcatcgaaatagtgattaagtgatcccagaacaaggaatactagagtaaaaagcacctctttttcacaaaaaaaaaaaaaa

SEQ ID NO: 2405 - DNA, 2395 bp, Homo Sapiens
  NM_004623
aggattgagggaagggaacccgcgccgccggaaggagccgctcgcttcacggcgctgggacccgggctggaaggcagggcatcagctatggaacaacctgggcaggatcccacctcagacgacgtcatggactcgttcctggaaaagttccagagccagccttaccgtggcggctttcatgaggaccagtgggagaaggaatttgaaaaggtccccctatttatgtcgagagcgccatcagaaattgatcccagggagaatcctgacttggcttgtctccagtcaattatttttgatgaggagcgttctccagaagaacaggccaagacctataaagatgagggcaatgattactttaaagaaaaagactacaagaaagctgtaatttcatacactgaaggcttaaagaagaaatgtgcagatcctgatttgaatgctgtcctttataccaaccgggcagcagcacagtactatctgggcaattttcgttctgctctcaatgatgtgacagctgccagaaagctaaaaccctgccacctcaaagcaataataagaggtgccttatgccatctggaactgaaacactttgccgaggccgtgaactggtgtgatgagggactgcaaatagatgccaaagagaagaagcttctggaaatgagggctaaagcagacaagctgaagcgaattgaacagagggatgtgaggaaagccaacttgaaagaaaagaaggagaggaatcagaatgaggctttactccaggccatcaaggctaggaatatcaggctctcagaagctgcctgtgaggatgaagattcagcctcagaaggtctaggtgagcttttcctggatggactcagcactgagaacccccatggagccaggctgagtctagatggccagggcaggctgagctggcctgtgctctttctgtacccagagtatgcccagtcggacttcatctctgcttttcatgaggactccaggtttattgatcatctaatggtgatgtttggtgaaacaccctcttgggacctagagcaaaaatattgccctgataatttggaggtctactttgaggatgaggacagggcagaactataccgggtgcctgccaagagcaccttgctacaggttctacagcaccagaggtactttgtaaaagccctgacaccagcatttttggtctgtgtaggatcctctcctttttgcaagaattttctccgggggagaaaggtgtaccagatacgatgactaagccagggcccctggatctcctcccttaccctcctctgctgggaacctagcacacctgaatcagctggacatactgctggagtccagtgctttctttccgtcaccctggggatagtccttcctggcatcgtggtgggggaggagcctctggcttccctaaactgcagcctctctggctggtcttcactttcctcagttgatataaaactctgggtcttggccatgatgtccttggactccatcgctaaagggaccatctgctgcagttaccacagcaactgacctgagcggcaccctggtctgtggagatggactcaggatccagtgacatgattctgaacttttgtggagtttgacaccttagagaagctacccctcaaactgcacatctacacacaaacaaacaatgcataggattccaaggctttaaagctgagagaccctggcctcaagttatttcatgcgcacagagggaagccatgtggggttgctgaagatgccttgaggtgaaatgggggcaggaaagccacatcttgctctgcatttataaagaccgtacaaactcagatccttggtacccctaaaaagattgccaattttcttcatctttgccatatggaggactgtgacagactttggacagtggcctcttgagttcctctgcagttttgacatttaggattttgtgtcttttaaactggaaaatcttctagcatgttgggttgttacagagtatatttttgtctgcagctgtttgttgccccattcctaagaggagtttatccatcctgacttgtagctgtgtgacttcttgcagtgcccccaccccatccccccgggagagtgtacttccctgctcccaatgcagagggatatgcacaggcatgagctgtcctgcgtctgacagaagcctgaagagtcatgtgtggttggcctgtgctcttccctctgctgtgagaacacatttcccacagaggagccgttccatggagccgagctacagcagctggcctgcagccactgagtgtcacagcaatgagagagcaatgtttgctgtagtaagcagtgagatttaggggttggttgttactatagcagagctaatacatgagtaaactgaagccagctgctgtccttaaaa

SEQ ID NO: 2406 - DNA, 2808 bp, Homo Sapiens
  NM_004624
ctcttagctctggggccacagcgccagcgccactctgccaggctcccggccatcgcccgcctggtgcgccgcccgccagctctttgcccgcgcggggccgcccgccgcgggctcagggcagaccatgcgcccgccaagtccgctgcccgcccgctggctatgcgtgctggcaggcgccctcgcctgggcccttgggccggcgggcggccaggcggccaggctgcaggaggagtgtgactatgtgcagatgatcgaggtgcagcacaagcagtgcctggaggaggcccagctggagaatgagacaataggctgcagcaagatgtgggacaacctcacctgctggccagccacccctcggggccaggtagttgtcttggcctgtcccctcatcttcaagctcttctcctccattcaaggccgcaatgtaagccgcagctgcaccgacgaaggctggacgcacctggagcctggcccgtaccccattgcctgtggtttggatgacaaggcagcgagtttggatgagcagcagaccatgttctacggttctgtgaagaccggctacaccattggctacggcctgtccctcgccacccttctggtcgccacagctatcctgagcctgttcaggaagctccactgcacgcggaactacatccacatgcacctcttcatatccttcatcctgagggctgccgctgtcttcatcaaagacttggccctcttcgacagcggggagtcggaccagtgctccgagggctcggtgggctgtaaggcagccatggtctttttccaatattgtgtcatggctaacttcttctggctgctggtggagggcctctacctgtacaccctgcttgccgtctccttcttctctgagcggaagtacttctgggggtacatactcatcggctggggggtacccagcacattcaccatggtgtggaccatcgccaggatccattttgaggattatgggtgctgggacaccatcaactcctcactgtggtggatcataaagggccccatcctcacctccatcttggtaaacttcatcctgtttatttgcatcatccgaatcctgcttcagaaactgcggcccccagatatcaggaagagtgacagcagtccatactcaaggctagccaggtccacactcctgctgatccccctgtttggagtacactacatcatgttcgccttctttccggacaattttaagcctgaagtgaagatggtctttgagctcgtcgtggggtctttccagggttttgtggtggctatcctctactgcttcctcaatggtgaggtgcaggcggagctgaggcggaagtggcggcgctggcacctgcagggcgtcctgggctggaaccccaaataccggcacccgtcgggaggcagcaacggcgccacgtgcagcacgcaggtttccatgctgacccgcgtcagcccaggtgcccgccgctcctccagcttccaagccgaagtctccctggtctgaccaccaggatcccaggggcccaaggcggcccctcccgccccttcccactcaccccggcagacgccggggacagaggcctgcccgggcgcggccagccccggccctgggctcggaggctgcccccggccccctggtctctggtccggacactcctagagaacgcagccctagagcctgcctggagcgtttctagcaagtgagagagatgggagctcctctcctggaggattgcaggtggaactcagtcattagactcctcctccaaaggccccctacgccaatcaagggcaaaaagtctacatactttcatcctgactctgccccctgctggctcttctgcccaattggaggaaagcaaccggtggatcctcaaacaacactggtgtgacctgagggcagaaaggttctgcccgggaaggtcaccagcaccaacaccacggtagtgcctgaaatttcaccattgctgtcaagttcctttgggttaagcattaccactcaggcatttgactgaagatgcagctcactaccctattctctctttacgcttagttatcagctttttaaagtgggttattctggagtttttgtttggagagcacacctatcttagtggttccccaccgaagtggactggcccctgggtcagtctggtgggaggacggtgcaacccaaggactgagggactctgaagcctctgggaaatgagaaggcagccaccagcgaatgctaggtctcggactaagcctacctgctctccaagtctcagtggcttcatctgtcaagtgggatctgtcacaccagccatacttatctctctgtgctgtggaagcaacaggaatcaagagctgccctccttgtccacccacctatgtgccaactgttgtaactaggctcagagatgtgcacccatgggctctgacagaaagcagatacctcaccctgctacacatacaggatttgaactcagatctgtctgataggaatgtgaaagcacggactcttactgctaacttttgtgtatcgtaaccagccagatcctcttggttatttgtttaccacttgtattattaatgccattatccctgaatcccccttgccaccccaccctccctggagtgtggctgaggaggcctccatctcatgtatcatctggataggagcctgctggtcacagcctcctctgtctgcccttcaccccagtggccactcagcttcctacccacacctctgccagaagatcccctcaggactgcaacaggcttgtgcaacaataaatgttggcttggattggcaaaaaaaaaaaaaaaaaa

SEQ ID NO: 2407 - DNA, 1732 bp, Homo Sapiens
  NM_004625
gaggggcgggggctggaggcagcagcgcccccgcactccccgcgtctcgcacacttgcaccggtcgctcgcgcgcagcccggcgtcgccccacgccgcgctcgctcctccctccctcctcccgctccgtggctcccgtgctcctggcgaggctcaggcgcggagcgcgcggacgggcgcaccgacagacggccccggggacgcctcggctcgcgcctcccgggcgggctatgttgattgccccgccggggccggcccgcgggatcagcacagcccggcccgcggccccggcggccaatcgggactatgaaccggaaagcgcggcgctgcctgggccacctctttctcagcctgggcatggtctacctccggatcggtggcttctcctcagtggtagctctgggcgcaagcatcatctgtaacaagatcccaggcctggctcccagacagcgggcgatctgccagagccggcccgacgccatcatcgtcataggagaaggctcacaaatgggcctggacgagtgtcagtttcagttccgcaatggccgctggaactgctctgcactgggagagcgcaccgtcttcgggaaggagctcaaagtggggagccgggaggctgcgttcacctacgccatcattgccgccggcgtggcccacgccatcacagctgcctgtacccagggcaacctgagcgactgtggctgcgacaaagagaagcaaggccagtaccaccgggacgagggctggaagtggggtggctgctctgccgacatccgctacggcatcggcttcgccaaggtctttgtggatgcccgggagatcaagcagaatgcccggactctcatgaacttgcacaacaacgaggcaggccgaaagatcctggaggagaacatgaagctggaatgtaagtgccacggcgtgtcaggctcgtgcaccaccaagacgtgctggaccacactgccacagtttcgggagctgggctacgtgctcaaggacaagtacaacgaggccgttcacgtggagcctgtgcgtgccagccgcaacaagcggcccaccttcctgaagatcaagaagccactgtcgtaccgcaagcccatggacacggacctggtgtacatcgagaagtcgcccaactactgcgaggaggacccggtgaccggcagtgtgggcacccagggccgcgcctgcaacaagacggctccccaggccagcggctgtgacctcatgtgctgtgggcgtggctacaacacccaccagtacgcccgcgtgtggcagtgcaactgtaagttccactggtgctgctatgtcaagtgcaacacgtgcagcgagcgcacggagatgtacacgtgcaagtgagccccgtgtgcacaccaccctcccgctgcaagtcagattgctgggaggactggaccgtttccaagctgcgggctccctggcaggatgctgagcttgtcttttctgctgaggagggtacttttcctgggtttcctgcaggcatccgtgggggaaaaaaaatctctcagagccctcaactattctgttccacacccaatgctgctccaccctcccccagacacagcccaggtccctccgcggctggagcgaagccttctgcagcaggaactctggacccctgggcctcatcacagcaatatttaacaatttattctgataaaaataatattaatttatttaattaaaaagaattcttccacaaaaaaaaaaaaaaaaaa

SEQ ID NO: 2408 - DNA, 3729 bp, Homo Sapiens
  NM_004628
cgaaggggcgtggccaagcgcaccgcctcggggcggggccggcgttctagcgcatcgcggccgggtgcgtcactcgcgaagtggaatttgcccagacaagcaacatggctcggaaacgcgcggccggcggggagccgcggggacgcgaactgcgcagccagaaatccaaggccaagagcaaggcccggcgtgaggaggaggaggaggatgcctttgaagatgagaaacccccaaagaagagccttctctccaaagtttcacaaggaaagaggaaaagaggctgcagtcatcctgggggttcagcagatggtccagcaaaaaagaaagtggccaaggtgactgttaaatctgaaaacctcaaggttataaaggatgaagccctcagcgatggggatgacctcagggactttccaagtgacctcaagaaggcacaccatctgaagagaggggctaccatgaatgaagacagcaatgaagaagaggaagaaagtgaaaatgattgggaagaggttgaagaacttagtgagcctgtgctgggtgacgtgagagaaagtacagccttctctcgatctcttctgcctgtgaagccagtggagatagagattgaaacgccagagcaggcgaagacaagagaaagaagtgaaaagataaaactggagtttgagacatatcttcggagggcgatgaaacgtttcaataaaggggtccatgaggacacacacaaggttcaccttctctgcctgctagcaaatggcttctatcgaaataacatctgcagccagccagatctgcatgctattggcctgtccatcatcccagcccgctttaccagagtgctgcctcgagatgtggacacctactacctctcaaacctggtgaagtggttcattggaacatttacagttaatgcagaactttcagccagtgaacaagataacctgcagactacattggaaaggagatttgctatttactctgctcgagatgatgaggaattggtccatatattcttactgattctccgggctctgcagctcttgacccggctggtattgtctctacagccaattcctctgaagtcagcaacagcaaagggaaagaaaccttccaaggaaagattgactgcggatccaggaggctcctcagaaacttccagccaagttctagaaaaccacaccaaaccaaagaccagcaaaggaaccaaacaagaggaaacctttgctaagggcacctgcaggccaagtgccaaagggaagaggaacaagggaggcagaaagaaacggagcaagccctcctccagcgaggaagatgagggcccaggagacaagcaggagaaggcaacccagcgacgtccgcatggccgggagcggcgggtggcctccagggtgtcttataaagaggagagtgggagtgatgaggctggcagcggctctgattttgagctctccagtggagaagcctctgatccctctgatgaggattccgaacctggccctccaaagcagaggaaagcccccgctcctcagaggacaaaggctgggtccaagagtgcctccaggacccatcgtgggagccatcgtaaggacccaagcttgccagcggcatcctcaagctcttcaagcagtaaaagaggcaagaaaatgtgcagcgatggtgagaaggcagaaaaaagaagcatagctggtatagaccagtggctagaggtgttctgtgagcaggaggaaaagtgggtatgtgtagactgtgtgcacggtgtggtgggccagcctctgacctgttacaagtacgccaccaagcccatgacctatgtggtgggcattgacagtgacggctgggtccgagatgtcacacagaggtacgacccagtctggatgacagtgacccgcaagtgccgggttgatgctgagtggtgggccgagaccttgagaccataccagagcccatttatggacagggagaagaaagaagacttggagtttcaggcaaaacacatggaccagcctttgcccactgccattggcttatataagaaccaccctctgtatgccctgaagcggcatctcctgaaatatgaggccatctatcccgagacagctgccatccttgggtattgtcgtggagaagcggtctactccagggattgtgtgcacactctgcattccagggacacgtggctgaagaaagcaagagtggtgaggcttggagaagtaccctacaagatggtgaaaggcttttctaaccgtgctcggaaagcccgacttgctgagccccagctgcgggaagaaaatgacctgggcctgtttggctactggcagacagaggagtatcagcccccagtggccgtggacgggaaggtgccccggaacgagtttgggaatgtgtacctcttcctgcccagcatgatgcctattggctgtgtccagctgaacctgcccaatctacaccgcgtggcccgcaagctggacatcgactgtgtccaggccatcactggctttgatttccatggcggctactcccatcccgtgactgatggatacatcgtctgcgaggaattcaaagacgtgctcctgactgcctgggaaaatgagcaggcagtcattgaaaggaaggagaaggagaaaaaggagaagcgggctctagggaactggaagttgctggccaaaggtctgctcatcagggagaggctgaagcgtcgctacgggcccaagagtgaggcagcagctccccacacagatgcaggaggtggactctcttctgatgaagaggaggggaccagctctcaagcagaagcggccaggatactggctgcctcctggcctcaaaaccgagaagatgaagaaaagcagaagctgaagggtgggcccaagaagaccaaaagggaaaagaaagcagcagcttcccacctgttcccatttgagcagctgtgagctgagcgcccactagaggggcacccaccagttgctgctgccccactacaggccccacacctgccctgggcatgcccagcccctggtggtgggggcttctctgctgagaaggcaaactgaggcagcatgcacggaggcggggtcaggggagacgaggccaagctgaggaggtgctgcaggtcccgtctggctccagcccttgtcagattcacccagggtgaagccttcaaagctttttgctaccaaagcccactcaccctttgagctacagaacactttgctaggagatactcttctgcctcctagacctgttctttccatctttagaaacatcagtttttgtatggaagccaccgggagatttctggatggtggtgcatccgtgaatgcgctgatcgtttcttccagttagagtcttcatctgtccgacaagttcactcgcctcggttgcggacctaggaccatttctctgcaggccacttaccttcccctgagtcaggcttactaatgctgccctcactgcctctttgcagtaggggagagagcagagaagtacaggtcatctgctgggatctagttttccaagtaacattttgtggtgacagaagcctaaaaaaagctaaaatcaggaaagaaaaggaaaaatacgaattgaaaattaaggaaatgttagtaaaatagatgagtgttaaactagattgtattcattactagataaaatgtataaagctctctgtactaaggagaaatgacttttataacattttgagaaaataataaagcatttatctaaaaaaaaaaa

SEQ ID NO: 2409 - DNA, 2649 bp, Homo Sapiens
  NM_004629
aggaggacctgggggtgtggcagcgaggaagggccgagccacggactgtggggccgaaactcgctcccgcccaccctttctcgaggctgtggcctccgcgagagccgagcgggccgcaccgccggccgtgcgactgccccagtcagacacgaccccggcttctagcccgcctaagcctgtttggggttgctgactcgtttcctccccgagtttcccgcgggaactaactcttcaagaggaccaaccgcagcccagagcttcgcagacccggccaaccagaggcgaggttgagagcccggcgggccgcggggagagagcgtcccatctgtcctggaaagcctgggcgggtggattgggaccccgagagaagcaggggagctcggcggggtgcagaagtgcccaggcccctccccgctggggttgggagcttgggcaggccagcttcacccttcctaagtccgcttctggtctccgggcccagcctcggccaccatgtcccgccagaccacctctgtgggctccagctgcctggacctgtggagggaaaagaatgaccggctcgttcgacaggccaaggtggctcagaactccggtctgactctgaggcgacagcagttggctcaggatgcactggaagggctcagagggctcctccatagtctgcaagggctccctgcagctgttcctgttcttcccttggagctgactgtcacctgcaacttcattatcctgagggcaagcttggcccagggtttcacagaggatcaggcccaggatatccagcggagcctagagagagtgctggagacacaggagcagcaggggcccaggttggaacaggggctcagggagctgtgggactctgtccttcgtgcttcctgccttctgccggagctgctgtctgccctgcaccgcctggttggcctgcaggctgccctctggttgagtgctgaccgtcttggggacctggccttgttactagagaccctgaatggcagccagagtggagcctctaaggatctgctgttacttctgaaaacttggagtcccccagctgaggaattagatgctccattgaccctgcaggatgcccagggattgaaggatgtcctcctgacagcatttgcctaccgccaaggtctccaggagctgatcacagggaacccagacaaggcactaagcagccttcatgaagcggcctcaggcctgtgtccacggcctgtgttggtccaggtgtacacagcactggggtcctgtcaccgtaagatgggaaatccacagagagcactgttgtacttggttgcagccctgaaagagggatcagcctggggtcctccacttctggaggcctctaggctctatcagcaactgggggacacaacagcagagctggagagtctggagctgctagttgaggccttgaatgtcccatgcagttccaaagccccgcagtttctcattgaggtagaattactactgccaccacctgacctagcctcaccccttcattgtggcactcagagccagaccaagcacatactagcaagcaggtgcctacagacggggagggcaggagacgctgcagagcattacttggacctgctggccctgttgctggatagctcggagccaaggttctccccacccccctcccctccagggccctgtatgcctgaggtgtttttggaggcagcggtagcactgatccaggcaggcagagcccaagatgccttgactctatgtgaggagttgctcagccgcacatcatctctgctacccaagatgtcccggctgtgggaagatgccagaaaaggaaccaaggaactgccatactgcccactctgggtctctgccacccacctgcttcagggccaggcctgggttcaactgggtgcccaaaaagtggcaattagtgaatttagcaggtgcctcgagctgctcttccgggccacacctgaggaaaaagaacaaggggcagctttcaactgtgagcagggatgtaagtcagatgcggcactgcagcagcttcgggcagccgccctaattagtcgtggactggaatgggtagccagcggccaggataccaaagccttacaggacttcctcctcagtgtgcagatgtgcccaggtaatcgagacacttactttcacctgcttcagactctgaagaggctagatcggagggatgaggccactgcactctggtggaggctggaggcccaaactaaggggtcacatgaagatgctctgtggtctctccccctgtacctagaaagctatttgagctggatccgtccctctgatcgtgacgccttccttgaagaatttcggacatctctgccaaagtcttgtgacctgtagctgccacgttttgaagagcttgagctgggtccccagtgggctgtctctctgtggggagggctttctgcttcaccatcattaggaatgtgaccattcctatataattcctggactggtgagattggtggtaggcctgtgaaatttgccctagttactaccattctcgttttggaggaaacaatctctgccaccaccaagtcattgactttgctcgaggcaccttttttcctgtttctccttttctgttgtcgagtaaaatttcatatttataaaaaaaaaaaaaaaaaa

SEQ ID NO: 2410 - DNA, 1484 bp, Homo Sapiens
  NM_004633
cccgtgaggaggaaaaggtgtgtccgctgccacccagtgtgagcgggtgacaccacccggttaggaaatcccagctcccaagagggtataaatccctgctttactgctgagctcctgctggaggtgaaagtctggcctggcagccttccccaggtgagcagcaacaaggccacgtgctgctgggtctcagtcctccacttcccgtgtcctctggaagttgtcaggagcaatgttgcgcttgtacgtgttggtaatgggagtttctgccttcacccttcagcctgcggcacacacaggggctgccagaagctgccggtttcgtgggaggcattacaagcgggagttcaggctggaaggggagcctgtagccctgaggtgcccccaggtgccctactggttgtgggcctctgtcagcccccgcatcaacctgacatggcataaaaatgactctgctaggacggtcccaggagaagaagagacacggatgtgggcccaggacggtgctctgtggcttctgccagccttgcaggaggactctggcacctacgtctgcactactagaaatgcttcttactgtgacaaaatgtccattgagctcagagtttttgagaatacagatgctttcctgccgttcatctcatacccgcaaattttaaccttgtcaacctctggggtattagtatgccctgacctgagtgaattcacccgtgacaaaactgacgtgaagattcaatggtacaaggattctcttcttttggataaagacaatgagaaatttctaagtgtgagggggaccactcacttactcgtacacgatgtggccctggaagatgctggctattaccgctgtgtcctgacatttgcccatgaaggccagcaatacaacatcactaggagtattgagctacgcatcaagaaaaaaaaagaagagaccattcctgtgatcatttcccccctcaagaccatatcagcttctctggggtcaagactgacaatcccgtgtaaggtgtttctgggaaccggcacacccttaaccaccatgctgtggtggacggccaatgacacccacatagagagcgcctacccgggaggccgcgtgaccgaggggccacgccaggaatattcagaaaataatgagaactacattgaagtgccattgatttttgatcctgtcacaagagaggatttgcacatggattttaaatgtgttgtccataataccctgagttttcagacactacgcaccacagtcaaggaagcctcctccacgttctcctggggcattgtgctggccccactttcactggccttcttggttttggggggaatatggatgcacagacggtgcaaacacagaactggaaaagcagatggtctgactgtgctatggcctcatcatcaagactttcaatcctatcccaagtgaaataaatggaatgaaataattcaaacacaaaaaaaaaaaaaaaaaaaaaaaaaaaaaa

SEQ ID NO: 2411 - DNA, 4710 bp, Homo Sapiens
  NM_004634
cgtcgccgccgctgctgccgccgccgctgccacagcctttgccgccacggtctccgccgccgctgtcctcgcgctgcctctgggagcctccattgttccagcagcgcccggtcccgagaccgggcatcttgggggctcgcgaaacgggcggcggccgacggagttgagaccccagggcgccggcgggaccaggagcggcaggggtcagctcaggaatcccggggagccgggaccaaagcgtggggcggcagggggccggggtggcgaggtctacggtctccggagttggggctcccccttcccggcccgactttccccgccgacctccccaagtggggtcggagccccggcgggcgcccccggcgatgagcccggactcgaggtggccgatgtgacagcatgggggtggactttgatgtgaagactttctgccacaacttgcgggcgactaagccaccatacgagtgcccggtggagacctgccgaaaggtctacaagagttacagtggtattgagtaccacctgtaccactatgaccacgacaacccaccacccccacaacaaactccactccgcaagcacaagaaaaaggggcgccagtcacgcccagccaacaagcagtcacccagcccctcagaggtctcacagtcaccaggccgtgaggtgatgagctatgcacaggcccagcgcatggtggaggtggacttgcatggccgcgtccaccgcatcagcatctttgacaacctggatgtggtgtcagaggatgaggaagcccccgaggaggcccctgagaatggcagcaacaaggagaacactgagacaccagctgctactcccaagtcaggcaaacataagaacaaggagaagcgcaaggactccaaccatcaccaccaccacaatgtttctgcgagcaccactcccaagctgccagaggtggtctatcgggagctggaacaggacacccctgatgccccaccccggccaacttcctattaccggtacatcgagaagtctgcagaggagctggacgaggaagtagagtatgacatggacgaggaggactacatctggctggatatcatgaatgagcgtcggaagacagagggtgtaagtcccatcccgcaggagatctttgagtacctaatggaccgactggagaaggagtcgtactttgagagtcataataaaggcgaccctaatgcgctagtggacgaggatgctgtttgctgtatctgcaatgatggtgagtgccagaacagcaatgtcatcctcttctgtgacatgtgcaacctggccgtgcaccaggagtgctacggtgtcccctatatccctgagggccagtggctgtgccgccgttgcctgcagtcaccctctcgtgctgtggattgtgccctgtgccccaacaagggcggtgccttcaagcagacagatgacgggcgctgggcccatgtggtgtgtgccttgtggatccctgaggtctgcttcgccaacacggtcttcctagagcctattgacagcattgagcacatcccaccagctcgctggaagctcacctgctacatttgcaaacaacggggctcaggggcctgcatccagtgccacaaggccaactgttacacagctttccatgtgacatgcgcccagcaggctggcctttacatgaagatggagcctgtgcgggagacaggcgccaacggcacctctttcagtgtccgcaagacagcctactgcgacatccacacgcctccaggttcagcacgccgactgcctgccctgtcccacagcgagggtgaggaggatgaagatgaggaggaggatgagggtaagggctggagctcagagaaagtcaagaaggccaaggccaagtcccggatcaaaatgaagaaggcacggaagatcctggcagagaagcgggcagcagcacctgtggtgtcagtgccctgcatcccaccacacaggcttagtaaaatcaccaaccgcctgaccatccaaaggaagagccagttcatgcagaggctgcacagctactggacactgaagcggcagtcacggaatggggtcccattgctacgtcgcctgcagacacacctgcaatctcagaggaactgtgaccaagttgggagagattctgaggataagaactgggcccttaaagaacagctcaagtcctggcagcggctccggcatgacttggagcgagctcggctgctcgtggaattgatccgcaagcgggaaaaactcaaaagggagacgatcaaggttcagcagattgccatggagatgcagctgactcctttcctcatcctccttcgcaaaaccttggagcagctccaagagaaggacacaggcaacatcttcagcgagccggtccctctgtctgaggtacctgactacctagaccacatcaaaaagcccatggactttttcaccatgaagcagaacttggaggcttaccgctacctgaattttgatgattttgaggaggacttcaacctcatcgtcagcaactgcctcaagtataacgccaaggacaccatcttctaccgggcagcagtgcggcttcgtgagcagggtggtgctgtgctccgccaggcccggcgccaggcagaaaaaatgggcattgactttgagacgggcatgcatatcccccacagcctggctggagatgaggccacacaccacactgaagatgcagccgaggaagagcggctggtcttgctggagaaccagaagcacctgccagtggaagaacagctaaagctgcttctggagcggctggacgaagtgaatgccagcaagcagagtgtgggccgctcacggcgtgcaaagatgatcaagaaagagatgacggcactgcggcggaagcttgcccatcagcgagagacgggacgtgatggccctgagcggcatggcccctcgagccggggtagtctgacaccccacccggcagcctgtgacaaggatgggcagacagatagtgcggcagaggagagcagcagccaggagacaagcaaaggcctgggtcccaacatgtcctcaacccccgcacatgaggtgggcaggagaacctcagttctgttctccaaaaagaacccgaagacagctggaccgcccaagaggccgggccggccccccaaaaaccgggagagccagatgacccccagccacggaggcagtcctgtggggcccccccagctccccatcatgagttccctgcgtcagcgcaagcggggtaggagcccccggcccagttcgagctcagacagcgacagtgataagtccacagaagaccccccaatggacttaccagccaatggcttcagcggtggaaaccaaccagtgaagaagagtttcttggtataccgtaatgactgcagccttccccggagcagctcagactctgagtccagcagcagtagcagtagcagcgctgcttcagaccggaccagcacaacgccctcaaaacaaggccggggcaaaccctccttctctcggggcactttcccagaggacagcagtgaggatacctcaggcactgagaatgaggcctactccgtgggcactggccgcggcgtgggccacagcatggtaaggaagagtctgggccggggagctggctggctgtcagaggatgaggactccccgctggatgctctggacctcgtgtgggccaaatgccgaggctatccatcatacccagctctgatcattgatccaaagatgccccgagaaggtatgttccaccatggggttcccatccctgtgcccccactggaggtgctgaaacttggggagcagatgacccaggaagcccgagagcatctctacctcgtcctcttctttgacaacaaacgaacctggcagtggctgcccaggaccaagctggttcctctgggtgtgaaccaggacctagacaaggagaagatgctggagggccgcaagtccaacatccgcaagtcagtacagatcgcctaccacagggctctgcagcaccgcagcaaggtgcaaggcgagcagagcagtgagaccagcgatagtgattgatactgctcaacacagcccaacctatagtgccctgtgacttctctcctcccctttgctcactgtcctggagtggcaccggcctctgcactgactcatttctggtcttggggccagtctcaggggaagctgggtgggggaggtccctcctgccctaagtgcagctggactgtacagaacactccaagggccaatggcagttcagcgcaaggagagggagggcccacaggtcagaaaaagctccagagacctcacagcattgtagggcggggtggtgggccaaagttaggacactgcgtaaaacaggccatcccaccacctctacctgctcatgccaggagaatccataactgcctagaggcctggggcccctaccggtcgtgaggtgagtgggcatctgtccagcctggaagaggggcactaggtgactccctcccctgctgttgtaaatactgtaattatcggagaatttaaattattctcatttgtaactgcgtttccgggtcgcgccagagtcatttggtactaaaaaaaaaaaaaaaaaagactgggggctgtccccatttcccttctctttcccatagattcccccacctttcaaactggtttgtatttatttcaaaggaagaaaatatattgattcttagaaaataaactgtcaatttagaa

SEQ ID NO: 2412 - DNA, 2240 bp, Homo Sapiens
  NM_004637
acttccgctcggggcggcggcggtggcggaagtgggagcgggcctggagtcttggccataaagcctgaggcggcggcagcggcggagttggcggcttggagagctcgggagagttccctggaaccagaacttggaccttctcgcttctgtcctccgtttagtctcctcctcggcgggagccctcgcgacgcgcccggcccggagcccccagcgcagcggccgcgtttgaaggatgacctctaggaagaaagtgttgctgaaggttatcatcctgggagattctggagtcgggaagacatcactcatgaaccagtatgtgaataagaaattcagcaatcagtacaaagccacaataggagctgactttctgaccaaggaggtgatggtggatgacaggctagtcacaatgcagatatgggacacagcaggacaggaacggttccagtctctcggtgtggccttctacagaggtgcagactgctgcgttctggtatttgatgtgactgcccccaacacattcaaaaccctagatagctggagagatgagtttctcatccaggccagtccccgagatcctgaaaacttcccatttgttgtgttgggaaacaagattgacctcgaaaacagacaagtggccacaaagcgggcacaggcctggtgctacagcaaaaacaacattccctactttgagaccagtgccaaggaggccatcaacgtggagcaggcgttccagacgattgcacggaatgcacttaagcaggaaacggaggtggagctgtacaacgaatttcctgaacctatcaaactggacaagaatgaccgggccaaggcctcggcagaaagctgcagttgctgagggggcagtgagagttgagcacagagtccttcacaaaccaagaacacacgtaggccttcaacacaattcccctctcctcttccaaacaaaacatacattgatctctcacatccagctgccaaaagaaaaccccatcaaacacagttacaccccacatatctctcacacacacacacacacgcacacacacacacacagatctgacgtaatcaaactccagcccttgcccgtgatggctccttggggtctgcctgcccacccacatgagcccgcgagtatggcagcaggacaagccagcggtggaagtcattctgatatggagttggcattggaagcttattctttttgttcactggagagagagagaactgtttacagttaatctgtgtctaattatctgattttttttattggtcttgtggtctttttaccccccctttcccctccctccttgaaggctaccccttgggaaggctggtgccccatgccccattacaggctcacacccagtctgatcaggctgagttttgtatgtatctatctgttaatgcttgttacttttaactaatcagatctttttacagtatccatttattatgtaatgcttcttagaaaagaatcttatagtacatgttaatatatgcaaccaattaaaatgtataaattagtgtaagaaattcttggattatgtgtttaagtcctgtaatgcaggcctgtaaggtggagggttgaaccctgtttggattgcagagtgttactcagaattgggaaatccagctagcggcagtattctgtacagtagacacaagaattatgtacgccttttatcaaagacttaagagccaaaaagcttttcatctctccagggggaaaactgtctagttcccttctgtgtctaaattttccaaaacgttgatttgcataatacagtggtatgtgcaatggataaattgccgttatttcaaaaattaaaattctcattttctttcttttttttcccccctgctccacacttcaaaactcccgttagatcagcattctactacaagagtgaaaggaaaaccctaacagatctgtcctagtgattttacctttgttctagaaggcgctcctttcagggttgtggtattcttaggttagcggagctttttcctcttttccccacccatctccccaatattgcccattattaattaacctctttctttggttggaaccctggcagttctgctcccttcctaggatctgcccctgcattgtagcttgcttaacggagcacttctcctttttccaaaggtctacattctagggtgtgggctgagttcttctgtaaagagatgaacgcaatgccaataaaattgaacaagaacaatgataaaaaaaa

SEQ ID NO: 2413 - DNA, 5137 bp, Homo Sapiens
  NM_004641
gcgcgcacgcagggctagcctcgcccaggcctcctccctcacgccggccgcaggacgggcgcgcacgccaagtgacgctccgaggaggaagcgcagcccccttcccctccctcgctgcccctggcccagcgggagccccccctccccccagtgcgcctgtgcggaggccctcttgattatgtgtgccctctccgggcgcccgcgttagcggccgggtggaggtggggagggaagacgctgaggaggaggaggaggcggaggaggcggtggaggggaggtggggggaatcagcaaggacatggctcctgactcctgtgcggaacgtgagtgactgagcggcaaagcccgaatggtctctagcgaccggcccgtgtcactggaggacgaggtctcccatagtatgaaggagatgattggaggctgttgcgtttgctcagacgagagaggctgggccgagaacccgctggtttattgcgacgggcacggctgcagcgtcgcggtgcatcaagcttgctatggcattgttcaagtacccactggaccgtggttttgcaggaaatgtgaatctcaggagagagcagccagagtgagatgtgaactttgtccccataaggatggagctttaaaaagaacagataatgggggttgggcccatgtggtttgtgccctgtatattccagaggtacaatttgccaatgtttccacaatggaaccaattgttttacagtctgttccgcatgatcgttataataagacttgctacatttgtgatgaacaaggaagagaaagcaaagcagccactggtgcttgcatgacatgtaataaacatggatgtcgacaggctttccatgtaacatgcgctcagtttgccggactgctttgtgaagaagaaggtaatggtgccgataatgtccaatactgtggctactgtaaataccattttagtaagctgaaaaagagcaaacggggatctaataggtcatatgatcaaagtttaagtgattcttcctctcactctcaggataaacatcatgagaaagagaaaaaaaaatataaagagaaggacaaacacaaacagaaacacaagaagcagccagaaccatcacctgcattggttccatccttgactgttactacagaaaaaacttatacaagcactagcaacaactctatatctggatcattgaagcgcttggaagatactactgcacgatttacaaatgcaaatttccaggaagtctctgcacacacctctagtggaaaagatgtttcagagactagagggtcagagggcaaagggaagaaatcttcagctcacagctcaggtcaaaggggaagaaagcctggtggtggaagaaatccaggaacaactgtgtcagcagctagcccttttcctcaaggcagtttttcaggaactccaggcagtgtaaagtcatcttctggaagttcagtgcagtctccccaggatttcctgagctttacagactcagatctgcgtaatgacagttactctcactcccaacagtcatcagcaaccaaagatgtacataaaggagagtctggaagccaggaagggggggtaaatagttttagtaccttaattggcctcccttcaacctcagctgttacttcacagcctaaaagctttgaaaattcacctggagatttgggtaattccagccttcctacagcaggatataagcgggctcaaacttctggcatagaagaagaaactgtaaaggaaaagaaaaggaaaggaaataaacaaagtaagcatgggcctggcagacccaaaggaaacaaaaatcaagagaatgtttctcatctctcagtttcttctgcttcaccaacatcatctgtagcatcagctgcaggaagcataacaagctctagtctgcagaaatctcctacattgctcaggaatggaagtttacagagcctcagtgttggctcatctccagttggttcagaaatttccatgcagtatcggcatgatggagcttgcccaacaactacgttctcagagttgctgaatgcaatacacaacgacagaggtgacagttctacactaacaaagcaagaacttaaattcataggtatttataacagcaatgatgtagcagtatcgtttccaaatgtagtatctggctcgggatctagtactcctgtctccagctctcacttacctcagcagtcttctgggcatttgcaacaagtaggagcgctctctccctcagctgtgtcatctgcagcccctgctgttgctacaactcaggcaaatactctatctggatcttctctcagtcaggcaccatctcatatgtatggcaatagatcaaattcatcaatggcagctcttatagctcagtctgaaaacaatcaaacagatcaagatcttggagacaatagccgcaacctagttggcagaggaagctcaccccgaggaagtctctcgccacgatcccctgtaagcagcttacagattcgctatgatcaaccaggcaacagcagtttggaaaatctgcctccagtagcagccagcatagaacagcttttggagaggcagtggagtgaaggacagcaatttttactagaacagggtactcctagtgacattttaggaatgctgaagtcattacaccaacttcaagttgaaaaccgaagattagaggaacaaattaaaaacttgactgccaaaaaggaacggcttcagttattgaatgcacagctttcagtgccttttccaacaataacagcaaatcctagtccgtctcatcaaatacacacattttcagcacagactgctcctactactgattccttgaacagcagtaagagccctcatataggaaacagctttttacctgataattctcttcctgtattaaatcaggacttaacctccagtggacaaagtaccagcagctcatcagctctttctaccccacctcctgctgggcagagtccggctcaacaaggctcaggagtgagtggagttcagcaggtcaatggcgtgacagtgggggcactagctagtggaatgcagcctgtaacttccaccattcctgccgtgtctgcagtgggtggaataattggagctttgccaggtaaccaactggcaattaatggcattgtaggagctttaaatggggttatgcagactcctgtcacaatgtcccagaaccctacccctctcacccacacaaccgtaccacctaatgcaacacatccaatgccagctacactgactaacagtgcctcaggactaggattactttctgaccagcaacgacaaatacttattcatcaacagcagtttcagcagttgttaaattctcaacagctcacaccagtacacaggcacccccacttcacacagctaccaccaacccatttctcaccatccatggagataatgcaagtcagaaagtagcaagacttagtgataaaactgggcctgtagctcaagagaaaagttgacacctgagaaacatctagaaattgcctatcctgctgttctagcacttcatctggctgcctttgcagtccttttactacagctatgaagaaacgcaacaagaaactcaatgcacaacaaaggattaattgctgcaaggacattcttgtaaggctttgattagttttcttgttgctttgttgcactgaaatggaattcccatgcccctaccccttaccccagttttttgaacatggaaagaaaatttaataactttttaaagtgacataatttacatgcaatatgtttatcaactcaagaatttaatatagttggtacacaactagttttgtttataaattggagatgcaaatagcaaaactaaatacttgctccatttacaaactacttgattttattgtacaagttgaaatatgctcttttgtttgggttacagtatgcttgctctaagtcaaattccaaggaactaatttcttctcctggagttgcattgattcagtattacaaatatatagcacatcacctgggacttggcaatctttgttaaaaaaaaatttcctttctaatgggatttggccaattttggtaatgaagttaggatggtaatgtctgcatctgctaaaggtaattttcttttgagaattgctttctttagtgttaagacctactcatattttgaagaaatcttgagttaagtgagttctgaggctgctgggggaaccagatcaattcaaagctaaatacttctttcagaaaggggccactgtggaaagtgctggtggggtttgcccttgatcaagtgcctccattgtgctgcaagggctgtagacagcagggtgggacagtcagtcctccgagcagcaggaatcatcccgtcacctgcagccttcccatgcttccgcctttattcagaactttctgtgccactgtagatagctcaggcaaaactattacctgggtatttatccactaatgagtcacaagaaaaggagtggatttggtaagaatagagatttgttttatttaaaccacttcccattactgaccattaaaagctcaccactagagttcctgaaacaggtgaaacctgtatgacagcccttccactttggggagccacgcttttgatgtgacagtaccgcagagtgattcccccactgaggatgtcatcatcaaactcttctttggtgtgtgaattattagtggaaaagacccagctgtaattagacctccactgtgtacttagctggaagaacatgttaattctgcaatatgtttcttggttaaacattgcacagttcttacctcatttctgtaaataaagttttgtgaatctgttttgtattgtgacaaattcataagataacattgatattttgatttgtaatatttctaattggtagatttaattgaaaagtaaaattaatttatttttatatgttcaggggaattttaaagtcaaatcttttgtagataatttaaaaaatcagtgtggtttattttacttatttaacccactggttgttattctgtaacagtttgtataaatggtaaattttgaatgtgttgttattttacctagatgtaaaattccacatgtattaaaatgtacaaaatgttttgttaataaaatttaataatgtttataaaaaaaaaaaa

SEQ ID NO: 2414 - DNA, 3118 bp, Homo Sapiens
  NM_004643
aatgaagggtggcacccaaatccccaatcaatgcctgttcaatcaacaaacatctaacaggacattatgtggtaggcatattgccaggccgtggagatgcgaatataaataggaaccggcccctcatctgcaggcgctcacaacctagttaggaaacagtaaaacaattaagcgcgccgtggagataggcccacttgtcctgggaaatgaggggaagctggggtttgcagtggtttgattgaagggggactacatgttagaggcacagactgggtgcaggtacacccaaaggaacgagaagagtggaaggaaacaacatccacaaagtaaccacatgctggcgtatcgaaggccgtgatttacggttttgagactttacctcgccagcaaaggggggccagtctgttagcggtgcagattggaggggtgacattggaagctgtccaggaaaaagaaaatggaactggggagcagaaggcctacgcaagagggcgggacagacaggacttgtgactagtagctctggactgaggaatcctccctgctttctggtgcgggagagctagtggatgatggtgccaataacctggatggggaaagtaagctccctcctggaatgcttcattcacaacctccattttcagcaacatcccatctactggtgcttcctggtcgagatacaagtttcctgaaactgctgctctgttttgggcctcacccggccaacagctcactagctggcaagcagtagtatcaagatggcggccccctaggactggctagtcatgtgacctcgggtttcccaagtttgaagcccggcagtcctttcgggggcaaggttcacctgtcacgaaacgagtgtcaccccttcgactctcgcaagccaatcggcatctgagactgggccactgcggtgaggcgatcggaagattggtcctttccagtcgcctagctagggccaatcacggagcgtcccatacttcgcgggcccgcccgtaggccggggagaagcaggaatatcgtcacagcgtggcggtattattacctaaggactcgataggaggtgggacgcgtgttgattgacaggcagatttcccctaccgggatttgagaatttggcgcagtgccccgccttagaggtggggccttatttgattgccaagtaatattccccaatggagtactagctcatggtgacgggcaggcagcttgactaatgagtcctcggcgtggccggcgcagctctccaatcgccgggcggcgggccccagtctgagcggcgatggcggcggcggcggcggcggcagcagcagcgggggctgcgggcggtcggggctccgggccggggcggcggcgccatcttgtgcccggggccggtggggaggccggggagggggccccggggggcgcaggggactacgggaacggcctggagtctgaggaactggagcctgaggagctgctgctggagcccgagccggagcccgagcccgaagaggagccgccccggccccgcgcccccccgggagctccgggccctgggcctggttcgggagcccccggcagccaagaggaggaggaggagccgggactggtcgagggtgacccgggggacggcgccattgaggacccggagctggaagctatcaaagctcgagtcagggagatggaggaagaagctgagaagctaaaggagctacagaacgaggtagagaagcagatgaatatgagtccacctccaggcaatgctggcccggtgatcatgtccattgaggagaagatggaggctgatgcccgttccatctatgttggcaatgtggactatggtgcaacagcagaagagctggaagctcactttcatggctgtggttcagtcaaccgtgttaccatactgtgtgacaaatttagtggccatcccaaagggtttgcgtatatagagttctcagacaaagagtcagtgaggacttccttggccttagatgagtccctatttagaggaaggcaaatcaaggtgatcccaaaacgaaccaacagaccaggcatcagcacaacagaccggggttttccacgagcccgctaccgcgcccggaccaccaactacaacagctcccgctctcgattctacagtggttttaacagcaggccccggggtcgcgtctacaggggccgggctagagcgacatcatggtattccccttactaaaaaaagtgtgtattaggaggagagagaggaaaaaaagaggaaagaaggaaaaaaaaaagaattaaaaaaaaaaaaaagaaaaacagaagatgaccttgatggaaaaaaaatattttttaaaaaaaagatatactgtggaaggggggagaatcccataactaactgctgaggagggacctgctttggggagtaggggaaggcccagggagtggggcagggggctgcttattcactctggggattcgccatggacacgtctcaactgcgcaagctgctgcccatgtttccctgccccacttcacccccttgggggctgctcaagggtaggtgggcgtgggtggtaggaggtttttttttttacccagggctctggaaggacaccaaactgttctgcttgttaccttccctccgtcttctcctcgcctttcacagtcccctcctgcctgctcctgtccagccaggtctaccacccaccccacccctcttctccggctccctgcccctccagattgcctggtgatctattttgtttccttttgtgtttctttttctgttttgagtgtctttctttgcaggtttctgtagccggaagatctccgttccgctcccagcggctccagtgtaaattccccttccccctggggaaatgcactaccttgttttggggggtttaggggtgtttttgtttttcagttgttttgtttttttgttttttttttttttcctttgccttttttcccttttatttggagggaatgggaggaagtgggaacagggaggtgggaggtggattttgtttatttttttagctcatttccaggggtgggaatttttttttaatatgtgtcatgaataaagttgtttttgaaaataaaaattgtttggccttttgggtgtaaaaaaaaaaaaaaaaaa

SEQ ID NO: 2415 - DNA, 3746 bp, Homo Sapiens
  NM_004644
ccctgattgagaaatccgcgcgcagcctccgccgctgcacactgcagcctctgctgaacccctgccgcgccgccgccttcgccagcccggaccggaccggcccgccttcccttcctccgctccagccggcctccggccccgcaacctcctcctcggcgaagtctccctggccgccccatgtcggccgcccccgcctacagcgaagacaagggcggctccgctggccccggggagcccgagtacggccacgaccccgcgagcggcggcatcttctcctccgactacaagcggcatgatgacctgaaggagatgctggacaccaacaaggattctctcaagctggaggccatgaagaggattgtggcgatgattgcccgaggaaagaatgcttcagacctgtttcccgcggtggtgaagaacgtggcctgtaagaacatagaggtgaagaagcttgtctatgtgtacctggtacgctacgctgaggagcagcaagacctggccctgctgtccatctccaccttccaacgtggcctaaaggatcccaaccagctgattcgtgccagtgccctccgtgtcctctctagcatccgtgtgcccatcatagtgcccatcatgatgctagctatcaaggaagccgcctcggacatgtcaccctatgtgcggaaaacagctgcccacgccatccctaaactctacagtttggactctgaccagaaggatcagctgatagaagtcattgagaagcttctggctgacaagaccacgctggtggcgggcagtgtggtgatggcctttgaggaggtctgcccggagcgcatcgacctgattcacaaaaactaccggaaactctgtaacctgctgatcgacgtggaggagtggggccaggtggtcatcatcagcatgctcacccgctacgcccgcacgcagttcctgagccccacccagaacgaatccctactagaggagaacgcggaaaaagccttctacggctcagaggaggacgaggccaagggcgcggggtctgaggagacggccgccgcggccgccccctcccgaaagccctatgtcatggaccccgaccaccggctgctgctgcgcaacaccaaacccctgctgcagagccgcagcgccgcggtggtgatggcggtggcgcagctctacttccacctggcgcccaaggcggaagtgggcgtcatcgccaaggcgctggtgcgcctgctgcgcagccacagtgaggtgcagtacgttgtgctccagaacgtggccaccatgtccatcaagcgccggggtatgtttgagccctacctgaagagcttctacatcaggtccaccgaccccacccagattaagatcctgaagctggaagtgctgaccaacctggccaatgagaccaacattcctactgtcctacgggaattccagacctatattcgcagcatggacaaggactttgtggcagccacaatccaggccattggacgctgtgcaactaacatcggccgagtccgtgacacctgcctcaatggcctggtgcagctgctgtccaaccgtgatgagcttgtggttgcagagtcagtggtcgtcattaagaaattgctacagatgcagccagcacaacatggagagatcatcaaacacttggcaaagcttacagacaacatccaggtgcccatggcccgagccagcatcctgtggctcatcggagagtactgtgagcatgtccccaggattgcacctgatgtcttaagaaaaatggccaagtcattcacagcagaggaggatattgtcaagctgcaggtcatcaacctggcagccaagctctacctgaccaactctaaacagaccaagctgctgacccagtatgtgctgagtctggccaaatatgaccagaactatgatattcgcgaccgggcgcgcttcacccggcagctcatcgtcccttccgagcagggtggggccctcagccgccatgccaagaagctcttcctggcacccaaaccagctccagtcttggagtcatccttcaaagaccgggaccacttccagctgggctcactgtcccacctgcttaatgccaaggccacaggctaccaggagctcccagactggccggaggaagccccagacccatctgtgcgcaacgtggaggtacctgaatggaccaagtgctcaaatcgggagaagagaaaggagaaggaaaaacccttctactcggactctgagggggagtcaggccccacggagtccgcagacagtgaccctgagtctgagagtgaatcggacagtaagagcagcagtgagagcggctctggggagtccagcagtgagtccgacaatgaagaccaggatgaggatgaggagaaagggagaggcagtgagagtgaacagagtgaggaggatggtaagaggaagacaaagaagaaggtgccagagagaaaaggagaagcgtcatcctctgatgagggcagcgattccagcagtagctcatcagagtccgagatgacatcggagtccgaggaggagcagttagaacctgcctcctggagcaggaaaacacctcccagcagcaaaagtgctcctgcaaccaaggagatctccctgcttgatctagaggatttcacccctcccagtgtccagcctgtgtctcccccagcaattgtgtctaccagtctggctgctgacctggagggcctgacactcacagactccaccctggtaccgtcgcttctgagtccagtatcgggtgttgggcggcaggagctgctgcaccgggtagctggcgaggggctggctgtggactacaccttcagccgccaacctttctccggggatccccacatggtgtccgtgcacatccacttctccaacagctctgatacccccatcaagggcctgcatgtgggcactcccaaactgcctgctggcatcagcatccaagaatttcccgaaattgagtccctggcacctggagaatctgccactgctgtaatgggcattaatttctgtgactcaacccaggcagccaacttccagctgtgcacccagacccgacagttctacgtctccattcagccacctgttggggagctgatggcccctgtgttcatgagtgaaaatgagtttaagaaggaacagggaaagctgatgggcatgaatgagatcacagagaaactcatgctgccagacacctgtcggagtgaccacattgtggtgcagaaagtgactgccactgccaacctgggtcgtgttccttgtgggacatctgatgagtacaggtttgcagggaggacactgactggtggaagcctcgttctgctgaccctggatgcccggccagctggagctgcccagctgactgtcaacagcgagaaaatggtgattggcaccatgctggtaaaggatgtgatacaggctctgacccagtgacttccaaatgctgtgacctgtttggctcccatctatacctccccatgacacctaggctgtcagtctctctcatctttctctctctctctcatcatcctcctcatgccagatagcattcagggtgtcctctctccctctggaggaccaagccctcccctaatgccctccccatggattccttagtgatctgtgcagagagagatggcagccactcccttcagtcctcccagatttctgtagctatttatgtagcaggctcaataaaatgtcttctctctaaaaaaaaaaaaaaaaaaaaaaaaaaaaaaaaaaaaaaaaaa

SEQ ID NO: 2416 - DNA, 2649 bp, Homo Sapiens
  NM_004645
atctctcggcttccgttgagcaccaagcaagatggcagcttccgagacggttaggctacggcttcaatttgattacccgccgccagctaccccgcactgtacggccttctggcttctggtcgacttgaacagatgccgagtcgtcacagatctcattagtctcatccgccagcgcttcggcttcagttctggggccttcctaggcctctacctggagggggggctcttgccccccgccgagagcgcgcgccttgtgagagacaacgactgcctcagagttaaattagaagagagaggagttgctgagaattctgtagtcatcagtaatggtgacattaatttatctcttagaaaagcaaagaagcgggcatttcagttagaggagggtgaagaaactgaaccagattgcaaatattcaaagaagcattggaagagtcgagagaacaataacaataatgagaaggtcttggatctggaaccaaaagctgtcacagatcagactgtcagcaaaaaaaacaagagaaaaaataaagcaacctgtggcacagtgggtgatgataacgaagaggccaaaagaaaatcaccaaagaaaaaggagaaatgtgaatataaaaaaaaggctaagaatcccaagtctccgaaagtacaggcagtgaaagactgggccaatcagagatgtagttctccaaaaggttctgctagaaacagccttgttaaagccaaaaggaaaggtagtgtaagcgtttgctcaaaagagagtcccagttcctcctcggagtctgaatcttgtgatgaatctatcagtgatggtcccagcaaagtcactttggaggccagaaattcctcagagaaattaccaactgagttatcaaaggaagaaccctctaccaaaaatacaactgcagacaaactggctataaaacttggctttagccttacccccagcaagggcaagacctctggaacaacatcttccagttcagactctagtgcagagtcagacgaccaatgcttgatgtcatcgagcaccccggagtgtgctgcgggtttcttaaagacagtaggcctttttgcaggaagaggtcgtccaggcccagggctgtcatcacagactgcaggtgctgctggatggaggcgttctggctcaaatggtggtggacaggctcctggtgcttctcccagtgtgtctctccctgctagtttaggaagaggatggggtagagaagagaaccttttttcttggaagggagctaagggacggggcatgcgggggagaggtcgaggacgagggcatcctgtttcctgtgttgtaaatagaagcactgacaaccagaggcaacagcaattaaatgacgtggtaaaaaattcatctactattatccagaatccagtagagacacccaagaaggactatagtctgttaccactgttagcagctgcccctcaagttggagaaaagattgcatttaagcttttggagctaacatccagttactctcctgatgtctctgactacaaggaaggaagaatattaagccacaatccagagacccagcaagtagatatagaaattctttcatccttacctgccttgagagaacctgggaaatttgatttagtttatcacaatgaaaatggagccgaggtagtggagtacgctgtgacacaggagagcaagatcactgtattttggaaagagttgattgacccaagactgattattgaatctccaagtaacacatcaagtacagaacctgcctgagtatgacctctccaccttatagtttatgaatgtcttgtttgtgaaagtgactataacccaaacttttttttttttttaaagaggatttggaagttgtatggatttttttgttatcttcactttactgcataggaaacaatctacctcatcatttaaaatgacatgggtgtcggttttgtagatctttggtttttttgtcaggtttaatttcagttaacaaaatgtaaaacatgacattccctgcagatattgttgtataccagtatggtttcttctctttctttaaatgtttttggccatcaagtagcagtcgtcagtaggagtttataataccaagaatgtgctgcgtatcttgtctcaataagttttaagtaacatttaaaaatattaaagcatgttatttgacctaattttttagcatttgagttgttccattaaatggagcatcttgtaaatttcaagtattttatacttgcaattgttaagagttaacaggtagttggatttgtcgcagacaatgagttaaggaatcctttcacgtttttcccaactttaaaattaaggattctcaggtccctgtgtagagcagtgaaaataagatgtgcgtatgtgtgtgtatgcctggagaattggtgtttcacttcagtgagaggattggctgtgagcttcagaccaggaaatgtgtcatcttgccaggcacctggctgagtgtgctggagtgaggatcttgaacagaaacttccttttctgttattattcactacgaagctaaaatggccaaatatataccgtgaaaattggtttcatttaacaaaagatcagatccctccttcagctgtacacatttttaaataaaatcatattgaactaaaaaaaaaaaaaaaaaa

SEQ ID NO: 2417 - DNA, 1668 bp, Homo Sapiens
  NM_004649
agtcccgacgagcaacgcgtttgtagaggggtgggtgcgcacgctctgtccctgcgtgaccttccgaccccgctgtcctcaccgcaatggcggctgtgagggccctggtggcctcgaggctcgctgcggcatctgcattcacgtccctgtcccccggcggtcggacgccttcccagcgcgcagcccttcacctctccgtgccgcgccccgcggccagggtcgcgctggtgctgtctggatgcggagtctacgatgggaccgagatccacgaggcctcggcgatcctggtgcacctgagccgtggaggggctgaagtccagatctttgctcctgacgtccctcagatgcacgtgattgaccacaccaaggggcagccgtccgaaggcgagagcaggaatgttttgaccgagtctgcgaggatcgcccgtggcaaaatcacagacctggccaacctcagtgcagccaaccatgatgctgccatctttccaggaggctttggagcggctaaaaacctgagcacgtttgccgtggacgggaaagattgcaaggtgaataaagaagtggagcgtgtcctgaaggagttccaccaggccgggaagcccatcggcttgtgctgcattgcacctgtcctcgcggccaaggtgctcagaggcgtcgaggtgactgtgggccacgagcaggaggaaggtggcaagtggccttatgccgggaccgcagaggccatcaaggccctgggtgccaagcactgcgtgaaggaagtggtcgaagctcacgtggaccagaaaaacaaggtggtcacgaccccagccttcatgtgcgagacggcactccactacatccatgatgggatcggagccatggtgaggaaggtgctggaactcactggaaagtgacgcgcatggacggggcccagctaggcgccaggacttggcctcaccctctggctgaggagctgtcggctgctttccatccagctgggagtctggcaggcccttttttttttttctttgccgaaacctgcaggcgttctctctctaaggaggatgtgctgcagtgcatgggggatgtttcttcctgggtgtggctgggctgctctcacatacagaggccgaggggccaattcgttctctgccacagggacttgcctcactgtgtcccaaaaacaaatcgcagccagcttttccagaaatagaaaattctgccgtctgaggttttatacttcaggttagttagtttttggaaggaagaacatttttaggtttgcaagcctcctgatcaggaaaccagaaataccacatttatggaccatgaaaggttggttcttgactctgaagggacttttgagttaatcagcgtaaggggatttctaaagcaggcaatccctgtagccgcagagaataaacgccttcccaaaatggcaacttcccacagccacatttcagacctgctgagactgctgagtgaggaatggcagtgaggtttcttcaattagtctcagttctcttaattttcaggaagaaagggaaattgcagcccctcagcccccaggattgacctctggggagtgatggtagcgttggtgccaggccgtgggttcaggtgtggcagaagcttgcagatgcgtccgaagggaaataaagtgtgttggcgttagactttgtgctgcaa

SEQ ID NO: 2418 - DNA, 3300 bp, Homo Sapiens
  NM_004651
atggcagtagccccgcgactgtttggggggctctgcttccgtttccgggaccagaatccggaagtggctgttgaggggcgtcttccaatctcgcacagctgcgttggctgtagaagagaacggacggcgatggcgacggtcgcagcaaatccagctgctgctgcggcggctgtggcggcggcagcggcggtgactgaggatagagagccacagcacgaggagctgccaggcctggacagccagtggcgccagatagaaaacggcgagagtgggcgagaacgtccactgcgggccggcgaaagctggttccttgtggagaagcactggtataagcagtgggaggcatacgtgcagggaggggaccaggactccagcaccttccctggctgcatcaacaatgccacactctttcaagatgagataaactggcgcctcaaggagggactggtggaaggcgaggattatgtgctgctcccagcagctgcttggcattacctggtcagctggtatggtctagagcatggccagccacccattgaacgcaaggtcatagagctgcccaacatccagaaggtcgaagtgtacccagtagaactgctgcttgtccggcacaatgatttgggcaaatctcacactgttcagttcagccataccgattctattggcctagtattgcgcacagctcgggagcggtttctggtggagccccaggaagacactcggctttgggccaagaactcagaaggctctttggataggttgtatgacacacacatcacggttctcgatgcggcccttgagactgggcagttgatcatcatggagacccgcaagaaagatggcacttggcccagcgcacagctgcatgtcatgaacaacaacatgtcggaagaggatgaggacttcaagggtcagccaggcatctgtggcctcaccaatctgggcaacacgtgcttcatgaactcggccctgcagtgcctcagcaatgtgccacagctcaccgagtacttcctcaacaactgctacctggaggagctcaacttccgcaacccactgggcatgaagggtgagatcgcagaggcctatgcagacctggtgaagcaggcgtggtctggccaccaccgctccattgtgccacatgtgttcaagaacaaggttggccattttgcatcccaatttctgggctaccagcagcatgactctcaggagctgctgtcattcctcctggacgggctgcatgaggaccttaatcgggtgaagaagaaggagtatgtggagctgtgcgatgctgctgggcgaccggatcaggaggtggcacaggaggcatggcaaaaccacaaacggcggaacgattctgtgatcgtggacactttccacggcctcttcaagtccacgctggtgtgccccgattgtggcaatgtatctgtgaccttcgaccccttctgctacctcagtgttccactgcctatcagccacaagagggtcttggaggtcttctttatccccatggatccgcgccgcaagccagagcagcaccggctcgtggtccccaagaaaggcaagatctcggatctatgtgtggctctgtccaaacacacgggcatctcgccagagaggatgatggtggctgatgtcttcagtcaccgcttctataagctctatcagctagaggagcctctgagcagcatcttggaccgtgatgatatcttcgtctatgaggtgtcaggtcgcattgaggccattgagggctcaagagaggacatcgtggttcctgtctacctgcgggagcgcacccctgcccgtgactacaacaactcctactacggcctgatgctttttggacaccccctcctggtatcagtgccccgggaccgcttcacctgggagggcctgtataacgtcctgatgtaccggctctcacgctacgtgaccaaacccaactcagatgatgaggacgatggggatgagaaagaagatgacgaggaggataaagatgacgtccctgggccctcaactgggggcagcctccgagaccctgagccagagcaggctgggcccagctctggagtcacgaacaggtgcccgttcctcctggacaattgccttggcacatctcagtggcccccaaggcgacgacgcaagcagctgttcaccctgcagacggtgaactccaatgggaccagcgaccgcacaacctcccctgaagaagtccatgcccagccgtacattgctatcgactgggagccagagatgaagaagcgttactatgacgaggtagaggctgagggctacgtgaagcatgactgcgtcgggtacgtgatgaagaaggctcccgtgcggctgcaggagtgcattgagctcttcaccactgtggagaccctggagaaggaaaacccctggtactgcccttcctgcaagcagcaccagctggcaaccaagaagctggacctgtggatgctgccggagattctcatcatccacctgaaacgcttttcctacaccaagttctcccgagagaagctggacaccctcgtggagtttcctatccgggacctggacttctctgagtttgtcatccagccacagaatgagtcgaatccggagctgtacaaatatgacctcatcgcggtttccaaccattatgggggcatgcgtgatggacactacacaacatttgcctgcaacaaggacagcggccagtggcactactttgatgacaacagcgtctcccctgtcaatgagaatcagatcgagtccaaggcagcctatgtcctcttctaccaacgccaggacgtggcgcgacgcctgctgtccccggccggctcatctggcgccccagcctcccctgcctgcagctccccacccagctctgagttcatggatgttaattgagagccctgggtcctgccacagaaaaaaaaaaaaaaaagccctctctgcaatctcgcttctcgtgtccgccccgcttctcttattcgtgttaggtgcccccgccaggcattgcaggcttagtcgtggctactgttctcctgtgccgctgcatcgctctctcccgggaaagaacaggtcgtgtctcctcctagcagtgcgcgccccgcctgtgtttgcccttccagcagtgaccctcccttctagtctttatttatggtcgtgcccttccctctcctcagcccagagtgttctgcgtgggtggtgatgggggttcacctgaacacagagtgtattttcttattgaggccctgtaccttctgctgtgtgtgtgtatatataaagcaccagtctgctccccaaaaaaaaaaa

SEQ ID NO: 2419 - DNA, 4241 bp, Homo Sapiens
  NM_004655
actggctccgcgagcctggcccgggggagtcggctggagccggctgcgctttgataaggtcctggcaactcagtaacagcccgagagccgggaaataaaaataacccctcagagcgatggatttcggggccgcccggcggccgaggcgcccgccgaaggccctgctgtaaaagagaggaggttcagatgagcccctgctgacttgagagagacagagagaccacgccgattgctgagaggaactggaagaagaaaaattcccagactcagtgggaagagctccctcaccatgagtagcgctatgttggtgacttgcctcccggaccccagcagcagcttccgtgaggatgccccgcggcccccagtgccaggggaagaaggggagaccccaccgtgtcagccaggggtgggcaagggccaggtcaccaaacccatgcctgtctcttccaacaccaggcggaacgaagatgggttgggggagccggaggggcgggcatctccggattcccctctgacccggtggaccaagtccttacactccttattgggcgatcaagacggtgcttacctgttccgaactttcctggagagggagaaatgcgtggataccttagacttctggtttgcctgcaatggattcaggcagatgaacctgaaggataccaaaactttacgagtagccaaagcgatctacaaaaggtacattgagaacaacagcattgtctccaagcagctgaagcctgccaccaagacctacataagagatggcatcaagaagcagcagattgattccatcatgtttgaccaggcgcagaccgagatccagtcggtgatggaggaaaatgcctaccagatgtttttgacttctgatatatacctcgaatatgtgaggagtgggggagaaaacacagcttacatgagtaatgggggactcgggagcctaaaggtcgtgtgtggctatctccccaccttgaatgaagaagaggagtggacttgtgccgacttcaagtgcaaactttcgccaaccgtggttggcttgtccagcaaaactctgagggccacggcgagtgtgaggtccacggaaactgttgacagtggatacaggtccttcaagaggagcgatcctgttaatccttatcacataggttctggctatgtctttgcaccagccaccagcgccaacgacagtgagatatccagtgatgcgctgacggatgattccatgtccatgacggacagcagtgtagatggaattcctccttatcgtgtgggcagtaagaaacagctccagagagaaatgcatcgcagtgtgaaggccaatggccaagtgtctctacctcatttcccgagaacccaccgcctgcccaaggagatgacccccgtggaacccgccacctttgcagctgagctgatctcgaggctggaaaagctgaagctggagttggagagccgccacagcctggaggagcgcctgcagcagatccgagaggatgaagagagagagggctccgagctcacactcaattcgcgggagggggcgcccacgcagcaccccctctccctactgccctccggcagctacgaggaagacccgcagacgatactggacgatcacctgtccagggtcctcaagacccctggctgccagtctccaggcgtaggccgctatagcccccgctcccgctccccggaccaccaccaccaccaccattcgcagtaccactccctgctcccgcccggtggcaagctgcctcccgcggccgcctcgccgggcgcctgccccctcctcgggggcaaaggctttgtgaccaagcagacgacgaagcatgtccaccaccactacatccaccaccatgccgtccccaagaccaaggaggagatcgaggcggaggccacgcagcgggtgcactgcttctgccctgggggcagcgagtattactgctactcgaaatgcaaaagccactccaaggctccggaaaccatgcccagcgagcagtttggcggcagcagaggcagtaccttgcccaaacgcaatgggaaaggcacggagccgggcctggccctgcccgccagggaaggaggggcccccggcggagctggggccctgcagcttccccgggaggaaggagacaggtcgcaggatgtctggcagtggatgctggagagtgagcggcagagcaagcccaagccccatagtgcccaaagcacaaaaaaggcctaccccttggagtctgcccgctcgtctccaggcgaacgagccagccggcaccatctgtgggggggcaacagcgggcacccccgcaccaccccccgtgcccacctgttcacccaggaccctgcgatgcctcccctgaccccacccaacacgctggctcagctggaggaggcctgtcgcaggctagctgaggtgtcgaagcccccaaagcagcggtgctgtgtggccagtcagcagagggacaggaatcattcggccactgttcagacgggagccacacccttctccaatccaagcctggctccagaagatcacaaagagccaaagaaactggcaggtgtccacgcgctccaggccagtgagttggttgtcacttactttttctgtggggaagaaattccataccggaggatgctgaaggctcagagcttgaccctgggccactttaaagagcagctcagcaaaaagggaaattataggtattacttcaaaaaagcaagcgatgagtttgcctgtggagcggtgtttgaggagatctgggaggatgagacggtgctcccgatgtatgaaggccggattctgggcaaagtggagcggatcgattgagccctggggtctggctttggtgaactgttggagcccgaagctcttgtgaactgtcttggctgtgagcaactgcgacaaaacattttgaaggaaaattaaaccaatgaagaagacaaagtctaaggaagaatcggccagtgggccttcgggagggcggggggaggttgattttcatgattcatgagctgggtactgactgagataagaaaagcctgaactatttattaaaaacatgaccactcttggctattgaagatgctgcctgtatttgagagactgccatacataatatatgacttcctagggatctgaaatccataaactaagagaaactgtgtatagcttacctgaacaggaatccttactgatatttatagaacagttgatttcccccatccccagtttatggatatgctgctttaaacttggaagggggagacaggaagttttaattgttctgactaaacttaggagttgagctaggagtgcgttcatggtttcttcactaacagaggaattatgctttgcactacgtccctccaagtgaagacagactgttttagacagactttttaaaatggtgccctaccattgacacatgcagaaattggtgcgttttgtttttttttttcctatgctgctctgttttgtcttaaaggtcttgagggttgaccatgttgcgtcatcatcaacattttgggggttgtgttggatgggatgatctgttgcagagggagaggcagggaaccctgctccttcgggccccaggttgatcctgtgactgaggctccccctcatgtagcctccccaggcccagggccctgaggcctgctagaatcactgccgctgtgctttcgtggaaatgacagttccttgttttttttgtttctgtttttgttttacattagtcattggaccacagccattcaggaactaccccctgccccacaaagaaatgaacagttgtagggagacccagcagcacctttcctccacacaccttcattttgatgttcgggtttttgtgttaagttaatctgtacattctgtttgccattgttacttgtactatacatctgtatatagtgtacggcaaaagagtattaatccactatctctagtgcttgactttaaatcagtacagtacctgtacctgcacggtcacccgctccgtgtgtcgccctatattgagggctcaagctttcccttgttttttgaaaggggtttatgtataaatatattttatgcctttttattacaagtcttgtactcaatgacttttgtcatgacattttgttctacttatactgtaaattatgcattataaagagttcatttaaggaaaattacttggtacaataattattgtaattaagagatgtagcctttattaaaattttatatttttcaaaaaaaaaaa

SEQ ID NO: 2420 - DNA, 1230 bp, Homo Sapiens
  NM_004659
catagcaagtctgccatgggccgcggggcccgtgtcccctcggaggccccgggggcaggcgtcgagcgccgctggcttggagccgcgctggtcgccctgtgcctcctccccgcgctggtgctgctggcccggctgggggccccggcggtgccggcctggagcgcagcgcagggagacgtcgctgcgctgggcctctcggcggtgccccccacccgggtcccgggcccactggccccccgcagacgccgctacacactgactccagccaggctgcgctgggaccacctcaacctcacctacaggatcctctccttcccgcggaacctgctgagcccgcgggagacgcggcgggccctagctgccgccttccgcatgtggagcgacgtgtcccccttcagcttccgcgaggtggcccccgagcagcccagcgacctccggataggcttctacccgatcaaccacacggactgcctggtctccgcgctgcaccactgcttcgacggccccacgggggagctggcccacgccttcttccccccgcacggcggcatccacttcgacgacagcgagtactgggtcctgggccccacgcgctacagctggaagaaaggcgtgtggctcacggacctggtgcacgtggcggcccacgagatcggccacgcgctgggcctgatgcactcacaacacggccgggcgctcatgcacctgaacgccacgctgcgcggctggaaggcgttgtcccaggacgagctgtgggggctgcaccggctctacggatgcctcgacaggctgttcgtgtgcgcgtcctgggcgcggaggggcttctgcgacgctcgccggcggctcatgaagaggctctgccccagcagctgcgacttctgctacgaattccccttccccacggtggccaccaccccaccgccccccaggaccaaaaccaggctggtgcccgagggcaggaacgtgaccttccgttgcggccagaagatcctccacaagaaagggaaagtgtactggtacaaggaccaggagcccctggagttctcctaccccggctacctggccctgggcgaggcgcacctgagcatcatcgccaacgccgtcaatgagggcacctacacctgcgtggtgcgccgccagcagcgcgtgctgaccacctactcctggcgagtccgtgtgcggggctgagcccggctgataaagcactttctctctgaaaaaaaaaaaaaa

SEQ ID NO: 2421 - DNA, 3169 bp, Homo Sapiens
  NM_004661
atgattggctggagtggcccgagtcgggaaaatggctgcgagtacctccatggtcccggtggctgtgacggcggcagtggcgcctgtcctgtccataaacagcgatttctcagatttgcgggaaattaaaaagcaactgctgcttattgcgggccttacccgggagcggggcctactacacagtagcaaatggtcggcggagttggctttctctctccctgcattgcctctggccgagctgcaaccgcctccgcctattacagaggaagatgcccaggatatggatgcctataccctggccaaggcctactttgacgttaaagagtatgatcgggcagcacatttcctgcatggctgcaatagcaagaaagcctattttctgtatatgtattccagatatctgtctggagaaaaaaagaaggacgatgaaacagttgatagcttaggccccctggaaaaaggacaagtgaaaaatgaggcgcttagagaattgagagtggagctcagcaaaaaacaccaagctcgagaacttgatggatttggactttatctgtatggtgtggtgcttcgaaaactggacttggttaaagaggccattgatgtgtttgtggaagctactcatgttttgcccttgcattggggagcctggttagaactctgtaacctgatcacagacaaagagatgctgaagttcctgtctttgccagacacctggatgaaagagttttttctggctcatatatacacagagttgcagttgatagaggaggccctgcaaaagtatcagaatctcattgatgtgggcttctctaagagctcgtatattgtttcccaaattgcagttgcctatcacaatatcagagatattgacaaagccctctccatttttaatgagctaaggaaacaagacccttacaggattgaaaatatggacacattctccaaccttctttatgtcaggagcatgaaatcggagttgagttatctggctcataacctctgtgagattgataaatatcgtgtagaaacgtgctgtgtaattggcaattattacagtttacgttctcagcatgagaaagcagccttatatttccagagagccctgaaattaaatcctcggtatcttggtgcctggacactaatgggacatgagtacatggagatgaagaacacgtctgctgctatccaggcttatagacatgccattgaggtcaacaaacgggactacagagcttggtatggcctcgggcagacctatgaaatccttaagatgccattttactgcctttattattatagacgggcccaccagcttcgacccaatgattctcgcatgctggttgctttaggagaatgttacgagaaactcaatcaactagtggaagccaaaaagtgttattggagagcttacgccgtgggagatgtggagaaaatggctctggtgaaactggcaaagcttcatgaacagttgactgagtcagaacaggctgcccagtgttacatcaaatatatccaagatatctattcctgtggggaaatagtagaacacttggaggaaagcactgcctttcgctatctggcccagtactattttaagtgcaaactgtgggatgaagcttcaacttgtgcacaaaagtgttgtgcatttaatgatacccgggaagaaggtaaggccttactccggcaaatcctacagcttcggaaccaaggcgagactcctaccaccgaggtgcctgctccctttttcctacctgcttcactctctgctaacaatacccccacacgcagagtttctccactcaacttgtcttctgtcacgccatagttggctactctcaagccagcacattgttagacccatcttaattaagccttacctccatgtaaagaacagcacgtctgttccaaggacctcagctcttcttgtttctacagatggcaacagctccatagggacagcttgtataattaccttcagaggccaactgacagaatcctggcaggaacagacattatcttgccagttagaagtacttctgtctcacttatgtccaaagagtggctatagatcttggccttcttccctgaatgctttttttttttggcccccaagaaagtcccttttatagcactttagcacaggcaatgctacaggaacaaagtttcaatgctgctgagagtgaaagaaaggaggaaagtctgccactctaccctgagctggcagtagggcactgagtaccctaggaagaagtcagagcaatggatacaaatgaccttgctcttggatttgctgagcatgatccctattctgatgtcagagattaggtttaaatggaatagagctatccatttgttcttactctctagggagacaatcttccaaaacagttttgggggggtcttctaaagctttcaaattggaagtaactttattcaactagagttgaataaaagaagggcaaaaataatctcacagagcttggaactgctgatagcccttactgagggcaaaagatggctatattgttagctatactcctaccaaagcaagcaaggagataggattatagataatttcacggacatttggaaataacattggtgattatacagacaagaataaactcacttcaagctggtctgttttaataaattttcaacgtaattgtctatttttttccctcccatctgcaacagaatacatttttttcagcctttatctagatgaggtaaagggaatcattcttatggtgctcttggagagtttcaggcctgtgcatgtgtgtacagcaggaggtaatatgctataatgtctgctgtaatatatttgcacagtagatgctatggatcattctgagctcagggtccagactttattcttattcccagaattttgtgttacgtttttacctcctaacatatgacacttcatcttatattaaggaaggtttagaatatctaatacgacttgaattcatttgttactaagccttctcaggcaagctgtatactagttactggtctccactgccatgccttttcaaggttcccatggtccagaatgatgtttgattcttaatttttctgtcccttttataatttgttttaatgattttgctacatttggaattcaataaaaaatgtgaacaataataaaaaaaaaaaaaaa

SEQ ID NO: 2422 - DNA, 2393 bp, Homo Sapiens
  NM_004663
agcggcagggaggggctcttcacccagtccggcagttgaagctcggcgctcgggttacccctgcagcgacgccccctggtcccacagataccactgctgctcccgccctttcgctcctcggccgcgcaatgggcacccgcgacgacgagtacgactacctctttaaagttgtccttattggagattctggtgttggaaagagtaatctcctgtctcgatttactcgaaatgagtttaatctggaaagcaagagcaccattggagtagagtttgcaacaagaagcatccaggttgatggaaaaacaataaaggcacagatatgggacacagcagggcaagagcgatatcgagctataacatcagcatattatcgtggagctgtaggtgccttattggtttatgacattgctaaacatctcacatatgaaaatgtagagcgatggctgaaagaactgagagatcatgctgatagtaacattgttatcatgcttgtgggcaataagagtgatctacgtcatctcagggcagttcctacagatgaagcaagagcttttgcagaaaagaatggtttgtcattcattgaaacttcggccctagactctacaaatgtagaagctgcttttcagacaattttaacagagatttaccgcattgtttctcagaagcaaatgtcagacagacgcgaaaatgacatgtctccaagcaacaatgtggttcctattcatgttccaccaaccactgaaaacaagccaaaggtgcagtgctgtcagaacatctaaggcatttctcttctcccctagaaggctgtgtatagtccatttcccaggtctgagatttaaatatatttgtaattcttgtgtcacttttgtgttttattacttcatacttatgaatttttccatgtcctaagtcttttgattttagctttataaaatcatccacttgtcccgaatgactgcagctttttttcatgctatggcttcactagccttagtttaataaactgaatgtttggattcctcagttattgtttacttttcatcatggaagcctgtcactgtatgtaggacataatagaacttgatcacttgaagctcagacctattggtcttgatcaaatcaaactaagaagaccttagaaataagctaccattttgccacagagcagcttataggtaatacactcttctctcagtgcagtgtacatttccacaaatctaagaattgccctataaacatagcaggattttgagagcttgaaaattttccattattctggacatgaatttctaaaatgccttaataggtttatgtagttgagtaaattttgttttttaatttttgtaagcatcaaagttgattagagaggggggcactttttctggagaattctcttagtaaacacaaaagattgttacggtttcattagtagtatggttgtggggccataagttaaacagtgctgcctggtaggctgggaactgaagagacttgtggtattccatctcgggtgcctctgttggcaatgatcaggcagcccaaaagatttaaatgatctataataatttccaagcggtagattatgtggcattttattgctcaggcaataattggtttaatgctggtagtgtcaaattttgaagtgttaattttgtcttagaaccttccagtaagtgaaatacaacctagttttatcaccatatccaccagcaggcatggataattattttaacaatgctaatatttgagttttgcagtatattatagaatatagtccagttaaatctttggtttcagtatgtctgaagagtacagtgagaggttaatttctgctcaagtggtaccacttaaaggcatgtattcttttagtatgtaaaatgaaatagtaccttgagtttaaatagaatgcatttaggcattgtagagatctgaaatagttttcttccactacattgttgaaatcaatgaagcaattagtttctcattcagaaatgtgcacactaatatttagttttgctttctcgtggataatattaagcacttactctgcagtttcctggaagttgtgtcaactgcagtgatactattcaggatggtgggaaatccccaaaaatatgtatgtgtgggcttgcttagattactatatttcatagttaatcttttgtctcttgcggtgctcatgatgtgtggggcacacggaaggcattgctgtagtcagtcattttggttttcttctatagccattttattattttagtgtattagttatgaagataatattatctatttgtaaattgctactttgtattttatgcatgctctgtaatttgatttttttttagttattgatttggattatattcacattctaataaacagttatagggggatta

SEQ ID NO: 2423 - DNA, 1235 bp, Homo Sapiens
  NM_004664
ctcagctccgcaccgcaactgaagatctgccgccgcggaacagttgcgtctccatctggctaccaacccacccaagctttcttctccaccaccaccaccttccttccttccccctcctccccctcctttccgtcttccctctccacccccgcccccaatctcctcctttttttctcactacgagcggttgctgatgctgaagccgagcgtcacttcggctcccacggcagacatggcgacattgacagtggtccagccgctcaccctggacagagatgttgcaagagcaattgaattactggaaaaactacaggaatctggagaagtaccagtgcacaagctacaatccctcaaaaaagtgcttcagagtgagttttgtacagctattcgagaggtgtatcaatatatgcatgaaacgataactgttaatggctgtcccgaattccgtgcgagggcaacagcaaaggcaacagttgcagcttttgcagctagtgaaggccactcccaccctcgagtagttgaactgccaaagactgatgaaggccttggttttaatgtgatgggaggaaaggagcaaaattcccccatttatatctctcgcataattcctggaggggtggctgaaagacacggaggcctcaaaagaggagaccagctgctatcagtgaacggagtgagtgtggaaggagaacaccatgagaaagctgtggaactactcaaggctgctaaagacagcgtcaagctggtggtgcgatacaccccaaaagttctggaagaaatggaggctcgctttgaaaagctacgaacagccaggcgtcggcagcagcagcaattgctaattcagcagcagcaacagcagcagcagcaacaaacacaacaaaaccacatgtcataggcccttgagggaaagctacttgatcaaacatccgatagtcacaaatttgaaaccgtgcttcagaatcccagcacatagtaaaagacaacactgataattatacctgtcaagaagctgtgaacacatggtgtataaattctttaccaaggcaactcaacaccttctttctctgggcttgaaccgccactgctcacgtgggctttacatacattgaccttccattcactgcagtgggaattctcagtgtgcagagggagaggttttctagtctgcaaactgaaacagtgtaagaagaataaagtctatgacttttaaataaatcaccagggccaagaaaaag

SEQ ID NO: 2424 - DNA, 2034 bp, Homo Sapiens
  NM_004665
aaaccttggccatggtcacttcctcttttccaatctctgtggcagtttttgccctaataaccctgcaggttggtactcaggacagttttatagctgcagtgtatgaacatgctgtcattttgccaaataaaacagaaacaccagtttctcaggaggatgccttgaatctcatgaacgagaatatagacattctggagacagcgatcaagcaggcagctgagcagggtgctcgaatcattgtgactccagaagatgcactttatggatggaaatttaccagggaaactgttttcccttatctggaggatatcccagaccctcaggtgaactggattccgtgtcaagacccccacagatttggtcacacaccagtacaagcaagactcagctgcctggccaaggacaactctatctatgtcttggcaaatttgggggacaaaaagccatgtaattcccgtgactccacatgtcctcctaatggctactttcaatacaataccaatgtggtgtataatacagaaggaaaactcgtggcacgttaccataagtaccacctgtactctgagcctcagtttaatgtccctgaaaagccggagttggtgactttcaacaccgcatttggaaggtttggcattttcacgtgctttgatatattcttctatgatcctggtgttaccctggtgaaagatttccatgtggacaccatactgtttcccacagcttggatgaacgttttgccccttttgacagctattgaattccattcagcttgggcaatgggaatgggagttaatcttcttgtggccaacacacatcatgtcagcctaaatatgacaggaagtggtatttatgcaccaaatggtcccaaagtgtatcattatgacatgaagacagagttgggaaaacttctcctttcagaggtggattcacatcccctatcctcgcttgcctacccaacagctgttaattggaatgcctacgccaccaccatcaaaccatttccagtacagaaaaacactttcaggggatttatttccagggatgggttcaacttcacagaactttttgaaaatgcaggaaaccttacagtctgtcaaaaggagctttgctgtcatttaagctacagaatgttacaaaaagaagagaatgaagtatacgttctaggagcttttacaggattacatggccgaaggagaagagagtactggcaggtctgcacaatgctgaagtgcaaaactactaatttgacaacttgtggacggccagtagaaactgcttctacaagatttgaaatgttctccctcagtggcacatttggaacagagtatgtttttcctgaagtgctacttaccgaaattcatctgtcacctggaaaatttgaggtgctgaaagatgggcgtttggtaaacaagaatggatcatctgggcctatactaacagtgtcactctttgggaggtggtacacaaaggactcactttacagctcatgtgggaccagcaattcagcaataacttacctgctaatattcatattattaatgatcatagctttgcaaaatattgtaatgttatagggcgtctctttatcactcagcttctgcatcatatgcttggctgaatgtgtttatcggcttcccaagtttactaagaaactttgaagggctatttcagtagtatagaccagtgagtcctaaatattttttctcatcaataattattttttaagtattatgataatgttgtccatttttttggctactctgaaatgttgcagtgtggaacaatggaaagagcctgggtgtttgggtcagataaatgaagatcaaactccagctccagcctcatttgcttgagactttgtgtgtatgggggacttgtatgtatgggagtgaggagtttcagggccattgcaaacatagctgtgcccttgaagagaatagtaatgatgggaatttagaggtttatgactgaattccctttgacattaaagactatttgaattcaaaaaaaaaaaaaaaaaaaaaaaaaaaaaaa

SEQ ID NO: 2425 - DNA, 3844 bp, Homo Sapiens
  NM_004666
agcactcattggacttcagcatgactactcagttgccagcttacgtggcaattttgcttttctatgtctcaagagccagctgccaggacactttcactgcagctgtttatgagcatgcagcgatattgcccaatgccaccctaacaccagtgtctcgtgaggaggctttggcattaatgaatcggaatctggacattttggaaggagcgatcacatcagcagcagatcagggtgcgcatattattgtgactccagaagatgctatttatggctggaacttcaacagggactctctctacccatatttggaggacatcccagaccctgaagtaaactggatcccctgtaataatcgtaacagatttggccagaccccagtacaagaaagactcagctgcctggccaagaacaactctatctatgttgtggcaaatattggggacaagaagccatgcgataccagtgatcctcagtgtccccctgatggccgttaccaatacaacactgatgtggtatttgattctcaaggaaaactggtggcacgctaccataagcaaaaccttttcatgggtgaaaatcaattcaatgtacccaaggagcctgagattgtgactttcaataccacctttggaagttttggcattttcacatgctttgatatactcttccatgatcctgctgttaccttggtgaaagatttccacgtggacaccatagtattcccaacagcttggatgaatgttttgccacatttgtcagctgttgaattccactcagcttgggctatgggcatgagggtcaatttccttgcatccaacatacattacccctcaaagaaaatgacaggaagtggcatctatgcacccaattcttcaagagcatttcattatgatatgaagacagaagagggaaaactcctcctctcgcaactggattcccacccatcccattctgcagtggtgaactggacttcctatgccagcagtatagaagcgctctcatcaggaaacaaggaatttaaaggcactgtctttttcgatgaattcacttttgtgaagctcacaggagttgcaggaaattatacagtttgtcagaaagatctctgctgtcatttaagctacaaaatgtctgagaacataccaaatgaagtgtacgctctaggggcatttgacggactgcacactgtggaagggcgctattatctacagatttgtaccctgttgaaatgtaaaacgactaatttaaacacttgcggtgactcagctgaaacagcttctaccaggtttgaaatgttctccctcagtggcactttcggaacccagtatgtctttcctgaggtgttgctgagtgaaaatcagcttgcacctggagaatttcaggtgtcaactgacggacgcttgtttagtctgaagccaacatccggacctgtcttaacagtaactctgtttgggaggttgtatgagaaggactgggcatcaaatgcttcatcaggcctcacagcacaagcaagaataataatgctaatagttatagcacctattgtatgctcattaagttggtagaatattgactttttctcttttttatttgggataatttaaaaaatgatggatgagaaaagaaagattggtccgggttaatattatcctctagtataagtgaattactagtttctctttatttagacaaacacacacacaccagataatataaacttaataaattatctgttaatgtagattttatttaaaaaactatatttgaacattggtctttcttggacgtgagctaattatatcaaataagtatcacaaatcttttacgcagaagaaataaaaactacgggtagaaaacataagaactatcataaaatttacttacaaggaggctgctcttgttaccacttttattatattacgtatcacttattcagctctgctgaaaatttccaatgactttgtttgtttgctctttttgttttttacctaaacaatacattttgattctcttgtgggttgataatgtctccccaaaatttacatgttgaagcacctcagaatgtgactgtatttggagacagggtctttaaagaggtaaaataaggtcattaggatagaccctaattcaatatgactgatgatcataaaagaagaggcgagtagggcacaacaggcacaaagggagaccataaggagacacagaggaaggacaactctttacaagctaagaagagagggcctcagaagaaaccaaccctgccaacaccttgatcttggacttccagcctccaaaactatgagaaataaatttctattgtttaagtcacccagtccatggtactttgttaggcagccctggcaaatgaatcaaagacccattcctgttcctctccccaccactactgttttctactgtaatctgaagcttcaacaaaaggcttacctggtaagaatattcagctggtctgggtcctcaagactccaatagacactcttagagaaggattgctgatggattgatagtgaaaccattagatcattgaattcctctggaattagaaaaccagagagtcccattttaagaaattagatatttaatatagcattgtgtgttctattttagtaacagcagaatctcttgacattacacaactcagtgaaacaacatcatttaagccaaaatatctcccaactgactgatagactctgagcactaatatcatagtgctgtgatgatggacaattacatagtaccgataacagccatgcactgtgcaaagcatgcccttctgcacaggagagcaaggcacttgcagtagtgatctatgccagcaaaacatcattttgagacaaacatttttgtggcagatgtttttcctaaaaagtactatatcatccaagaaatatttgagtaaaatcccttgttcttttgggtgacattaactgacatttgctttttttcaagacctaatagaaaataagaaagcccataatgtatttagaaacaggaatcctcagagcaattctctgtattctcatataatttcaatgtaaaacagaaaacatattgatgtgttggtgataggcttgaattattaaaaacttcaaaaacatcctaagtgtttcttttttgctcaacgttgtcaactatagtaggtctcccttgtggtgtaatgaattgcccccaaactattatcttaaaacaacaaacatttattatcttatagcatttctgagggtcaggatctgggactggcttagtggagttgttctggatcagggcctttggaaagttgtagttaacttgtccccagggctgccatcatctcaaggctcgggtggggctggagaaaatctgcttctcagctcactcacggcggttgccaggcctccattctttaggatgctagaaaaactttcataaaatgtcatctggcttctcctagagcaatgatactgagagagaaagcacatgagagaaagagcgagggaacttggatgtaagccacagtctttgaaaacctaatcacagaagtgacatctcttcttccacatgatgttggtcacatggaccaacaatggcacaacgtggacagaatcaaacagagttgagaatatcaggaggtggggcttcatgggggccattttggatgctatcatagtgaatatatgtatttatatttatatctgtatatattgcaatgtaatttaaaaaataggattgttttccttttctttttgctatatgtgatatgtatttcaaaatacactcccaatagttacgtctgaaaagcactacactaaaaaactttctatacattgaataattaaattaaataatctaa

SEQ ID NO: 2426 - DNA, 6513 bp, Homo Sapiens
  NM_004668
attgctaagccatccttcagacagagagggagcggctgcaagaggtaatgagagatggcaagaaagaagctgaaaaaatttactactttggagattgtgctcagtgttcttctgcttgtgttgtttatcatcagtattgttctaattgtgcttttagccaaagagtcactgaaatcaacagccccagatcctgggacaactggtaccccagatcctgggacaactggtaccccagatcctggaacaactggtaccacacatgctaggacaacgggtcccccagatcctggaacaactggtaccactcctgtttctgctgaatgtccagtggtaaatgaattggaacgaattaattgcatccctgaccagccgccaacaaaggccacatgtgaccaacgtggctgttgctggaatccccagggagctgtaagtgttccctggtgctactattccaagaatcatagctaccatgtagagggcaaccttgtcaacacaaatgcaggattcacagcccggttgaaaaatctgccttcttcaccagtgtttggaagcaatgttgacaatgttcttctcacagcagaatatcagacatctaatcgtttccactttaagttgactgaccaaaccaataacaggtttgaagtgccccacgaacacgtgcagtccttcagtggaaatgctgctgcttctttgacctaccaagttgaaatctccagacagccatttagcatcaaagtgaccagaagaagcaacaatcgtgttttgtttgactcgagcattgggcccctactgtttgctgaccagttcttgcagctctccactcgactgcctagcactaacgtgtatggcctgggagagcatgtgcaccagcagtatcggcatgatatgaattggaagacctggcccatatttaacagagacacaactcccaatggaaacggaactaatttgtatggtgcgcagacattcttcttgtgccttgaagatgctagtggattgtcctttggggtgtttctgatgaacagcaatgccatggaggttgtccttcagcctgcgccagccatcacttaccgcaccattgggggcattctcgacttctatgtgttcttgggaaacactccagagcaagttgttcaagaatatctagagctcattgggcggccagcccttccctcctactgggcgcttggatttcacctcagtcgttacgaatatggaaccttagacaacatgagggaagtcgtggagagaaatcgcgcagcacagctcccttatgatgttcagcatgctgatattgattatatggatgagagaagggacttcacttatgattcagtggattttaaaggcttccctgaatttgtcaacgagttacacaataatggacagaagcttgtcatcattgtggatccagccatctccaacaactcttcctcaagtaaaccctatggcccatatgacaggggttcagatatgaagatatgggtgaatagttcagatggagtgactccactcattggggaggtctggcctggacaaactgtgtttcctgattataccaatcccaactgtgctgtttggtggacaaaggaatttgagctttttcacaatcaagtagagtttgatggaatctggattgatatgaatgaagtctccaactttgttgatggttcggtctcaggatgttccacaaacaacctaaataatcccccattcactcccagaatcctggatgggtacctgttctgcaagactctctgtatggatgcagtgcagcactggggcaagcagtatgacattcacaatctgtatggctactccatggcggtcgccacagcagaagctgccaagactgtgttccctaataagagaagcttcattctgacccgttctacctttgcgggctctggcaagtttgcagcacattggttaggagacaacactgccacctgggatgacctgagatggtccatccctggcgtgcttgagttcaacctttttggcatcccaatggtgggtcctgacatatgtggctttgctttggacacccctgaggagctctgtaggcggtggatgcagttgggtgcattttatccgttttctagaaatcacaatggccaaggctacaaggaccaggatcctgcctcctttggagctgactccctgctgttgaattcctccaggcactaccttaacatccgctatactctattgccctacctatacaccctcttcttccgtgctcacagccgaggggacacggtggccaggccccttttgcatgagttctacgaggacaacagcacttgggatgtgcaccaacagttcttatgggggcccggcctcctcatcactccagttctggatgaaggtgcagagaaagtgatggcatatgtgcctgatgctgtctggtatgactacgagactgggagccaagtgagatggaggaagcaaaaagtcgagatggaacttcctggagacaaaattggacttcaccttcgaggaggctacatcttccccacacagcagccaaatacaaccactctggccagtcgaaagaaccctcttggtcttatcattgccctagatgagaacaaagaagcaaaaggagaacttttctgggataatggggaaacgaaggatactgtggccaataaagtgtatcttttatgtgagttttctgtcactcaaaaccgcttggaggtgaatatttcacaatcaacctacaaggaccccaataatttagcatttaatgagattaaaattcttgggacggaggaacctagcaatgttacagtgaaacacaatggtgtcccaagtcagacttctcctacagtcacttatgattctaacctgaaggttgccattatcacagatattgatcttctcctgggagaagcatacacagtggaatggagcataaagataagggatgaagaaaaaatagactgttaccctgatgagaatggtgcttctgccgaaaactgcactgcccgtggctgtatctgggaggcatccaattcttctggagtccctttttgctattttgtcaacgacctatactctgtcagtgatgttcagtataattcccatggggccacagctgacatctccttaaagtcttccgtttatgccaatgccttcccctccacacccgtgaacccccttcgcctggatgtcacttaccataagaatgaaatgctgcagttcaagatttatgatcccaacaagaatcggtatgaagttccagtccctctgaacatacccagcatgccatccagcacccctgagggtcaactctatgatgtgctcattaagaagaatccatttgggattgaaattcgccggaagagtacaggcactataatttgggactctcagctccttggctttaccttcagtgacatgtttatccgcatctccacccgccttccctccaagtacctctatggctttggggaaactgagcacaggtcctataggagagacttggagtggcacacttgggggatgttctcccgagaccagcccccagggtacaagaagaattcctatggtgtccacccctactacatggggctggaggaggacggcagtgcccatggagtgctcctgctgaacagcaatgccatggatgtgacgttccagcccctgcctgccttgacataccgcaccacagggggagttctggacttttatgtgttcttggggccgactccagagcttgtcacccagcagtacactgagttgattggccggcctgtgatggtaccttactggtctttggggttccagctgtgtcgctatggctaccagaatgactctgagatcgccagcttgtatgatgagatggtggctgcccagatcccttatgatgtgcagtactcagacatcgactacatggagcggcagctggacttcaccctcagccccaagtttgctgggtttccagctctgatcaatcgcatgaaggctgatgggatgcgggtcatcctcattctggatccagccatttctggcaatgagacacagccttatcctgccttcactcggggcgtggaggatgacgtcttcatcaaatacccaaatgatggagacattgtctggggaaaggtctggcctgattttcctgatgttgttgtgaatgggtctctagactgggacagccaagtggagctatatcgagcttatgtggccttcccagactttttccgtaattcaactgccaagtggtggaagagggaaatagaagaactatacaacaatccacagaatccagagaggagcttgaagtttgatggcatgtggattgatatgaatgaaccatcaagcttcgtgaatggggcagtttctccaggctgcagggacgcctctctgaaccaccctccctacatgccacatttggagtccagggacaggggcctgagcagcaagaccctttgtatggagagtcagcagatcctcccagacggctccctggtgcagcactacaacgtgcacaacctgtatgggtggtcccagaccagacccacatacgaagccgtgcaggaggtgacgggacagcgaggggtcgtcatcacccgctccacatttccctcttctggccgctgggcaggacattggctgggagacaacacggccgcatgggatcagctgaagaagtctatcattggcatgatggagttcagcctcttcggcatatcctatacgggagcagatatctgtgggttctttcaagatgctgaatatgagatgtgtgttcgctggatgcagctgggggccttttaccccttctcaagaaaccacaacaccattgggaccaggagacaagaccctgtgtcctgggatgttgcttttgtgaatatttccagaactgtcctgcagaccagatacaccctgttgccatatctgtataccttgatgcataaggcccacacggagggcgtcactgttgtgcggcctctgctccatgagtttgtgtcagaccaggtgacatgggacatagacagtcagttcctgctgggcccagccttcctggtcagccctgtcctggagcgtaatgccagaaatgtcactgcatatttccctagagcccgctggtatgattactacacgggtgtggatattaatgcaagaggagagtggaagaccttgccagcccctcttgaccacattaatcttcatgtccgtgggggctacatcctgccctggcaagagcctgcactgaacacccacttaagccgccagaaattcatgggcttcaaaattgccttggatgatgaaggaactgctgggggctggctcttctgggatgatgggcaaagcattgatacctatgggaaaggactctattacttggccagcttttctgccagccagaatacgatgcaaagccatataattttcaacaattacatcactggtacaaatcctttgaaactgggctacattgaaatctggggagtgggcagtgtccccgttaccagtgtcagcatctctgtgagtggcatggtcataacaccctccttcaacaatgaccccacgacacaggtattaagcatcgatgtgactgacagaaacatcagcctacataattttacttcattgacgtggataagcactctgtgaatttttacagcaagattctaactaactatgaatgactttgaaactacttatacttcatactcataaaaattattgtgtgttgctaatttgttcatacccactattggtgaaatatttctgttaattttgttatatgttttttgtgtgaaccctaaaggttaaaccttagccctgtgggataggcagttagggaggtgtggaaaatctatgcattaccttaatgtctctgtgtggttagtatggtagtgactgttcatcatatgacatttactgaagatgaactgggtccatgatgaagtgtgtgtatgtccacgtttgtaatcatagaatggaccccattcttttgttaaatacacaagagaaagctttctgtgacagttccaggtcttgaagctaatcagcatctcaagaaagtatccagaaagaacatctgctagttggttataggcggtgggaggaataatatacctaattggttataggtggggggagcatgataagcaaagaaaaggcaaacacaaggaaagatcagatgaaacagaagatgatagtaaaagtgatcctaagtaagaacataatgtaaaattgtcagcagcctcatggggaggaaaaaggaagagtcaactcacttgaagaagagggtcttgagaaatccttagcataaagggctactggtgagattgagatctgagcaggcaaagctcaaaagagagtttggaggttaaaaataatttatttttgcagtagtgtgctttgaaatgtgtaaatcttatttctaatgtatacaaccacatttcacataaaaatatgcaatttatatgccagataaaaataaaacaagtgaatttgcaagtgaaaaaaaaaaaaaaaaaaaaaaaaaaaaaa

SEQ ID NO: 2427 - DNA, 813 bp, Homo Sapiens
  NM_004669
acccgcgcctgaccgcggcagctcccaccatggcggagaccaagctccagctgtttgtcaaggcgagtgaggacggggagagcgtgggtcactgcccctcctgccagcggctcttcatggtcctgctcctcaagggcgtacctttcaccctcaccacggtggacacgcgcaggtccccggacgtgctgaaggacttcgcccccggctcgcagctgcccatcctgctctatgacagcgacgccaagacagacacgctgcagatcgaggactttctggaggagacgctggggccgcccgacttccccagcctggcgcctcgttacagggagtccaacaccgccggcaacgacgttttccacaagttctccgcgttcatcaagaacccggtgcccgcgcaggacgaagccctgtaccagcagctgctgcgcgccctcgccaggctggacagctacctgcgcgcgcccctggagcacgagctggcgggggagccgcagctgcgcgagtcccgccgccgcttcctggacggcgacaggctcacgctggccgactgcagcctcctgcccaagctgcacatcgtcgacacggtgtgcgcgcacttccgccaggcgcccatccccgcggagctgcgcggcgtacgccgctacctggacagcgcgatgcaggagaaagagttcaaatacacgtgtccgcacagcgccgagatcctggcggcctaccggcccgccgtgcacccccgctagcgccccaccccgcgtctgtcgcccaataaaggcatctttgtcgggagtgagggtgtcctgacatctgaagggc

SEQ ID NO: 2428 - DNA, 3859 bp, Homo Sapiens
  NM_004670
ctaggcggcggcggccgggtccccaaggctgggcgctgcttgcggaaccgacggggcggagaggagcgtggcgggaggaggagtaggagaagggggctggtcaagggaagtgcgacgtgtctgcggagcctttttatacctccttcccgggagtccggcagccgctgctgctgctgctgctgctgctgccgccgccgccgccgccgtccctgcgtccttcggtctctgctcccgggacccgggctccgccgcagccagccagcatgtcggggatcaagaagcaaaagacggagaaccagcagaaatccaccaatgtagtctatcaggcccaccatgtgagcaggaataagagagggcaagtggttggaacaaggggtgggttccgaggatgtaccgtgtggctaacaggtctctctggtgctggaaaaacaacgataagttttgccctggaggagtaccttgtctcccatgccatcccttgttactccctggatggggacaatgtccgtcatggccttaacagaaatctcggattctctcctggggacagagaggaaaatatccgccggattgctgaggtggctaagctgtttgctgatgctggtctggtctgcattaccagctttatttctccattcgcaaaggatcgtgagaatgcccgcaaaatacatgaatcagcagggctgccattctttgaaatatttgtagatgcacctctaaatatttgtgaaagcagagacgtaaaaggcctctataaaagggccagagctggggagattaaaggatttacaggtattgattctgattatgagaaacctgaaactcctgagcgtgtgcttaaaaccaatttgtccacagtgagtgactgtgtccaccaggtagtggaacttctgcaagagcagaacattgtaccctatactataatcaaagatatccacgaactctttgtgccggaaaacaaacttgaccacgtccgagctgaggctgaaactctcccttcattatcaattactaagctggatctccagtgggtccaggttttgagcgaaggctgggccactcccctcaaaggtttcatgcgggagaaggagtacttacaggttatgcactttgacaccctgctagatgatggcgtgatcaacatgagcatccccattgtactgcccgtctctgcagaggataagacacggctggaagggtgcagcaagtttgtcctggcacatggtggacggagggtagctatcttacgagacgctgaattctatgaacacagaaaagaggaacgctgttcccgtgtttgggggacaacatgtacaaaacacccccatatcaaaatggtgatggaaagtggggactggctggttggtggagaccttcaggtgctggagaaaataagatggaatgatgggctggaccaataccgtctgacacctctggagctcaaacagaaatgtaaagaaatgaatgctgatgcggtgtttgcattccagttgcgcaatcctgtccacaatggccatgccctgttgatgcaggacactcgccgcaggctcctagagaggggctacaagcacccggtcctcctactacaccctctgggcggctggaccaaggatgacgatgtgcctctagactggcggatgaagcagcacgcggctgtgctcgaggaaggggtcctggatcccaagtcaaccattgttgccatctttccgtctcccatgttatatgctggccccacagaggtccagtggcactgcaggtcccggatgattgcgggtgccaatttctacattgtggggagggaccctgcaggaatgccccatcctgaaaccaagaaggatctgtatgaacccactcatgggggcaaggtcttgagcatggcccctggcctcacctctgtggaaatcattccattccgagtggctgcctacaacaaagccaaaaaagccatggacttctatgatccagcaaggcacaatgagtttgacttcatctcaggaactcgaatgaggaagctcgcccgggaaggagagaatcccccagatggcttcatggcccccaaagcatggaaggtcctgacagattattacaggtccctggagaagaactaagcctttggctccagagtttctttctgaagtgctctttgattaccttttctatttttatgattagatgctttgtattaaattgcttctcaatgatgcattttaatcttttataatgaagtaaaagttgtgtctataattaaaaaaaaatatatatatatacacacacacatatacatacaaagtcaaactgaagaccaaatcttagcaggtaaaagcaatattcttatacatttcataataaaattagctctatgtattttctactgcacctgagcaggcaggtcccagatttcttaaggctttgtttgaccatgtgtctagttacttgctgaaaagtgaatatattttccagcatgtcttgacaacctgtactcttccaatgtcatttatcagttgtaaaatatatcagattgtgtcctcttctgtacaattgacaaaaaaaaaaatttttttttctcactctaaaagaggtgtggctcacatcaagattcttcctgatattttacctcatgctgtacaaagccttaatgttgtaatcatatcttacgtgttgaagacctgactggagaaacaaaatgtgcaataacgtgaattttatcttagagatctgtgcagcctatttctgtcacaaaagttatattgtctaataagagaagtcttaatggcctctgtgaataatgtaactccagttacacggtgacttttaatagcatacagtgatttgatgaaaggacgtcaaacaatgtggcgatgtcgtggaaagttatctttcccgctctttgctgtggtcattgtgtcttgcagaaaggatggccctgatgcagcagcagcgccagctgtaataaaaaataattcacactatcagactagcaaggcactagaactggaaaagaccacagaaaacaaagaatccaaccctttcatcttacaggtgaacaaactgtgatgatgcacatgtatgtgttttgtaagctgtgagcaccgtaacaaaatgtaaatttgccattattaggaagtgctggtggcagtgaagaagcacccaggccacttgactcccagtctggtgccctgtctacaccagacaacacaggagctgggtcagattcccctcagctgcttaacaaagttcctcgaacagaaagtgcttacaaagctgccttctcggatactgaaaggtcgagttttctgaactgcactgattttattgcagttgaaaaaaaaaaaaagctattccaaagatttcaagctgttctgagacatcttctgatggctttacttcctgagaggcaatgtttttactttatgcataattcattgttgccaaggaataaagtgaagaaacagcaccttttaatatataggtctctctggaagagacctaaattagaaagagaaaactgtgacaattttcatattctcattcttaaaaaacactaatcttaactaacaaaagttcttttgagaataagttacacacaatggccacagcagtttgtctttaatagtatagtgcctatactcatgtaatcggttactcactactgcctttaaaaaaaaaaaccagcatatttattgaaaacatgagacaggattatagtgccttaaccgatatattttgtgacttaaaaaatacatttaaaactgctcttctgctctagtaccatgcttagtgcaaatgattatttctatgtacaactgatgcttgttcttattttaataaatttatcagagtgaaaaaaaaaaaaaaaaaa

SEQ ID NO: 2429 - DNA, 2599 bp, Homo Sapiens
  NM_004674
cacagcaacgcgcgcgagagaagagagtattctcgcgagaagtccaggggtggccgtgatggcggcggcaggagcaggacctggccaggaagcgggtgccgggcctggcccaggagcggtcgcaaatgcaacaggggcagaagagggggagatgaagccggtggcagcgggagcagccgctcctcctggagaggggatctctgctgctccgacagttgagcccagttccggggaggctgaaggcggggaggcaaacttggtcgatgtaagcggtggcttggagacagaatcatctaatggaaaagatacactagaaggtgctggggatacatcagaggtgatggatactcaggcgggctccgtggatgaagagaatggccgacagttgggtgaggtagagctgcaatgtgggatttgtacaaaatggttcacggctgacacatttggcatagatacctcatcctgtctacctttcatgaccaactacagttttcattgcaacgtctgccatcacagtgggaatacctatttcctccggaagcaagcaaacttgaaggaaatgtgccttagtgctttggccaacctgacatggcagtcccgaacacaggatgaacatccgaagacaatgttctccaaagataaggatattataccatttattgataaatactgggagtgcatgacaaccagacagagacctgggaaaatgacttggccaaataacattgttaaaacaatgagtaaagaaagagatgtattcttggtaaaggaacacccagatccaggcagtaaagatccagaagaagattaccccaaatttggacttttggatcaggaccttagtaacattggtcctgcttatgacaaccaaaaacagagcagtgctgtgtctactagtgggaatttaaatgggggaattgcagcaggaagcagcggaaaaggacgaggagccaagcgcaaacagcaggatggagggaccacagggaccaccaagaaggcccggagtgaccctttgttttctgctcagcgccttccccctcatggctacccattggaacacccgtttaacaaagatggctatcggtatattctagctgagcctgatccgcacgcccctgaccccgagaagctggaacttgactgctgggcaggaaaacctattcctggagacctctacagagcctgcttgtatgaacgggttttgttagccctacatgatcgagctccccagttaaagatctcagatgaccggctgactgtggttggagagaagggctactctatggtgagggcctctcatggagtacggaaaggtgcctggtattttgaaatcactgtggatgagatgccaccagataccgctgccagactgggttggtcccagcccctaggaaaccttcaagctcctttaggttatgataaatttagctattcttggcggagcaaaaagggaaccaagttccaccagtccattggcaaacactactcttctggctatggacagggagacgtcctgggattttatattaatcttcctgaagacacagagacagccaagtcattgccagacacatacaaagataaggctttgataaaattcaagagttatttgtattttgaggaaaaagactttgtggataaagcagagaagagcctgaagcagactccccatagtgagataatattttataaaaatggtgtcaatcaaggtgtggcttacaaagatatttttgagggggtttacttcccagccatctcactgtacaagagctgcacggtttccattaactttggaccatgcttcaagtatcctccgaaggatctcacttaccgccctatgagtgacatgggctggggcgccgtggtagagcacaccctggctgacgtcttgtatcacgtggagacagaagtggatgggaggcgcagtcccccatgggaaccctgaccaggtccctcttttctgtcaaggactttctgggaataatactgggggttttgtttttgtttttgaactgtctcaaatgttctcccaaagatgctaaaaacacagcctctccttttagcaagttaaaaggctgggtaggactgcgggagactgcctgcctttcaccattttctccccacttccagtgactgctcttattttgtgtaccataagccaacaaccgctgactccaggattgcataagccccctgtgaaatcggtgctgtactgcataccctgccagctgtgacttgttatcctactatattttctaaggagtgaataatattgtccgagtaactaacttatttaaaagacatttccttctgtgggcattgactgtatcccacctgttttccaaggaaatggtaacctgtttctgagaacacctgaaatcaatggctatacattccaaaccaatctaaacgctatttccttttggtgtgggtttggttttgttcattttgaaatacacttttgaacactgagatccgtaaaactactagatctctggaagtgtaattgtgaaagaaacttgcttgcagctttaacaaaatgagaaacttcccaaataaaacttgttttgaagtttatgtgacaaaaaaaaaaaaaaaa

SEQ ID NO: 2430 - DNA, 5222 bp, Homo Sapiens
  NM_004685
cagtaccggcctcctccagcagggggcgctgtgggatccgccgctgtccgggacgaaccagcaagccgctctcggtccacacacgctctgtctgcctgccccgagtcccccgggaggccgcggggtttggggaagtgtttctaggagacggcgctcaccggctgcacctgcgccgttgacgccaccggggccggcagacagacccgcggcgctggctggtggagggagttcccgcttgctctctgtcgctgtcaccgccctgtttctgtagccgtatggtacgcctgtgagaccggctgccggctgacgtctccttgcgatggagcatatccggacgaccaaggtcgaacaagtaaaattacttgaccgattcagtaccagcaacaagtcattaacaggaacactgtatcttacggctacacatctattatttatcgactctcatcaaaaagaaacctggatattacaccaccatattgcctcagtagagaaacttgctttgactacttctggatgcccccttgtgatacagtgcaagaacttcagaactgtgcatttcattgttcccagagaaagagattgccatgatatttacaactctttgctacaactgtcaaaacaagcaaaatatgaagatctctatgcattttcttataatcccaaacaaaatgattcagaacgactacaaggctggcagctcattgatctcgctgaggaatataagaggatgggagtgccaaactcacactggcagttgtctgatgccaaccgggactacaagatttgtgaaacttaccccagagaactttatgttccccggatagcaagcaaaccaataattgttggtagttccaagttccggagcaagggaagattcccagttctttcctactatcatcaagataaggaggctgccatttgtcgatgtagtcagccactctctggattcagtgccaggtgcctggaggatgaacatttgcttcaagccattagtaaagccaatccagtcaatcgctatatgtacgtcatggataccaggccaaaactgaatgcaatggccaacagagcagctggaaaaggttatgaaaatgaagacaactattccaatattagatttcagtttgttggaattgaaaatattcatgtcatgaggtccagccttcagaaattattggaagtcaatggcactaaagggctttctgtcaatgatttctactccggtttggagagctcgggatggcttcgccatatcaaagctgttatggatgctgcaatcttcttggccaaagcaataacagttgaaaatgcaagtgtgttggtgcattgttccgatggttgggataggacttcccaggtttgttccctgggttctcttttattggattcctactacaggacaatcaaaggattcatggttttaatagaaaaggattggatctcttttggacataaattttcagagaggtgtggccagttggatggtgacccaaaggaagtctcaccagtgtttactcagttcttggaatgtgtgtggcatttgaccgaacagtttccacaagcctttgaattcagtgaagcatttcttcttcagatccatgagcatattcattcatgccagtttggaaacttccttggaaattgtcagaaggaaagagaagagctcaagttgaaggagaagacttattccctgtggccatttcttttggaagaccaaaagaagtacttaaatcctctctacagttccgaatctcacagatttacagttttggagccaaatacagtatctttcaattttaagttttggaggaacatgtaccatcaatttgatcgaacactgcatcctaggcagtctgtatttaatataattatgaatatgaatgagcaaaataaacaattagagaaagatattaaagacctagaatctaaaattaaacaacgcaaaaataagcaaacagatggcatcctcaccaaggaattgttacattcagttcatcctgaatcacctaacctcaaaacttccctgtgttttaaagagcagactctgctacccgtaaatgatgctcttcgaactatagagggcagcagcccggcagataatcgttatagtgaatatgcagaagagttttctaaatcagaacctgctgtggtcagcttagagtatggtgtggcaagaatgacttgttagactcatagagttttttctgcaatgattgcagtacaagaaaaggattattgtgaggatggtctgtaagcataaccaaaaggaatttgtctaataacaattttagggtttaacagtaggctaatagttgaaggaaggataataactacccttgtgagagaaataagtcattttaattgcatttccagcaaggaatgacattcagttctgtaagaaatgagtggtatttgatgtatttactcaaaacacaatttgcactgtacactagtgaattgacgtttatgatttatgttaattcagccaaacataaataaccttccttaagtacaatttaacttcaagaaaacaaaatttgacaacatagtttcttaataaatgatatggcatgtactttcaattatgtagctttgtaactatgaatatttacatattttgccttttagtgatatttaatgttaaagtgccatgaaaaatatttctaagaaagccttaaattcccagtggattctttacccttaagttttacagcctacaacaagattttttgttttgtttttcttctggtcagccttgttttgtttgtaaagaattgtgctctcattactgctgggggtgcatgctacaatacttctatataaacacttgtagaagtacactgttcacgtttagcctgccccacttttgtattcaaaattaatgaaactgaaggtttattctgatcataatttgtttagtgctacatttgataatttattatttacagcttagaatattgatttcttgaatacgtataagcacatttgactgtcttttatatatggattactgcattccattgattcttattttgtggttggctttatttctttcacaactgtgtaagtttaaagagctaaagctctaaaactgttctgagaaacaatgaatagtacatgtatatgtatatttttaaactgccttattgctcaatgagttgctgttcctggagtatctaactttcagtttactcaaaaacttttgggtaaataaaaaagggaagtacagatagtttaggttgtgcatggttgcatgaattttgaagtcatttctatgtggagcattatttttcttcttgttaaatatagaaaaaaaaagagattctagtacaaagttactgtttaacaaaagcaacataaactctgggaaagatttcattttgccatgttatatttactgtttattctgtgtactagtacatatctttaaattaccaaaaaacaagaaacaaaacataaaaaccccaaaactatcacttggaattagcaatatcacccaactggctttaaaattgaaaatttaaataacatggtggcatgaagtacaattcgagtattaggcaatttgcatagtgttcctcatgctactttctgttacacctctattatattagttttgaatataaacatctttttcagaccaaaaaaaactttattgtatgagagcttatcttatcctgtttatttttccaatgcttttctgtaatacattatgtaatttaaaaaatattcctttttaaacagcaacagaaatgcactataaaatatagtatgtgattaaccaatcctgcttccatatttaagcactgggaatggaaacttaatctctgtgactacaaagggaagtttttgtgccttggtgttccagtcactgattgtggttttagaatcttctgtggctgacttcttgtattcaactctggtttattatcttaatcttcaacttcagacatatatttgtgtgtttatatgctcacaggtggactgagaaatcagttacatcttaagtgacctacagggtatatgttggcaaaagcagactgtgtatatgtcttataaagttgaatttatgttcagtgtgtttggaagtgtatagcatgtaaattatttcatatatgatttaaaggtaattaaatgttcacattttactttgaatgtttttcttctggataaaacaaatggaatcaagttgtagttgttttttttttcttctcacctaggcaagtagacttgcccattacattaacataacagcataaggtttgaggagtttattttccaaaagtttgttgataaataatacctgtttcatacaaaaataatttccagaatatttaaaataggtatagtgggctaaaaggcccatcagatgtaggtaataatgtcattaagttttcattttgttcctgtcacttgcttatattacaatcactatttttttgtgcccttgccaacttgatggaaggcagggtccattgagtacaaacattcgaggtgaaatgtctctccaaaggcagatctggatgtaaatatgaggaagaaaataactggctgacaagaggataattttattgagggtgttttgaaaaggtcagctaggctagaagtagctcagggaatcttgagtaaagatgaagggaactcttttaaaacaaattcaatttatttggtcgggtagcagagcagggaggtggtgtcagtcaagcctgttttgaaacattttttgcagaaggtcagctttaaaatattgaaaaatttccagttgacatgctaagttggattaaatgctgatcatttataaaactatatagttgctgcaaaagtaattggggcttttgccattgaaagtgatgacaaaaaccgcaattacttttgcaccaacctaatactacagttgcagacttttattagtgacgctgatcttcattagtcaagttttagttattttgttggcttttccatgtagaattccaagtgacattaacatactttgattaattaaagaaaatttggagactgtttaagatatatgtctagatatcaatgtaaactataagctttaggaacttacatctagaagaaagcctggaatctagaataattatctcaaaaaaaagtatatataccattgtacttgatataagaaaatgtaaacatgaaaccttgacattttaataaacagtatttgtgctactctagttatttctaggaaagtaaaaaaaaaa

SEQ ID NO: 2431 - DNA, 1501 bp, Homo Sapiens
  NM_004688
ctgttagtgactaatcattggagacaaccatgtttagtatttgagcattggttaaatgctaaagaaaaatcgccgttaaagcagttttctttttcactgtctttttcttttcgcggggaacccagctgttcctgcgagggccacctcctcaggaagaccccgcagctctcccgcggcgcttctgcaggaggcagcgacagtttcgagaacccgggccttcccctcccagtgcctcccggggttccggcgtttcaggcgctgctgttttccgggaagggcaggcgcgctgggccttggggagctgcgctcggcgggcggacgcgggggatcatggaagctgataaagatgacacacaacaaattcttaaggagcattcgccagatgaatttataaaagatgaacaaaataagggactaattgatgaaattacaaagaaaaatattcaactaaagaaggagatccaaaagcttgaaacggagttacaagaggctaccaaagaattccagattaaagaggatattcctgaaacaaagatgaaattcttatcagttgaaactcctgagaatgacagccagttgtcaaatatctcctgttcgtttcaagtgagctcgaaagttccttatgagatacaaaaaggacaagcacttatcacctttgaaaaagaagaagttgctcaaaatgtggtaagcatgagtaaacatcatgtacagataaaagatgtaaatctggaggttacggccaagccagttccattaaattcaggagtcagattccaggtttatgtagaagtttctaaaatgaaaatcaatgttactgaaattcctgacacattgcgtgaagatcaaatgagagacaaactagagctgagcttttcaaagtcccgaaatggaggcggagaggtggaccgcgtggactatgacagacagtccgggagtgcagtcatcacgtttgtggagattggagtggctgacaagattttgaaaaagaaagaataccctctttatataaatcaaacctgccatagagttactgtttctccatacacagaaatacacttgaaaaagtatcagatattttcaggaacatctaagaggacagtgcttctgacaggaatggaaggcattcaaatggatgaagaaattgtggaggatttaattaacattcactttcaacgggcaaagaatggaggtggagaagtagatgtggtcaagtgttctctaggtcaacctcacatagcatactttgaagaatagacttaacagaatcatgaaaactatagctttttaacccggattactgtaaatgtttgacaaaaatgaatatgcttttccttaaaaaatgaaaactttaatttttaccatccatttatgtttagatacaaaacttatttccatgtttctgaatcttctttgtttcaaatggtgctgcatgttttcaactacaataagtgcactgtaataaaaagttttgtttatagaaaaaaaaaaaaaaaaaaaaaaa

SEQ ID NO: 2432 - DNA, 2856 bp, Homo Sapiens
  NM_004689
gcggccctcccgtccctgcgcggcctcggcggcctcggcggcggcggcggcggcggcggcggcagcagcgcggcccctttaaacgcctgcggcgccccccgcccccgccatcgcgcctccattttcccggccgcccgcgccgagcgccgcgcccgccccgggcccctccgccgccgccggcccggacatggccgccaacatgtacagggtcggagactacgtctactttgagaactcctccagcaacccatacctgatccggagaatcgaggagctcaacaagacggccaatgggaacgtggaggccaaagtggtgtgcttctaccggaggcgggacatctccagcaccctcatcgccctggccgacaagcacgcaaccctgtcagtctgctataaggccggaccgggggcggacaacggcgaggaaggggaaatagaagaggaaatggagaatccggaaatggtggacctgcccgagaaactaaagcaccagctgcggcatcgggagctgttcctctcccggcagctggagtctctgcccgccacgcacatcaggggcaagtgcagcgtcaccctgctcaacgagaccgagtcgctcaagtcctacctggagcgggaggatttcttcttctattctctagtctacgacccacagcagaagaccctgctggcagataaaggagagattcgagtaggaaaccggtaccaggcagacatcaccgacttgttaaaagaaggcgaggaggatggccgagaccagtccaggttggagacccaggtgtgggaggcgcacaacccactcacagacaagcagatcgaccagttcctggtggtggcccgctctgtgggcaccttcgcacgggccctggactgcagcagctccgtccgacagcccagcctgcacatgagcgccgcagctgcctcccgagacatcaccctgttccacgccatggatactctccacaagaacatctacgacatctccaaggccatctcggcgctggtgccgcagggcgggcccgtgctctgcagggacgagatggaggagtggtctgcatcagaggccaaccttttcgaggaagccctggaaaaatatgggaaggatttcacggacattcagcaagattttctcccgtggaagtcgctgaccagcatcattgagtactactacatgtggaagaccaccgacagatacgtgcagcagaaacgcttgaaagcagctgaagctgagagcaagttaaagcaagtttatattcccaactataacaagccaaatccgaaccaaatcagcgtcaacaacgtcaaggccggtgtggtgaacggcacgggggcgccgggccagagccctggggctggccgggcctgcgagagctgttacaccacacagtcttaccagtggtattcttggggtccccctaacatgcagtgtcgtctctgcgcatcttgttggacatattggaagaaatatggtggcttgaaaatgccaacccggttagatggagagaggccaggaccaaaccgcagtaacatgagtccccacggcctcccagcccggagcagcgggagccccaagtttgccatgaagaccaggcaggctttctatctgcacacgacgaagctgacgcggatcgcccggcgcctgtgccgtgagatcctgcgcccgtggcacgctgcgcggcacccctacctgcccatcaacagcgcggccatcaaggccgagtgcacggcgcggctgcccgaagcctcccagagcccgctggtgctgaagcaggcggtacgcaagccgctggaagccgtgcttcggtatcttgagacccacccccgcccccccaagcctgaccccgtgaaaagcgtgtccagcgtgctcagcagcctgacgcccgccaaggtggcccccgtcatcaacaacggctcccccaccatcctgggcaagcgcagctacgagcagcacaacggggtggacggcaacatgaagaagcgcctcttgatgcccagtaggggtctggcaaaccacggacaggccaggcacatgggaccaagccggaacctcctgctcaacgggaagtcctaccccaccaaagtgcgcctgatccgggggggctccctgcccccagtcaagcggcggcggatgaactggatcgacgccccggatgacgtgttctacatggccacagaggagaccaggaagatccgcaagctgctctcatcctcggaaaccaagcgtgctgcccgccggccctacaagcccatcgccctgcgccagagccaggccctgccgccgcggccaccgccacctgcgcccgtcaacgacgagcccatcgtcatcgaggactaggggccgcccccacctgcggccgccccccgcccctcgcccgcccacacggccccttcccagccagcccgccgcccgcccctcagtttggtagtgccccacctcccgccctcacctgcagagaaacgcgctccttggcggacactgggggaggagaggaagaagcgcggctaacttattccgagaatgccgaggagttgtcgtttttagctttgtgtttactttttggctggagcggagatgaggggccaccccgtgcccctgtgctgcggggccttttgcccggaggccgggccctaaggttttgttgtgttctgttgaaggtgccattttaaattttatttttattactttttttgtagatgaacttgagctctgtaacttacacctggaatgttaggatcgtgcggccgcggccggccgagctgcctggcggggttggcccttgtcttttcaagtaattttcatattaaacaaaaacaaagaaaaaaaatcttataaaaaggaaaaaaaaaaaaaaaaaa

SEQ ID NO: 2433 - DNA, 1688 bp, Homo Sapiens
  NM_004691
acttgacagcccgctgaggacgcagcgtcagctgacctggggagtcgcgattcgtgccggccggtcctggttctccggtcccgccgctcccgcagcagccatgtcgttcttcccggagctttactttaacgtggacaatggctacttggagggactggtgcgcggcctgaaggccggggtgctcagccaggccgactacctcaacctggtgcagtgcgagacgctagaggacttgaaactgcatctgcagagcactgattatggtaacttcctggccaacgaggcatcacctctgacggtgtcagtcatcgatgaccggctcaaggagaagatggtggtggagttccgccacatgaggaaccatgcctatgagccactcgccagcttcctagacttcattacttacagttacatgatcgacaacgtgatcctgctcatcacaggcacgctgcaccagcgctccatcgctgagctcgtgcccaagtgccacccactaggcagcttcgagcagatggaggccgtgaacattgctcagacacctgctgagctctacaatgccattctggtggacacgcctcttgcggcttttttccaggactgcatttcagagcaggaccttgacgagatgaacatcgagatcatccgcaacaccctctacaaggcctacctggagtccttctacaagttctgcaccctactgggcgggactacggctgatgccatgtgccccatcctggagtttgaagcagaccgccgcgccttcatcatcaccatcaattctttcggcacagagctgtccaaagaggaccgtgccaagctctttccacactgtgggcggctctaccctgagggcctggcgcagctggctcgggctgacgactatgaacaggtcaagaacgtggccgattactacccggagtacaagctgctcttcgagggtgcaggtagcaaccctggagacaagacgctggaggaccgattctttgagcacgaggtaaagctgaacaagttggccttcctgaaccagttccactttggtgtcttctatgccttcgtgaagctcaaggagcaggagtgtcgcaacatcgtgtggatcgctgaatgtatcgcccagcgccaccgcgccaaaatcgacaactacatccctatcttctagcgtcctggcccaaggctctcaattgcactctttgtgtgtgtgtgtgtgtgtgtgcgcgtgtgtgtgcgtgtgtgtgtatgtggtctgtgacaagcctgtggctcacctgcctgtccggggtgtagtacgctgtcctagcggctgcccagttctcctgaccctcttagagactgttcttaggcctgaaaaggggctgggcacccccccccaccaaggatggacgaagaccccctccagagcaaggaggccccctcagccctgtggttacagccgctgatgtatctaagaagcatgtcactttcatgttcctccctaactccctgacctgagaaccctggggcctgggggcagtttgagcctcctctcccttctgtgggtcgctcccagagccatggcccatgggaaggacagagtgtgtgtgtccttggggcctggggggatgttgctcctcagctccctccctcagccctgcccctctgagacaataaaactgccctctctaaggccaactgtcaaaaaaaaaaaaaaaaaa

SEQ ID NO: 2434 - DNA, 3828 bp, Homo Sapiens
  NM_004694
gggtggagggcccgggcgctcgggcctcaccagcccgagccaacttgcgctagagtcgggcccgccccctaaggggttaatccttttctcatgttaccgagcggcttataaggagggggaggccaagcctccgccttattgggagcctttgggggtttattctcttcccttctaacttgattaagaatgacccaaaataaattaaagctttgttccaaagccaatgtgtatactgaagtgcctgatggaggatggggctgggcggtagctgtttcatttttcttcgttgaagtcttcacctacggcatcatcaagacatttggtgtcttctttaatgacttaatggacagttttaatgaatccaatagcaggatctcatggataatctcaatctgtgtgtttgtcttaacattttcagctcccctcgccacagtcctgagcaatcgtttcggacaccgtctggtagtgatgttgggggggctacttgtcagcaccgggatggtggccgcctccttctcacaagaggtttctcatatgtacgtcgccatcggcatcatctctggtctgggatactgctttagttttctcccaactgtaaccatcctatcacaatattttggcaaaagacgttccatagtcactgcagttgcttccacaggagaatgtttcgctgtgtttgctttcgcaccagcaatcatggctctgaaggagcgcattggctggagatacagcctcctcttcgtgggcctactacagttaaacattgtcatcttcggagcactgctcagacccatctttatcagaggaccagcgtcaccgaaaatagtcatccaggaaaatcggaaagaagcgcagtatatgcttgaaaatgagaaaacacgaacctcaatagactccattgactcaggagtagaactaactacctcacctaaaaatgtgcctactcacactaacctggaactggagccgaaggccgacatgcagcaggtcctggtgaagaccagccccaggccaagcgaaaagaaagccccgctattagacttctccattttgaaagagaaaagttttatttgttatgcattatttggtctctttgcaacactgggattctttgcaccttccttgtacatcattcctctgggcattagtctgggcattgaccaggaccgcgctgcttttttattatctacgatggccattgcagaagttttcggaaggatcggagctggttttgtcctcaacagggagcccattcgtaagatttacattgagctcatctgcgtcatcttattgactgtgtctctgtttgcctttacttttgctactgaattctggggtctaatgtcatgcagcatattttttgggtttatggttggaacaataggagggactcacattccactgcttgctgaggatgatgtcgtgggcattgagaagatgtcttctgcagctggggtctacatcttcattcagagcatagcaggactggctggaccgccccttgcaggtttgttggtggaccaaagtaagatctacagcagggccttctactcctgcgcagctggcatggccctggctgctgtgtgcctcgccctggtgagaccgtgtaagatgggactgtgccagcatcatcactcaggtgaaacaaaggtagtgagccatcgtgggaagactttacaggacatacctgaagactttctggaaatggatcttgcaaaaaatgagcacagagttcacgtgcaaatggagccggtatgacacactttcttacaacaacagccactgtgttggctggagagggatggggtgggcccaacggggacacaaggaggcagaggagctaacccctctactccactttcaaaactacattttaaagggaatgtgtatgtgaagagcactaccaacatcgcttttgttttgttttgttttgttttaagctttttttttttgcttgtttttaaagccaaaacaaaaaacaaccaagcactcttccatatataaatctggctgtattcagtagcaatacaagagatatgtagaaagactctttggttcacattccgatattaaaatagtgacatgaactggcaaagtggttttaaaagctttcacgtgggataaatgattttctttttttcttttctttcttcctatggtcttgtctgaataaactactctcctgaataaaacaacatccaacccaggtcattgaaatgaaattggccagtcaaaaaaaaaaagacttcaatcatttttaaaattcctaattttcagaaatatgaataaatagtttttgttaaaccctttgtaaaataccaaggttcccgttaacaaattacggcctctgcttgctggaaatgaaatatagtttaagaccaaacattttactaataaacaaattttaagtatatatatatatatataacttgaacttcataaatgtgaagattaccacttctttttatggccagtccttatcagaagtgtttcagtacagaatatacaaaatggcatttaaaaatgtgtttcctgttgcttttagttatacagaaatatgtgactgtagtgtctttaatttaaaccgctatttattattaagttattctaggatgattaaagtaatcaaaagaaataaaatctgagacataagcagcatttttacctcctttctgcaatcctttaaatgcctcacagaatacgtcttatcttgtaaaaatactttcataaaaggccaagttgtcatgattcttccatttgattaggggcaacgtgtgctattaaaggggaaaaaataatggattgcaaatcgccttagctttcaaaactaatttgttttatcatttaagaatacttgaggaacttctttgatcagaattatatttcagagaattgttaaagcatttctgatttaaagaaaaaaccatctaattattgaagcatttctgtatttcacatgggggtaacagagacaattatgttatagcgagttacaagttgcaatttacatcttctataacacatgacttgattggtctaagttgccagaggtatcgggtaactggtcattgttttgttttgtttgttttattcttcctttttttttggagtcacactacatgtatagtattgctcacgttagcagttttctgtaaggagggcaagtgtcaggataataggtggactttttactcacctattttaccacaatctcaccctgcaggtgatggtcaatgcttgctgctccatctttattcatcgttaatgttaatttatgacaactcagggggaaaaacataacaagcctagtttggttacaggtacacacaagcttgaatatttctctgcactgaaatgaaagtggcatagttcatcaccacctgctacattttgtagagcatcttatcagccatagaaataggacaatctataaaactttggggagggtgggggaggaaatgacaaagtgtctgtcaaaaacaggcataatctaaaacaaggtggatgtagcaaatctctgtcactgcttgagaactttgagcttgtggcagttttgcagacttacatgacttcagcactttacgacatattttttactatgaatgttcaatacaatttaatatttataactgatttctgagggatctgctccatgtctattctgttatctgcatgaaaacaaaatgtatgccaatttcagtatgtcaataatcaaggttttaaatgtttggaagaaaatacaaacaagattgctgatctgttctgtattagtgacattctggtacttctagatttgcaataaatttatggattttttatttaaagaga

SEQ ID NO: 2435 - DNA, 2756 bp, Homo Sapiens
  NM_004697
gaaagggagtgttcgggtttcgctggggcctcgcggctccagagcccagcatggcttcctcgcgagcctcttccacgcaggcaaccaaaactaaagcacccgacgacttagttgctccggtcgtgaagaaaccacacatctattatggaagtttggaagagaaggagagggagcgtctggccaaaggagagtctgggattttggggaaagacggacttaaagcagggatcgaagctggaaatattaatataacctctggagaagtgtttgaaattgaagagcatatcagcgagcgacaggcagaagtattggctgagtttgagagaaggaagcgagcccggcagatcaatgtttccacagatgactcagaggtcaaagcttgccttagagccttgggggaacccatcacactttttggagagggtcctgctgaaagaagagaaaggttaagaaatatcctctcagttgtcggtactgatgccttgaaaaagaccaaaaaggatgatgagaagtctaaaaagtccaaagaagagtatcagcaaacctggtatcatgaaggaccaaatagcttgaaggtggcaagactatggattgctaattattcgttgcccagggcaatgaaacgcttggaagaggcccgactccataaggagattcctgagacaacaaggacctcccagatgcaagagctgcacaagtctctccggtctttgaataatttttgcagtcagattggggatgatcggcctatctcctactgtcactttagtcccaattccaagatgctggccacagcttgttggagtgggctttgcaagctctggtctgttcctgattgcaacctccttcacactcttcgagggcataacacaaatgtaggagcaattgtattccatcccaaatccactgtctccttggacccaaaagatgtcaacctggcctcttgtgcggctgatggctctgtgaagctttggagtctcgacagtgatgaaccagtggcagatattgaaggccatacagtgcgtgtggcgcgggtaatgtggcatccttcaggacgtttcctgggcaccacctgctatgaccgttcatggcgcttatgggatttggaggctcaagaggagatcctgcatcaggaaggccatagcatgggtgtgtatgacattgccttccatcaagatggctctttggctggcactgggggactggatgcatttggtcgagtttgggacctacgcacaggacgttgtatcatgttcttagaaggccacctgaaagaaatctatggaataaatttctcccccaatggctatcacattgcaaccggcagtggtgacaacacctgcaaagtgtgggacctccgacagcggcgttgcgtctacaccatccctgctcatcagaacttagtgactggtgtcaagtttgagcctatccatgggaacttcttgcttactggtgcctatgataacacagccaagatctggacgcacccaggctggtccccgctgaagactctggctggccacgaaggcaaagtgatgggcctagatatttcttccgatgggcagctcatagccacttgctcatatgacaggaccttcaagctgtggatggctgaatagatgacaatgggaaaaggacttgaacctcaagctctctctaaggagctgttttcctcaaacgagaagaattgaagtgtttagttctatcatgttttctgccaattaccatgcatagaccctcagtagaattggatttccatgtcagcccccactccaggaaggcagcccaatccctaggtgatggggaacccctctcacggttgaaaatttattacctttttacgccctgccacgaactgtgtagacattgtttttattaatcttttgtttggccgggcgtggtggctcacgcctgtaatcctagcactttgggaggccgaggtgggtagatcgcttgagctcaggagttcaagacgagcctgggcaacatggcaaatgccgtctctgcaaaaaaatactaaaattagctggtcgcggtggcttctgcctgtgattccggctacttgggaggctgaggtgggagggattgcttaagcctgggaggcagaggttgcagtgagccgagattgcgccattgcactctagcctgtgtgacagagcaagaccctgtctcaaaaaaaaaaaaaatttgttcgaatgccttatagccttcctcacagcacccaggattgtgactgactctgcatttttaattcttgaaacttggctttccataacatggtacatgcttcaggactacatatgacccagagagcaaggtggctgaactatagtctggaagccctcaggtaaagaggcacatctcaccactcattggttaaacaatgcatcatagcgagcacttttcctttccctggagaatgggatgtgaagcagtagaccgcagccacgccgatggttatacagtgaagaagacttcacctcttcctattgagtttgcttggaatgctgacagcatcaggcaactctgaactgaacatttgctttgtcagaaaatatctttttttttactttgaagtttggcaaccttcatgttaccccaaagcaaaaccattgtgtcaggagtcaaacaaatgtttagaaagcaaacatgacgtctctattgtacaacctcctttctcttggctgtttaaaggatgtacttcgtgtattaaagggtactttatgttgaagtaaaaaaaaaaaaaaaaaaaaaaa

SEQ ID NO: 2436 - DNA, 2480 bp, Homo Sapiens
  NM_004698
gacagcggcgtggcggcggcggtggcggtagcgacggcacgccgtagggcggtcagaaggtttccggttccggtgtaacgttcgggctccgtctcaggggctgaagtttgtgaggtgtagtattgagtcctgtttgagctattgttctctttttcctgaaaaatggcactgtcaaagagggagctggatgagctgaaaccatggatagagaagacagtgaagagggtcctgggtttctcagagcctacggtggtcacagcagcattgaactgtgtggggaagggcatggacaagaagaaggcagccgatcatctgaaaccttttcttgatgattctactctccgatttgtggacaaactgtttgaggctgtggaggaaggccgaagctctaggcattccaagtctagcagtgacaggagcagaaaacgagagctaaaggaggtgtttggtgatgactctgagatctctaaagaatcatcaggagtaaagaagcgacgaataccccgttttgaggaggtggaagaagagccagaggtgatccctgggcctccatcagagagccctggcatgctgactaagctccagatcaaacagatgatggaggcagcaacacgacaaatcgaggagaggaaaaaacagctgagcttcattagcccccctacacctcagccaaagactccttcttcctcccaaccagaacgacttcctattggcaacactattcagccctcccaggctgccactttcatgaatgatgccattgagaaggcaaggaaagcagctgaactgcaagctcgaatccaagcccagctggcactgaagccaggactcatcggcaatgccaacatggtgggcctggctaatctccatgccatgggcattgctcccccgaaggtggagttaaaagaccaaacgaaacctacaccactgatcctggatgagcaagggcgcactgtagatgcaacaggcaaggagattgagctgacacaccgcatgcctactctgaaagccaatattcgtgctgtgaagagggaacaattcaagcaacaactaaaggaaaagccatcagaagacatggaatccaataccttttttgacccccgagtctccattgccccttcccagcgccagagacgcacttttaaattccatgacaagggcaaatttgagaagattgctcagcgattacggacaaaggctcaactggagaagctacaggcagagatttcacaagcagctcgaaaaacaggcatccatacttcgactaggcttgccctcattgctcctaagaaggagctaaaggaaggagatattcctgaaattgagtggtgggactcttacataatccccaatggctttgatcttacagaggaaaatcccaagagagaagattattttggaatcacaaatcttgttgaacatccagcccagctcaatcctccagttgacaatgacacaccagttactctgggagtatatcttaccaagaaggaacagaaaaaacttcggagacaaacaaggagggaagcacagaaggaactacaagaaaaagtcaggctgggcctgatgcctcctccagaacccaaagtgagaatttctaatttgatgcgagtattaggaacagaagctgttcaagaccccacgaaggtagaagcccacgtcagagctcagatggcaaaaagacagaaagcgcatgaagaggccaacgctgcccgaaaactcacagcagaacagagaaaggtcaagaaaattaaaaagcttaaagaagacatttcacagggggtacacatatctgtatatagagttcgaaatttgagcaacccagccaagaagttcaagattgaagccaatgctgggcaactgtacctgacaggggtggtggtactgcacaaggatgtcaacgtggtagtagtggaagggggccccaaggcccagaagaaatttaagcgtcttatgctgcatcggataaagtgggatgaacagacatctaacacaaagggagatgatgatgaggagtctgatgaggaagctgtgaagaaaaccaacaaatgtgtactagtctgggagggtacagccaaagaccggagctttggagagatgaagtttaaacagtgtcctacagagaacatggctcgtgagcatttcaaaaagcatggggctgaacactactgggaccttgcgctgagtgaatctgtgttagagtccactgattgagactactgcaagcccttgcctctcctcccttgcctttgtctcttcagtcctctcacttattctatttcccaaccccctcccacttgtttgtgtgatctcagaactgtgccaagcagacactgggacaaagggagaatatcttgctcccctcctgagtcagcctggtgttgccctttattccccttatgtgcatatgattaaagagttatttttaaacttggtgtgatatttttcacacattcgtaagtaaaaaaaaaaaaaaaaaa

SEQ ID NO: 2437 - DNA, 1530 bp, Homo Sapiens
  NM_004701
aatcctggaacaaggctacagcgtcgaagatccccagcgctgcgggctcggagagcagtcctaacggcgcctcgtacgctagtgtcctcccttttcagtccgcgtccctccctgggccgggctggcactcttgccttccccgtccctcatggcgctgctccgacgcccgacggtgtccagtgatttggagaatattgacacaggagttaattctaaagttaagagtcatgtgactattaggcgaactgttttagaagaaattggaaatagagttacaaccagagcagcacaagtagctaagaaagctcagaacaccaaagttccagttcaacccaccaaaacaacaaatgtcaacaaacaactgaaacctactgcttctgtcaaaccagtacagatggaaaagttggctccaaagggtccttctcccacacctgaggatgtctccatgaaggaagagaatctctgccaagctttttctgatgccttgctctgcaaaatcgaggacattgataacgaagattgggagaaccctcagctctgcagtgactacgttaaggatatctatcagtatctcaggcagctggaggttttgcagtccataaacccacatttcttagatggaagagatataaatggacgcatgcgtgccatcctagtggattggctggtacaagtccactccaagtttaggcttctgcaggagactctgtacatgtgcgttggcattatggatcgatttttacaggttcagccagtttcccggaagaagcttcaattagttgggattactgctctgctcttggcttccaagtatgaggagatgttttctccaaatattgaagactttgtttacatcacagacaatgcttataccagttcccaaatccgagaaatggaaactctaattttgaaagaattgaaatttgagttgggtcgacccttgccactacacttcttaaggcgagcatcaaaagccggggaggttgatgttgaacagcacactttagccaagtatttgatggagctgactctcatcgactatgatatggtgcattatcatccttctaaggtagcagcagctgcttcctgcttgtctcagaaggttctaggacaaggaaaatggaacttaaagcagcagtattacacaggatacacagagaatgaagtattggaagtcatgcagcacatggccaagaatgtggtgaaagtaaatgaaaacttaactaaattcatcgccatcaagaataagtatgcaagcagcaaactcctgaagatcagcatgatccctcagctgaactcaaaagccgtcaaagaccttgcctccccactgataggaaggtcctaggctgccgtgggccctggggatgtgtgcttcattgtgccctttttcttattggtttagaactcttgattttgtacatagtcctctggtctatctcatgaaacctcttctcagaccagttttctaaacatatattgaggaaaaataaagcgattggtttttcttaaggtaaaaaaaaaaaaaaaaaa

SEQ ID NO: 2438 - DNA, 1588 bp, Homo Sapiens
  NM_004704
gtgagttatgcggccgctgctacacgcctggtgggcagcatgtcggcaacagcggctgctcgtaagcggggaaagccggcctctggggccggggctggcgcgggggccggcaagcggcggcgaaaggccgactctgcgggggacaggggcaaatccaagggtggcggcaagatgaatgaggagatctccagcgactctgagagcgagagcctagctccaaggaagcctgaggaggaggaggaggaggagctggaggaaactgcacaggaaaagaagctgcgcttggccaagctctacctagagcagctccgtcagcaagaggaggagaaggctgaggcccgtgcatttgaggaggaccaggtggcggggcgcctgaaggaggatgtgcttgagcagaggggcaggctgcagaagttggtggcaaaagagatccaggccccagcctcagctgacattcgcgttttacgggggcaccagctctctatcacatgtttggtcgtcacccccgatgactcagccatcttctctgctgccaaagactgcagcatcattaagtggagcgtggagagtggacggaagctgcatgtgattcctcgagccaagaagggtgccgagggaaagccccctggccacagcagccacgtcctctgcatggccatctcctccgacggcaagtaccttgcctctggtgaccgcagcaagctcattctcatttgggaggcccagagctgccagcacttgtacaccttcacaggacaccgggatgcagtgtcgggtctggcattccgcagaggcacccaccagctctacagcacatcccacgatcgctccgtgaaggtgtggaatgtggcagagaactcctacgtggagacgctcttcggacaccaggacgctgtggctgcactggatgccttgagccgggagtgctgtgtgacggctgggggccgggatgggactgtacgtgtgtggaagatccccgaggagtcccagcttgtcttctatggccaccagggctccatcgactgcatccacctaatcaatgaggagcacatggtgtccggcgcggacgatggctctgtggccttgtggggtctctccaagaagcgaccacttgccctgcagcgtgaagctcacgggctgcggggagagccaggcctggagcagcccttctggatatcgtcggtggcagccctcctcaacacagaccttgtggccacaggctcccacagctcctgtgtgcggctttggcagtgtggggaaggcttccggcagcttgaccttctctgtgacatccccctggtgggttttatcaacagcctcaagttctccagctctggggacttcctggtggctggggtagggcaggagcacaggcttggccgatggtggagaatcaaagaggctcggaattctgtctgcatcatcccactccgcagggtccctgtacccccagctgctggttcctgacactcttatcctccttatttaagtccttcccaggctatgccccaccctctttgtattaaaagcctcctcttttgggaaaaaaaaaaaaaaaaaaaaaaaaaaaaaaaaaaaaaaaaaaaaa

SEQ ID NO: 2439 - DNA, 3202 bp, Homo Sapiens
  NM_004705
atgccgaacttctgcgctgcccccaactgcacgcggaagagcacgcagtccgacttggccttcttcaggttcccgcgggaccctgccagatgccagaagtgggtggagaactgtaggagagcagacttagaagataaaacacctgatcagctaaataaacattatcgattatgtgccaaacattttgagacctctatgatctgtagaactagtccttataggacagttcttcgagataatgcaataccaacaatatttgatcttaccagtcatttgaacaacccacatagtagacacagaaaacgaataaaagaactgagtgaagatgaaatcaggacactgaaacagaaaaaaattgatgaaacttctgagcaggaacaaaaacataaagaaaccaacaatagcaatgctcagaaccccagcgaagaagagggtgaagggcaagatgaggacattttacctctaacccttgaagagaaggaaaacaaagaatacctaaaatctctatttgaaatcttgattctgatgggaaagcaaaacatacctctggatggacatgaggctgatgaaatcccagaaggtctctttactccagataactttcaggcactgctggagtgtcggataaattctggtgaagaggttctgagaaagcggtttgagacaacagcagttaacacgttgttttgttcaaaaacacagcagaggcagatgctagagatctgtgagagctgtattcgagaagaaactctcagggaagtgagagactcacacttcttttccattatcactgacgatgtagtggacatagcaggggaagagcacctacctgtgttggtgaggtttgttgatgaatctcataacctaagagaggaatttataggcttcctgccttatgaagccgatgcagaaattttggctgtgaaatttcacactatgataactgagaagtggggattaaatatggagtattgtcgtggccaggcttacattgtctctagtggattttcttccaaaatgaaagttgttgcttctagacttttagagaaatatccccaagctatctacacactctgctcttcctgtgccttaaatatgtggttggcaaaatcagtacctgttatgggagtatctgttgcattaggaacaattgaggaagtttgttcttttttccatcgatcaccacaactgcttttagaacttgacaacgtaatttctgttctttttcagaacagtaaagaaaggggtaaagaactgaaggaaatctgccattctcagtggacaggcaggcatgatgcttttgaaattttagtggaactcctgcaagcacttgttttatgtttagatggtataaatagtgacacaaatattagatggaataactatatagctggccgagcatttgtactctgcagtgcagtgtcagattttgatttcattgttactattgttgttcttaaaaatgtcctatcttttacaagagcctttgggaaaaacctccaggggcaaacctctgatgtcttctttgcggccggtagcttgactgcagtactgcattcactcaacgaagtgatggaaaatattgaagtttatcatgaattttggtttgaggaagccacaaatttggcaaccaaacttgatattcaaatgaaactccctgggaaattccgcagagctcaccagggtaacttggaatctcagctaacctctgagagttactataaagaaaccctaagtgtcccaacagtggagcacattattcaggaacttaaagatatattctcagaacagcacctcaaagctcttaaatgcttatctctggtaccctcagtcatgggacaactcaaattcaatacgtcggaggaacaccatgctgacatgtatagaagtgacttacccaatcctgacacgctgtcagctgagcttcattgttggagaatcaaatggaaacacagggggaaagatatagagcttccgtccaccatctatgaagccctccacctgcctgacatcaagttttttcctaatgtgtatgcattgctgaaggtcctgtgtattcttcctgtgatgaaggttgagaatgagcggtatgaaaatggacgaaagcgtcttaaagcatatttgaggaacactttgacagaccaaaggtcaagtaacttggctttgcttaacataaattttgatataaaacacgacctggatttaatggtggacacatatattaaactctatacaagtaagtcagagcttcctacagataattccgaaactgtggaaaatacctaagagacttttaaaaataggctttcttatatttgatatttggaagaaaaagccgtaaggtgtatgtagaccacttaatcactaaatatctttgcctataggactccattgaatacattagccattgataatctacctgtttaaatggcccctgtttgaactctcaagctttgaagacctacctgttcttccagaagagaacgttgaaagtgccatgtttccttttgcgtgatctctgttgatggcactctggaattgtttcagttaagtcattttagacatagcatttattatcactgtggatctctacttgttgggtgttatgaattctttgaagaaatatattttgaagaggtgtgggaggaaggaatacattttataaaatgttgtagtgaagcccacaattgacctttgactaataggagttttaagtatgttaaaaatctatactggacagttacaagaaattaccggagaaaagcttgtgagctcaccaaacaaggatttcagtgtagattttgtctttcttgaacttaaagaaacaaatgacaaagtttgaatggaaaagcctgctgttgttccacatctcgttgctgtttacattcctttgtggagcctgcatcttcctaagctttttagcaggtatatgttgaacacttctgtttcatggttgagacagaatcagaggccatggatactgacaactgatttgtctgttttttttctctgtctttttccatgactcttatatactgcctcatcttgatttataagcaaaacctggaaaacctacaaaataagtgttgtggtttatctagaaaaatatggaaaatattgctgttatttttggtgaagaaaatcaattttgtatagtttatttcaatctaaataaaatgtgaattttgttaaaaaaaaaaaa

SEQ ID NO: 2440 - DNA, 4447 bp, Homo Sapiens
  NM_004711
cgcgcacgcgcacgggccggcggcgcgcgccgagcggggggcaccgcgcgggtgcagccacgatggaagggggtgcgtacggagcgggcaaagccgggggcgccttcgacccctacaccctggtccggcagccgcacaccatcctgcgcgtcgtgtcttggctgttctccatagtggtgttcggctccatcgtgaacgagggctacctcaacagcgcctccgagggggaggagttctgcatctacaaccgcaaccccaacgcctgcagctatggcgtggccgtgggcgtgctcgccttcctcacctgcctgctgtacctggccctggacgtgtacttcccgcagatcagcagcgtcaaggaccgcaagaaagccgtcctgtccgacatcggtgtctcggccttctgggctttcctctggttcgtgggattctgctacctggccaaccagtggcaggtctccaagcccaaggacaacccactgaacgaagggacggacgcagcccgggccgccatcgccttctcctttttctccatcttcacctgggcgggccaggctgtgctggccttccagcggtaccagattggcgccgactcggccctcttctcccaggactacatggaccccagccaggactccagcatgccttacgcgccctacgtggagcccactgggccggatcccgccggtatgggcggcacctaccagcagccggccaacaccttcgacaccgagccccagggctaccagtcgcagggctactgagccacagtgaccgcctgcccccgcccctccccatctgtcccctctctccacacccagcccctgctcctgcccaggctgccctgcccagcgcctcatcagcctctgccttgtcccactgaggtccagggtagctcggggcaggggtggggcagtccagtgttggggactgtctacgtatgtgcaagtatatcccagggcatgtgccccgcaggggcctagagggtgggggccaggggtatttgcattcatacattgtgtcatcaagcattccttgagcgcctactgggcatccggcctgtgctgggcatgggtggtgacattggcagaaatggccactggaaaggggagcgatgagctgtggaggaagccctggtggtaccagaggccagaatggtgggaaagacagatccagataatgctgggaagtgtggctacaccgtggcttggtcatagggtgagtgtaaacacccacaggacactgggggctgtcaccctgctctggcagtcctgctaagagtgtcagggccgtctccattttatggttgaggaaactgaggtctagagaggtcaagattacttgcccagaatcactcaggcagctagtgatagaggtggggccaagcccaggctgcccgactgcagaccacgtgctcttccctggccacccacctcctaccatccccacgcttggggcttccctgctcagtgttactgtcattctgggaggccttggggccctcagccccttgagacaccctgattctgctgcatgccaagggcctgttctgccccagctgttcctcctcccctggggacagccccacctccgggtccctccacccacatccccctggtcctacccctggcccttggcctcctccaagagggctcaccccgggtgctgctctgtgctctgcgtgtcccacagacgcttgttccagggggctccagcaaaccccttcgtggtctctcaaaggactgatcactgtccttgcctctaggaggggtcactaagcccttacctagggctgggtggacaacaaggcacagatgagggtgtgactggcccgaggtcacggtgagtgagtggcaaagctggccctgacgcctgggtttcttggccccagctgcccagcaggtgcctcgattccctgcccttgtgacctcccaggaaacagaactgatctgggacactatgtcacctctcctctcatctggggtcagtcagggttcgggggctgcagcagccaagcgcatgagaggtgtttccttggccttccagaaggcccactgtggagccagcctccctatgggaggcagagcggcaaggacagggctttggaatcagccaggtcggctcctgggctgtggccgtggagagacactgcccccaggatgacacaggcaagagcccctgaggcatgggaggcccagggaagaccatgggctgtaggggagagtgtggcaggtgacccaaaggcccaaagagggccgtggggcctgaggaggtcataatctcttctgagtgggggcaggtcgattcttgcacaaggtgggctcttcactgagccataagggacagggaggtatgggagagcgctgggggcccatccccctgtccacccagtgtccactggcctgtccttcagggagcagagcagagcaggtggtggacgggcccagtgctgggtgttttcaccaccatccccccatcccccatctaagaatcctaagaggcaggcgatccctcacctgcttactcactcagcagttacccggcccctgtgctggagataccaagggcatgggtggtccctgcttcgatggccccaaagctgggccagagttaagggaaagaggaggaagtcctaagcagagaagtagcaccattatccccatttaacagaagggaaactgaggctcggcaagcataggcgagttggcagtggaacacggatctaaactcaggtgtgtccaagtcctcccaaaggacagcagtgatggagaggaccccagccagctgtgtgacagctggttgttgctgacttcattttccaatccggagaaggggctctgtccacagtcccccgccgccaggtggcccacatgggaccagcatgggggcaggttatctgttggcctgaagagtgaaacctgtaccaggccaaaggtgagggcgtgagtgagggcaggagtgtttatggcagagtgaagttctgtgcccaccacaagaggctgtgagatgttctgaccctcacccactgtccaccaaaagcctctcctgctgatgggcactaggagacctcagggtactgcccatctgtttctcctcgggtgccagccagctgctggtgatcctcagccggagggcagggtaccaggtaagcttaactccatcttgggtgtttgtgacaggccctgcctgccaccctaggcagggaaagctgtcaagactcctgccaggaatggggggtgctgagtcatctcacgaagaatccctcactcttcccgggttcagcccagaagcccttccaggcatgatcttccccatcaggctgggctctggcagggacctgcccaggatggagatgagagagggtgagagatggagggcgagatttggatgggacccagggctcctgactctgccctggaaggttcatggggaaactcgctccttctgttggcagaggacagcccctggggaaccccaggcccaactctgtccggtatcccttttcctcccagctgccctcccctacttctcccttgctcccaaagctttccttggagaagggccctcctgcagctggaccctgcagggtggctccctcctccccatcaagcacaagagagggcccaggaaaaaaggtttcacataagtgtagagtcgcaaggacgcttagagtcggcagagtctggggtagggagacagcgacttgtccaaggtcaagcacagagggagaggttcaggagtcaggtcttctgccttctgagttggctcatcctgggcagtcacagactgtcctgcctgcacggctcctatccacctgggggtgtcgcagttgaggggctaattcccaggggactgacgttagttccctactccatccttccctggtgattcttgatcttcaaagcctcggggatcccaggtttccccatgtaactgagacaccctgcctgttagccctgggagacccctaaccttggcccaagacccctttgattctctaaggagcacgaaagggggaatgcccctcccaggagtttatgggagaagggactgggccggctgcctcccagcgatgcacttgacctgacactccccatgtcctggtgcgcacagcccttgtcggtgccccggcccctcccgcagcgttactgcctgtgtatagtataaatatatatattttctatatataagatgtataatataaggctccacaaatatatctgtgtgtgtgtgtgcgtgtgtgtgcggtgaagggcggtccccatcctgggcccccactctagacccccccaccacctggttaagtctcgagtgaatccagtggccccgtggcaccctcctttatgacatccatccatctgtggtgaaccaagtgaaggtggtgacttctggtgacatagtaataaagtgaagactcagaacccaccagcgattgcaaaaaaaaaaa

SEQ ID NO: 2441 - DNA, 4121 bp, Homo Sapiens
  NM_004713
gaggagaagtggcgtcgagtccggccgggcagtagaggaaattgcggtagtgaccctcgggcctcgccatgaagagccgctttagcaccattgacctccgcgccgtactcgcggagctgaatgctagcttgctaggaatgagagtaaacaatgtttatgatgtggataataagacataccttattcgtcttcaaaaaccggactttaaagctacacttttacttgaatctggcatacgaattcatacaacagaatttgagtggcctaagaatatgatgccgtctagttttgccatgaagtgccgaaaacatttgaagagtcggagattagtcagtgcaaaacagcttggtgtggatagaattgtagattttcaatttggaagtgatgaagctgcttaccatttaatcattgagctctatgatagggggaacattgttcttacagattatgagtacgtaattttaaatattctaaggtttcgaactgatgaggcagatgatgttaaatttgctgttcgtgaacgctatccacttgatcatgctagagctgctgaacctttgcttactttggaaaggttgactgaaatagtagccagcgcacctaagggtgaactactgaagagggtgcttaacccattacttccctatggaccagctctcattgaacactgtcttttagaaaatggattctcgggtaatgtcaaagtggatgaaaaacttgaaactaaagatattgaaaaagtacttgtttctctgcagaaagcagaagactatatgaaaacaacatccaacttcagtgggaagggatatatcattcagaaaagagaaataaaaccatgcttggaagcagataaaccagttgaagacatactgacgtatgaggaatttcatcctttcttgttttctcaacattcacaatgtccatatatagaatttgaatcatttgacaaggcggtggatgaattttattccaagatagaaggccagaaaattgacttaaaagctttacaacaggaaaagcaagcattgaagaaattagataatgttcgaaaggatcacgaaaacagattggaagctcttcagcaggctcaggaaatagacaaactgaaaggagagctcatagaaatgaacctacaaatagttgacagagccattcaggtagttcgaagtgctttagctaaccagatagattggacagaaattgggttaattgtgaaagaagcccaggctcaaggagaccctgttgcaagtgcaatcaaagaattaaaactacaaacaaaccatgttacaatgctgctaagaaatccatacttgttatcagaggaggaagatgatgatgttgatggtgacgtcaatgttgagaaaaatgaaactgaaccaccaaaaggaaaaaagaaaaaacaaaagaataaacagctgcagaagcctcagaaaaataagcccttacttgtagatgttgatctcagcttgtcagcatatgccaatgccaaaaagtattatgatcacaagagatatgctgctaagaaaacacaaaagactgttgaagctgctgagaaggcattcaagtcagcagaaaagaaaacaaagcaaacattaaaagaagttcagactgttacctctattcaaaaagcaagaaaagtatattggtttgagaaatttctgtggttcattagctcagagaactatctaattataggtggacgagatcagcaacagaatgaaataattgtgaaaagatacttgacaccaggagacatttatgtacatgctgatcttcatggagctactagctgtgtaattaagaatccaacaggagaacccatccccccacggaccttgactgaagctggcacaatggcactttgctacagtgctgcttgggatgcacgagttatcactagtgcttggtgggtgtaccatcatcaggtatctaaaacagcaccaactggagaatatttgacaacaggaagcttcatgataagaggaaaaaagaattttcttcctccctcatatctaatgatggggtttagcttcctttttaaggtagatgagtcttgtgtttggagacatcagggtgaacgaaaagtcagagtacaggatgaagacatggagacactggcaagttgtacaagtgaactcatatcagaagaaatggaacaattagatggaggtgacacgagcagtgatgaggataaagaagaacatgaaactcctgtggaagtagaactcatgactcaggttgaccaagaggatatcactcttcagagtggcagagatgaactaaatgaggagctcattcaggaagaaagctctgaagacgaaggagaatatgaagaggttagaaaagatcaggattctgttggtgaaatgaaggatgaaggggaagagacattaaattatcctgatactaccattgacttgtctcaccttcaaccccaaaggtccatccagaaattggcttcaaaagaggaatcttctaattctagtgacagtaaatcacagagccggagacatttgtcagccaaggaaagaagggaaatgaaaaagaaaaaacttccaagtgactcaggagatttagaagcgttagagggaaaggataaagaaaaagaaagtactgtacacattgaaactcatcagaacacaagcaaaaatgttgcggctgtgcagccaatgaaacgaggacaaaagagtaaaatgaaaaaaatgaaagaaaaatacaaagaccaggatgaagaagaccgtgaacttatcatgaagttgctggggtctgcaggttcaaacaaagaagaaaaagggaagaaggggaagaaaggaaaaacaaaggacgaacctgtgaagaaacagccccagaaacctagaggtggacagagggtctctgacaacattaagaaagaaactccgttccttgaggttataactcatgagttacaagactttgctgtagatgatccacatgatgacaaggaagagcaagatctggatcaacagggaaatgaggaaaacctatttgattctttgacaggccagccacatcctgaagatgtactactgtttgccattccaatatgtgccccttacaccaccatgacaaactacaaatataaagtgaaacttactcctggagtgcagaaaaagggaaaagctgcaaaaacagccttgaatagtttcatgcattccaaagaagcaacagcaagagaaaaagacttattccgcagcgtaaaggacacagatttatcaagaaacattcctggcaaagtgaaagtgtctgcacccaatcttctgaacgtaaaaaggaaatagctgaaatgaaattctaaaatatttgagaagagccaattttatagccttttggaagttcaaagatgaaagcaccatgtatcaggatttccgcattataaaaatgaactaaacattgccttgctatattcaccaaaaggacttacttcttgttttttcccagttttatatagaggaaacactgtctatgataggatttccaaaagtatttgtggacagttaaatgctaattaatatacatctgtagttattctacattttcttgaaatttgggaggttaataccaagtattcatttcatgatgtaaagaaactgaacagtgaagtggcttgattgcttaaactattgacttggtaagtctactgtatataacatctaatatatatattacaggccaaatgaactaaacattgccttgctatattcaccaaaaggacttaattcttgtttttttcccagttttatatagaggaaacactatgataggatttcctaaagtatttgtggacagttaaatgctaattatatacatctgtagttattctacattttcttgaaatttgggaggttaataccaagtattcatttcatgatgtaaagaaactgaacagtgaagtggcttgattgcttaaactattgacttggtaagtctactgtatataacatctaatatatatatattataggccagctacaaggggtttaaatatttaggattgtgtcttgaaaactaagtattggagtggattttcttctgctttcattgatacttgtcagaaaaaaatattagaccaaaatgtaaaatataagtaataattctcatga

SEQ ID NO: 2442 - DNA, 3765 bp, Homo Sapiens
  NM_004715
ggaagtcggcgcgggctaggcgacgggtggaagccggtaccgagaggaactacagcgtcgccgcctgggttgtgtcgccgcggtaggcgctgcgctctgagcgcagcgcaggccccgtaccgaccgcccgcccgccctctgtccgcgatggaggtgccggccgcgggtcgcgttcctgccgagggcgccccgacggcggctgtggccgaggtgcgctgcccggggcccgcgccgctgcgcctgctggagtggagggtggcggcgggcgcggccgtgcgcatcggctcggtgctggccgtgttcgaggccgccgcctccgcgcagtcctccggggcctctcagtcccgtgtagcctccgggggctgcgtgcgccccgcgcggccggaacgcaggctgaggtcggagcgcgcgggcgtggtgcgggagctgtgcgcgcagccgggccaggtggtcgccccaggagcggttctggtgaggttggaaggatgcagccacccggttgtcatgaaaggcctgtgtgctgaatgtggccaagacctcacccagttgcagagtaagaacgggaagcagcaggtgccgctgtccacggcgaccgtgtccatggtgcacagcgtgccggagttgatggtgagctccgagcaagctgaacagctgggaagagaagaccagcagcgactgcaccgaaaccggaagctggtgctcatggtggacttggaccagacgttgattcacacaaccgagcagcactgtcagcagatgtcgaataaaggcatctttcacttccagctgggccggggtgagcccatgctgcacacgcgcctgcgtccacactgcaaggacttcctggagaagatcgccaagctgtacgagctgcacgtcttcaccttcggcagccggctgtacgcacacaccatcgcaggctttttagaccccgagaagaagcttttttctcaccgaatattatcaagggatgaatgtattgacccattttctaaaacgggaaaccttagaaatctctttccttgtggagactcaatggtttgcattattgatgatcgagaagatgtctggaagtttgcccccaatctgataactgtgaagaaatatgtatacttccagggcacgggtgatatgaatgcgccccctgggtcccgagaatctcagacgagaaagaaagtaaatcattctcgaggcactgaggtctcagagccatctccgcccgtgagagaccctgagggggtaacgcaggcccctggagtggagcccagcaatggcctggagaagcctgcacgggagctgaacggcagcgaggccgccaccccgcgggactcaccccgccccgggaagccagacgagagggacatctggccccctgcccaggcccccaccagcagccaagagctggcaggcgctcctgagccccagggatcctgtgcgcagggtggccgggtggcaccgggacagcggcctgcccagggtgccacgggcactgacctggactttgacttatccagcgacagcgagagcagcagtgagtccgagggcacgaagtcctcctcctccgcctctgatggcgaaagcgaggggaaaagaggccggcagaagccgaaggctgccccagagggagccggggcgctggcacagggcagttccctggagccggggcggcctgcagcaccgagtctccccggagaggccgagcctggcgcgcatgccccggacaaggagcctgagctgggtgggcaggaggagggcgagcgggatggcctctgcggcctgggcaacggctgtgccgacaggaaggaggcggagaccgagtcacagaacagcgagctgtcgggggtcactgcgggtgagtccctggaccagagcatggaggaggaggaggaggaggacacggatgaggatgaccacctcatctacctggaggagatcctggtccgtgtacacactgactactatgccaagtatgaccgctacctcaacaaggagatcgaggaggcgccggacatccgcaagatcgtgccggagctcaagagcaaggtgctggcagacgtggccataattttcagtgggctacacccgacaaacttcccgatagagaagacgcgggagcattaccacgccacggcgctgggagcgaagatcctcactcggctggtgctgagccccgacgcccctgacagggccacgcacctgatcgccgcgcgagctggcacagagaaggtgctgcaggcacaggagtgcggacacctgcacgtggtcaaccctgactggctgtggagctgcctggagcgctgggacaaggtggaggagcagctcttcccgctcagggacgatcacaccaaggcacagagggagaacagccctgcggcctttcccgaccgggagggtgtgccccccaccgccttgttccacccgatgccggttcttcccaaggcccagcctggccccgaggttcggatctacgactccaacacggggaagctcatcaggacgggcgcccgggggcccccagcaccctccagctccctacccatccgccaggagccctcttccttcagagcggttccgccaccccagccgcagatgtttggtgaagagctgcctgacgctcaggacggagagcagcctggcccttctagaagaaagcgacagcccagtatgtctgagacaatgccgctgtacactctttgtaaggaggatttagagagtatggacaaagaggtggacgacatccttggagaaggcagcgacgacagcgacagcgagaagaggaggcctgaggagcaggaggaggagccccagccccggaagccagggacccgcagggagcggacgctcggggcacctgcgtccagcgagaggagcgcggcagggggccgggggcccagaggccacaagaggaagctgaatgaagaggacgccgccagcgagtccagcagggagtccagcaacgaggatgagggcagcagctccgaggccgacgagatggccaaggcgctggaggcggagctcaacgacctcatgtgagcgcgggcagcgggcagggactgaagcctgaccgacctccagcagcactcggacgtccccggaccagccctcagtctcggtccacgctgctttcttcccaaaggacatgtatatttgcagagctccacatacagaaacacattattttgcagaaataggtgtttttaagaagttttactacaggaatgtctacttttgtaagtgacaggtgttaaaggcccaggtgtgctgtgccaaagagctcagcagaggctcacgtggcccaggctggtgcgcccgctgtctcggtaaggggcgggttggtgtgttttccccttgtgtaccagagcacattccttaggggacggctttgggggtcccacgagacatggactaggagtttaagcaggacagtgtgcgtgcacgagctccgagcccagcacagacatgcctggaacccccgccgcctgctgctccctcctagggaacccatttccggggaacgccgtgactgtcgggcagcctggagcttcctgcagcctcctacgcagggtccacgccacgtggcctgggctgccatcctgccgtcctcccactggcatcctggcaagggggcgttgcttttcctgggcggccttttatgtcttggagacacctgatgtaaagtttctgtaaatctatttcatatctgacccaccaaacagatttctctttaataaaaatcctttttgtaagttctctaaaaaaaaaaaa

SEQ ID NO: 2443 - DNA, 3497 bp, Homo Sapiens
  NM_004716
cactgctcctccggctcccgggaagccgcgagtttccgcagggaggcggcggcagctgcggcggggccggtctgtagcctttgctgagtcaacactactcacagtgaaagtgatgccttttctccatttgcacaacatgagtgtgacgtggttagccagaccaggagctcaacctcatgtagaatccagtccactgctctgatgccgaaggggaggcagaaagtgccacacttggatgcccccctgggcctgcccacctgcctctggctggaattagccgggctcttcttactggttccctgggtcatgggcctggcagggacaggtgggcctgatggccagggcacaggggggccgagctgggctgtgcacctggaaagcctggaaggtgacggggaggaagagactctggagcagcaggcggatgccttggcccaggcagcagggctggtgaatgctggacgcatcggagagcttcaggggcactacctctttgtccagcctgctgggcacaggccggccctggaggtggaggccatccggcagcaggtggaggctgtgttggctgggcatgaagctgtgcgctggcactcagagcagaggctgctaaggcgggccaagcgcagcgtccacttcaacgaccccaagtacccgcagcaatggcacctgaataaccgacggagcccgggcagggacatcaacgtgacgggtgtgtgggaacgcaatgtgactgggcgaggggtgacggtggtggtagtggatgacggagtggaacacaccatccaggacattgcacccaactatagccctgagggtagctatgacctcaactctaatgaccctgaccccatgccccacccggatgtggagaatggcaaccaccatggcacgcgatgtgcaggagagatcgcggctgtgcccaacaacagcttctgtgccgtgggcgtggcctacgggagccgcatcgcaggtatccgggtactggatggacctctcacagacagcatggaggcagtggcgttcaacaagcactatcagatcaatgacatctacagctgcagctggggaccagatgacgatgggaagacagtggatggcccccatcagcttggaaaggctgccttacaacatggggtgattgctggtcgccagggctttgggagcatctttgtggtagccagtggcaacggaggccaacacaacgacaactgcaactacgatggctacgccaactccatctacaccgtcaccataggagctgtggatgaggagggacgcatgcctttctatgcagaagaatgtgcctccatgctggcagtcaccttcagtggtggggacaagatgcttcggagcattgtgaccactgactgggaccttcagaagggcactggctgcactgagggccacacagggacctcagctgcagcgcctctggcagctggcatgatagccttaatgctgcaggtgcggccctgcctcacgtggcgtgacgtccagcacatcattgtcttcacagccacccggtatgaggatcgccgtgcagagtgggtcaccaacgaggcaggcttcagccatagccaccagcacggtttcggcctcctcaacgcctggaggctcgtgaatgcagccaagatctggacatctgtcccttacttagcatcctacgtcagtcccgtgttaaaagaaaacaaggcgattccgcagtccccccgttccctggaggtcctgtggaatgtcagcaggatggacctggagatgtcagggctgaagaccctggagcatgtggcagtgacagtctccatcactcacccacggcgcggcagcttggagctgaagctgttctgccccagtggcatgatgtccctcatcggcgccccccgcagcatggactcggatcccaacggcttcaatgactggaccttctccactgtgcgatgctggggggagagagcccgagggacctacaggcttgtcatcagggatgtcggggatgagtcattccaggtcggcatcctccggcaatggcagctgaccctatatggctctgtgtggagtgcagtagacatcagggacagacaaaggctgttagagagtgccatgagtggaaaatacctgcacgatgacttcgccctgccctgcccaccggggctgaaaattcctgaggaagatggttacaccatcacccccaacaccctcaagaccctggtgctggtaggctgtttcaccgtcttctggactgtttactacatgctggaagtatatttgagccagaggaatgtggcttccaatcaagtttgtaggagtggaccctgccactggccccatcggagccggaaagccaaggaggaagggacagagctagaatcagtgccactttgcagcagcaaggatccagacgaagtggaaacagagagcaggggccctcccaccacctctgacctccttgccccagacctgctggagcaaggggactggagcctgtcccagaacaagagcgccctggactgccctcatcagcacctagacgtaccgcacgggaaggaggagcagatctgctgacctcagggcctgacagtgtgggacaggctcttctttcccaaaattagggagctcttgacagaaagcagttctgatgcttacatctggaatctgaggcatcctctgactccactcaaagagggtgagggccttcttaagatacaaatggtggaggattgctgccagagaagtctggtcagagccacagggtctgcctccagccaaacgggagcttttggtgagaaggtgttggacaggggattggcgcccccctttggtttggcctccatcctcatctctcttgggccaagccagctgcctaggtcccccaagcatgggggaccccttcccacatataagttgagaaggtgcctgccatagccaggagcgcatctcaatggaaacatcactggggtcacttgggaagaggacttcggggtagaggctgggaggagcccctggacatgcctgtcctgaaagcggctgcctccattatccattcccaagatgcctgatcagaaaccaaccatgaatgaacccctggctccttcaccacccccacgattggtatgatgctgccggcacagctgggatacacacggctcccccaggcctgagctgcttcactagggaatcctgcggcaggactgcagagcagatggcagatgcacatgttggaggagagagccttgggagccactgccactccagtcctgccaccaccctgtcttcctctgcaagtgctcagggaaatggccttcccgccggaggccagctatctgcctgacaggctgtgactcttctctcaaccttggccttctcccctcttctgagctagttggttgaattttttttaatgcttaagatttgtttttctcttttcacagcaacattttcttgaatttttttctgcacagcttttccaaaataaaaaccttccaaacaaaaaaaaaaaaaaa

SEQ ID NO: 2444 - DNA, 2900 bp, Homo Sapiens
  NM_004724
gagagtgacccagtcagcgttggttcccgtcttggccatggcctcgttcgtgacagaagttttggcacactccgggaggctggaaaaggaggatctggggacccggatcagccgcctgacccggcgggtggaggagatcaagggtgaggtgtgcaatatgattagcaagaagtacagtgaattcctgcctagcatgcagagcgcgcagggcctgattacccaggtggataagctatctgaagacattgacctgctgaaatccaggatagagagtgaggtccgccgggatcttcacgtatcaaccggtgaatttacagacttaaagcagcagttggaaagagactcagttgtcctaagtttgcttaaacagttgcaggagttttccactgctattgaagaatataattgtgcattaacagagaagaagtatgtcactggtgctcagcgtctggaagaggcacagaaatgcttgaagttattaaaatccagaaaatgctttgatttaaaaatattgaaatctctcagcatggagctcacaatacagaaacagaacatactttatcaccttggagaagagtggcagaagctgattgtatggaagttcccaccatcaaaagataccagcagtttggaatcttacctacaaactgaacttcatttatacactgaacaatcgcacaaagaggagaagacccctatgccacccatcagttctgtcctcttggcattttctgttcttggagaactacacagcaagcttaaatcatttggtcagatgctgctgaagtatatccttaggccgctggcatcttgcccatcccttcatgctgtgatagaaagccagcctaacatagttattattcgttttgaatctataatgactaacttggaatatccatcaccatctgaagtttttacaaagatcagactggtactagaagtgctccagaaacagcttctagatttgccacttgacactgacctggaaaatgaaaaaacatctactgtcccattggctgagatgcttggagacatgatctgggaggacttgtctgagtgcctcatcaaaaactgtttggtttattcgattccaacaaatagcagcaaattacagcaatatgaagagatcatacagtccactgaagaatttgaaaatgccctaaaggaaatgagatttttaaaaggagatactacagatttgctgaaatacgctcgtaacatcaattctcattttgcaaacaaaaagtgccaggatgtgattgtggcagccagaaatctaatgacctcagaaattcataacactgtgaagattattcctgattctaagataaatgtgccagagttacccactcctgatgaggataacaaactggaagtacagaaagtatccaatactcagtaccacgaagtgatgaatttagagcctgaaaatacattggaccaacattccttttccttgcccacatgccgtatcagtgagtctgtgaagaaattaatggaactcgcctatcagactttactagaggcaacaaccagtagtgatcaatgtgctgttcaacttttctactcagtgaggaatatcttccatttgttccatgatgttgtaccaacatatcacaaggagaaccttcaaaaacttccccagttggctgctattcatcacaacaactgtatgtacattgctcaccacttgctgaccctcgggcatcagttcagattgcgtcttgcccccattctttgtgatggcactgctacttttgtggatcttgtacctggcttcaggagacttgggacagaatgctttttggcccaaatgcgggcacagaaaggtgaacttctggaaagattatcaagtgctaggaacttttcaaatatggacgatgaagagaattattctgcagcaagtaaagcagtccggcaggtactgcaccaactaaagagacttggaattgtgtggcaggatgtcctgccagtgaatatatattgcaaggctatggggactttactcaatacagcaatttctgaggtcattggcaaaattactgccctagaggacatatctactgaagatggtgataggttatattccttatgcaaaacagtgatggatgaaggaccccaagtatttgcacctttatctgaagaaagcaagaacaagaaatatcaagaagaggttccagtctatgtgccaaaatggatgccattcaaggaattgatgatgatgctacaagccagcttgcaagaaattggggatcggtgggcagatggaaaaggacccctggcagctgcgttctcttccagtgaagtaaaagctttaattcgtgccttgtttcagaacacagaaagaagagcagctgcccttgctaaaattaaatagctccatcttcttaagaaagctatgtcttgaatatgtggattcttcccttggcataattactcccttaaagacttctttgaatcgcccattggttttggtgaaccagtacatcttggaagtttgactttacagaagaacgtcttacctcctggcctgtacgaggctttgtttaagaactgtttattaagataaattgtcaagtaaagcacctcaattcattgactttctagccatcttcctttgattagctaacaaactgtcaggcagcattatttcatgctgcttccagagccctctgggagctatatacattgtaaatgcaggccctagctttggaacgaggaattgggagattccaggagtcagggtagagaatttctgagcaaatcggagatattttaggggtgtggaggaggggaagggaggaatgggccaccatatttggccttacaggaattaaggagacttcctgtaatatttctttccaataaatattgctttttacaaaaaaaaaaaaaaaaaa

SEQ ID NO: 2445 - DNA, 2782 bp, Homo Sapiens
  NM_004725
agcggtttccctttgagccggaacaggatgactgggttgaccgatgctgggcagctgagcggaccaatcggccccctagactgagacgttggcgtttgaaatcagccaatggcaggtctacactggagcttcctctccgcctccttcgcctagcctgcgagtgttctgagggaagcaaggaggcggcggcggccgcagcgagtggcgagtagtggaaacgttgcttctgaggggagcccaagatgaccggttctaacgagttcaagctgaaccagccacccgaggatggcatctcctccgtgaagttcagccccaacacctcccagttcctgcttgtctcctcctgggacacgtccgtgcgtctctacgatgtgccggccaactccatgcggctcaagtaccagcacaccggcgccgtcctggactgcgccttctacgatccaacgcatgcctggagtggaggactagatcatcaattgaaaatgcatgatttgaacactgatcaagaaaatcttgttgggacccatgatgcccctatcagatgtgttgaatactgtccagaagtgaatgtgatggtcactggaagttgggatcagacagttaaactgtgggatcccagaactccttgtaatgctgggaccttctctcagcctgaaaaggtatataccctctcagtgtctggagaccggctgattgtgggaacagcaggccgcagagtgttggtgtgggacttacggaacatgggttacgtgcagcagcgcagggagtccagcctgaaataccagactcgctgcatacgagcgtttccaaacaagcagggttatgtattaagctctattgaaggccgagtggcagttgagtatttggacccaagccctgaggtacagaagaagaagtatgccttcaaatgtcacagactaaaagaaaataatattgagcagatttacccagtcaatgccatttcttttcacaatatccacaatacatttgccacaggtggttctgatggctttgtaaatatttgggatccatttaacaaaaagcgactgtgccaattccatcggtaccccacgagcatcgcatcacttgccttcagtaatgatgggactacgcttgcaatagcgtcatcatatatgtatgaaatggatgacacagaacatcctgaagatggtatcttcattcgccaagtgacagatgcagaaacaaaacccaagtcaccatgtacttgacaagatttcatttacttaagtgccatgttgatgataataaaacaattcgtactccccaatggtggatttattactattaaagaaaccagggaaaatattaattttaatattataacaacctgaaaataatggaaaagaggtttttgaatttttttttttaaataaacaccttcttaagtgcatgagatggtttgatggtttgctgcattaaaggtatttgggcaaacaaaattggagggcaagtgactgcagttttgagaatcagttttgaccttgatgattttttgtttccactgtggaaataaatgtttgtaaataagtgtaataaaaatccctttgcattctttctggaccttaaatggtagaggaaaaggctcgtgagccatttgtttcttttgctggttatagttgctaattctaaagctgcttcagactgcttcatgaggaggttaatctacaattaaacaatatttcctcttggccgtccattattttctgaagcagatggttcatcatttcctgggctgttaaacaaagcgaggttaaggttagactcttgggaatcagctagttttcaatcttattagggtgcagaaggaaaactaataagaaaacctcctaatatcattttgtgactgtaaacaattatttattagcaaacaattgatcccagaagggcaaattgtttgagtcagtaatgagctgagaaaagacagagcatatctgtgtatttggaaaaataattgtaacgtaattgcagtgcatttagacaggcatctatttggacctgtttctatctctaaatgaatttttggaaacattaatgaggtttacatatttctctgacatttatatagttcttatgtccatttcagttgaccagccgctggtgattaaagttaaaaagaaaaaaattatagtgagaatgagattcatttcaatgtaatgcactaaagcagaacacgaacttagcttggcctattctaggtagttccaaatagtatttttgttgtcaaactttaaaatttatattaatttgcaaatgtatgtctctgagtaggacttggacctttcctgagatttattttatccgtgatgtattttttttaattcttttgatacagagaagggtctttttttttttaagtatttcagtgaaaacttggtgtaagtctgaacccatcttttgaaatgtattttcttcattgcaggtccacctaatcatcctgtgaaagtggtttctctatggaaagctttgtttgcttcctacaaatacatgcttattccttaagggatgtgttagagttactgtggatttctctgttttctgtcttacaagaaacttgtctatgtaccttaatactttgtttaggatgaggagtctttgtgtccctgtacagtagtctgacgtatttccccttctgtcccctagtaagcccagttgctgtatctgaacagtttgagctctttttgtaatatactctaaacctgttatttctgtgctaataaacgagatgcagaacccttgaatgttgaaaaaaaaaaaaaaaaaa

SEQ ID NO: 2446 - DNA, 7964 bp, Homo Sapiens
  NM_004726
ccgggaggaagcggccgcgcggcagctgcggggcgtgggggtggtggtggcggcggcggtggtggcggcggcggcggcggcggcagctgaggccgaggaggcggtggctgtggcggacgcagcagcaccccagctagggacagggctccgccgcgcccccttgctggccccatggaggcggcagcggcggcggcggcggcggcagcggcagcggcagcggcgggcgggggctgtggctccgggccgccgccgctgctgctgagcgagggcgagcagcagtgctactccgagctcttcgcgcgctgtgccggcgccgcgggcgggggccccgggtctgggccccccgaggccgccagagtcgcccccggcacggccactgcggccgccggccccgtggctgacctgtttcgggcatcgcagctgcccgccgagacgctgcaccagatcacagaactgtgtggtgcaaagcgggttggttattttggtccaacacagttttacattgccctgaaattaattgctgcagcacaatctggcctcccggtacggatagagagtattaaatgtgaattgcctctgcctcgctttatgatgtcaaagaatgatggtgagatacgatttgggaacccagctgagctgcatggaactaaggttcagattccatatttaactacagaaaaaaattccttcaaaagaatggacgatgaggataaacagcaggaaacacagtctcccacgatgtcacccctcgcctcccctccttcttccccgcctcattaccagagggtgcccttgagccatggctacagcaaactgcggagcagcgcagaacagatgcatccagcaccttatgaagctaggcagccccttgtccagcccgagggatcctcatcagggggcccaggaaccaagccccttcggcatcaggcttcccttatccggtccttttcagtggagagggaactacaggataacagcagttaccccgacgaaccctggaggataacagaagaacagcgcgagtactatgtcaatcagttccgatcccttcagccagacccaagctctttcatttcaggttctgtggccaagaacttcttcaccaaatcaaagctttccattccagaactctcctatatatgggagcttagtgatgctgactgtgatggagccctgaccctgcctgagttctgtgctgcgtttcatctcattgtggctcggaagaacggctacccattgcctgagggcctccctccaactctgcagccagaatacctgcaggcagcttttcctaagcccaaatgggactgtcaattatttgattcttattctgagtcactgccggcaaatcaacaacctcgtgacttgaatcggatggagaagacatctgttaaagacatggctgaccttcctgtccctaaccaggatgtaactagtgatgacaaacaagctttgaaaagtactatcaatgaagccttaccaaaggacgtgtctgaggatccagcaactcccaaggattccaacagtctcaaagcaagaccaagatccagatcttactctagcacctccatagaagaggccatgaaaaggggcgaggaccctcccaccccgccacctcggccacagaaaacccattccagagcctcctccttggatctgaataaagtcttccagcccagtgtgccagctaccaagtcaggattgttacccccaccacctgcgctccctccaagaccttgtccatcacagtctgaacaagtgtcggaggccgagttactcccacagctgagcagagccccatcccaggctgcagaaagtagtccagcaaagaaggatgtactgtattctcagccaccatcaaagcccattcgtaggaaattcagaccagaaaaccaagctacagaaaaccaagagccttccactgctgcaagtgggccagcttctgcggcaaccatgaaaccgcatccaacagtccaaaagcagtcttccaaacagaagaaggccattcaaactgctatccgcaaaaataaagaggcaaacgcagtgctggctcggctgaacagtgagctccagcagcagctcaaggaggttcatcaagaacgaattgcattggaaaaccaattggaacaacttcgtccggtcactgtgttgtgacccccccatggttcaagtgacagtgggtgaccttgtctgccaagatctttcttttgaatgttttgaacccaactacttgtcatagatgtttgactgtgtcaaaagctgtgagcagcaaaatataatccatatgaccttttctcttgcacttcacttgtatgttttactgtggtggaaaaaatacttcaactgattatcacacttgaaatgctaattatcagtggaatttgtctcctattcttaagtacttctgcaaggtattagatgctgctccttaccaaaaatcagtcttctagcaaataaaaataacttagagcattatttatttaaagaatttatgttttctataaaaccttataaccaagaaccttcaggatgcttgtaaccaagtactttcaggatgctttttgtatgtatatcacatagagtaggttggtttcctgagtaattgggattccaactagatagtcattggtgtgaccataataaaaacaaaagctaaaataaaagcatcagatttagactggcgctgtgccctctaccactatatgccaaaaattgcttctctagtgccattttgatattatatctagctataaataatacatgactatcgttttctattgaatgtcaaagacttactgggtctttacacctctgtaaagtggaggttttggcaatgagctgtttaacttggccaagctaggctgtcaacccagacaactcagtcctttcatgtaaatttttgggcaagagaagtctgctttgactgccttgcctgaccaaattaaataaatagttgccagatctctacttttatcctgcatgggataatatatctgtaaatgcatgagtttggaaaccacccatcaaatatgaaaggctgatgagactgttaggattgataaacatttgttgtttgaacccagctatccaaactggggaagaaggggaaatggttgttaccaacaatctctagtagttattttaatctttattttaacctggattgcaaatgtatggggtatgaggagataatgaaagaaaagtggtcctcatgctggatatgtgactgttttgttctctgtaaagtgtattcttgggaagtgattggtttatatcagattcagaggagcccaattaactccagtgtaggtaatgtaaaacagtaagctcaaattgcagaagccagtatcctacagaaatttaagtagctactgcttctcctgaaagcccaagttgaaaatgggaccacaggggcacagggctactgaccctcacagggcatgccagcgttaacaccactttgagagaccaatggcaagaaatgctgtctcttgtgcattttactaatttccccattcttagggtagcagggtgggggtgtatagggtctttttgaagcagttttggataggtttgcaatatgtgggattcagcctttgatttcaatagagctgagagcttttagaacaagcaggcatttatttaatgtttccttagtccattggcaagctttatcaatagcttaatggcagaggataaaggctcaaacagatgatgttttttccacagaaaaacaaattgttgaatctattccgtgcatatttaaggattttgaattgattttgaaaatcatgaaacttgaactatttttctattccctttttttcttccccatttgctgccttttttgtttttgtgggggaagggttgggagtaagtttaaactcttccgaagattatgaatgggtcagcacaaatttttaggcaactgctttttccatgttctgagatctacgggctacaacaaattttatcagcagtgttttttgtttttttgagatggagacttgctctgtcgcccaggctggagcgcagtggcgcaatctcggctcactgcaacctccacctcctgggttcaagcaattcttgtgcctcagcctcccgagtagctgggattacaggcacccaccaccacgctcagctaatttttgtatttttagtagagatgggattttgtcatgttggctaggctagtctcgaattcctgacctcaagtgatccacccgccttggcctctcgaagtgctgggattacaggcgtgagccacccgcccggctatcagcactgttctgattgcagacgtttcacagcatgtttggcttttggtaaattcaatccaggaaagactagcatgtgcactttatctcataatcttccagtacatatgctctcagttgggatagcagttcatttccattaggcagacgtataaactaaggaatgttagtctgcagtattcattttaaaaatattgacatgcttttcccctcccctccatgaagtcagtgccagagtgagccagattgggaggttggggttttgtttggttggcttggttttcattaagggaaaaaacttgcattggacaatcaaattcccctgagtttcataatctcatcaatattttaagataggcgagcacacactaataatatctatgcctaccttcttgggtggactcaactgtaaccacagtttattagttgcttagaagtggatttttaaaaaacagttaaatgtgtgtgcataacacacaagtaatgacacactactattattattacctaagtagtgctcatcctctctttctgtgttttcttaggatgtgcactttaatttaggattgtaacgcctaataatatttctgtgagcctttaatgtgatttataagatggccgaattactgaaatcaccattatacctcttccataaaacgactccaaagttagacctgcctgttggggagaattctatagacagaaggtcaatgttgtccccatccataggggttgaattaccttgctgttaagtggtcttcccccattgggatcctacagtcccacagatgaaagcacagtagtagctgacagctggcttatttggtccctcggcatctctcgtatgtggcatattgcttttgccactttcctatccagcagacatcaaagcaaaactaaaaggtagatatctggaatgaatgtatatgttgtaattgaggcagatatttgccttaattggaaggatctaactgctttacaaatattaaacaagtgcttgggcatgattgggagaggaggcagcttagctggaagctgtgcccatcttactgtcactggagaataggatgtcagagctgggcaggactggtacccatcatttgcagtttgcatgtggggaaaccaaagccctaagaaacaacagttcctggcccaaaaaatccatagaaagaggtaactagtggcagatttggggcgccaacctgattttatggattttgagttagattctctaccctctatcaatactaaaaatagattaggagggtttttttttctgtttatcatgttgaatttcattgacttaattagtctttaaatttgaaaacatgttttagggagtttagttctagaaatttctcttagattgaagtgacagaatctgaaagaaaagaatatgattgagctatttgttttcctgaacacctcaccttttatgatgcaataagttactctgagtttcttggcagagtttttgacagctgttgctttcaatggattccattcctgtattccttatgggaggttgtttttaaaatagactactgcgattgaaatgaactcaatatgtagttaagttatagttttcttcaatgtatttttagttacttgggtcacaaatgttcaatttcagcatattttagggtgagtaatcaaaaatgtgaatttgcctttgatttcctaccactgtctgagctatcataaagcattctctttagttgtgatttgattctatagtctgtttctaaatgacatttgtctgtttcttaaatgatctcacagccatggtaataatagatgtgtactcagaagatcaataaggtaatattggaattcatgtgttttttgcaattaaggcaggcatttgccaatgtcttcttttaagcagtagttggaaacatctcaattacagtgtaacaccttagagctaaaaacatttgttcaacacaaactagaatcacaccttctcactagatatcaccaagggaatgtggttttaaaaataaaaagaaaacaatataacgtatcatggcaaccagagcttcccatattattgacaagtagggatcattaggttctggtttgaacattctgaatgtgaacaaaatgaaatagtagttaagaggtgttttcccactgtgtttaaagagaacactagtaattctggtttttctttctaactgctttactgtttcaagggtattcttttaaaactctgatttcaaaggatcagttgaatttatactttagttatgggtgttttgttactttttttttttttgtatcatgactcagtatggttcaatttcctagtaagaagtggggatttgtgtttttggagtcctcagctcacatgtcttgttcctccttcagcacaagctaggggagatcctaccaacactgataggtcagtcattgatggcaatttgaatgtgggtattactctgtgagccaccctgcttcgcttgtttgtaaggagaaatgcatctggttatgtgaatttcccgagagcagcagacatggagggccagactttaaaagcaacgcaagcagattcgaagagctgttgccctcttctaaaaaaggcttttggaggctgtgttacatgcatgccctaaagcagtcagtctgttagtatgagcaagacatctgaagtacacagttgcttttaggcttgtatagttattttctacacatgccaacacacatgatgataaaggaaccttttctaggaggcattgcagggtttcaatacacaggacatgttctagttacagaagccttgctctgctgtcaacaattgggaaatgctcattttttcatgttttgtgaatactctggtcttgctgtaagctaatgtcatggctgtgggatattagagaagtgggtttatgactctgaagaccagcagacaccagactttaaaagtgcttaaattggaatttggaaactacagtaaagaaaccttcagataccagttccatcctgaagccctctgttgaacaacagggccagatcctaaagctctttcagggagctcttctctggggctggaacagttgattatgcaaccccattgtgtggagattggatcaactgagttgtgttatttttgttttaagtcaccttgtgcgagaacctcaaccgcacctatcttgggaaccgggtatacccttttctttagcactgctatcctttttgtcttcagcacaaataagatgttcaagtgagccagaagcaagaagagccattttagtcttcatagctattggctaagagagataatgagctgatggtctattttaaccttgaaagtaaaaatgtatattttttcactacaagtacattgaacagtaaaaagtgtaacagcaaagtatatatttgatgccttctgtcttttcatgataatgtgctaacaagttgtgttaatattttactcagccagagtctcattcatttgctaagcattgggaacattatgtatattgaccttaaacataggtgtcctatatttggattgtgacttgtagactcaagctaaccttactgcctctttttcacacttgttgaaaagtctgtgaagaacatagttaaagatctccaactttggaaaatatacatgatgtgaaactggggtgctatgttaaaaataaatgtatgataactaagtgtgggtaaaaaaaaaaa

SEQ ID NO: 2447 - DNA, 4153 bp, Homo Sapiens
  NM_004728
acgagagccgggtggacccagggtggggaactacctcttcctctccacgcggttgagaagaccggtcggcctgggcaacctgcgctgaagatgccgggaaaactccgtagtgacgctggtttggaatcagacaccgcaatgaaaaaaggggagacactgcgaaagcaaaccgaggagaaagagaaaaaagagaagccaaaatctgataagactgaagagatagcagaagaggaagaaactgttttccccaaagctaaacaagttaaaaagaaagcagagccttctgaagttgacatgaattctcctaaatccaaaaaggcaaaaaagaaagaggagccatctcaaaatgacatttctcctaaaaccaaaagtttgagaaagaaaaaggagcccattgaaaagaaagtggtttcttctaaaaccaaaaaagtgacaaaaaatgaggagccttctgaggaagaaatagatgctcctaagcccaagaagatgaagaaagaaaaggaaatgaatggagaaactagagagaaaagccccaaactgaagaatggatttcctcatcctgaaccggactgtaaccccagtgaagctgccagtgaagaaagtaacagtgagatagagcaggaaatacctgtggaacaaaaagaaggcgctttctctaattttcccatatctgaagaaactattaaacttctcaaaggccgaggagtgaccttcctatttcctatacaagcaaagacattccatcatgtttacagcgggaaggacttaattgcacaggcacggacaggaactgggaagacattctcctttgccatccctttgattgagaaacttcatggggaactgcaagacaggaagagaggccgtgcccctcaggtactggttcttgcacctacaagagagttggcaaatcaagtaagcaaagacttcagtgacatcacaaaaaagctgtcagtggcttgtttttatggtggaactccctatggaggtcaatttgaacgcatgaggaatgggattgatatcctggttggaacaccaggtcgtatcaaagaccacatacagaatggcaaactagatctcaccaaacttaagcatgttgtcctggatgaagtggaccagatgttggatatgggatttgctgatcaagtggaagagattttaagtgtggcatacaagaaagattctgaagacaatccccaaacattgcttttttctgcaacttgccctcattgggtatttaatgttgccaagaaatacatgaaatctacatatgaacaggtggacctgattggtaaaaagactcagaaaacggcaataactgtggagcatctggctattaagtgccactggactcagagggcagcagttattggggatgtcatccgagtatatagtggtcatcaaggacgcactatcatcttttgtgaaaccaagaaagaagcccaggagctgtcccagaattcagctataaagcaggatgctcagtccttgcatggagacattccacagaagcaaagggaaatcaccctgaaaggttttagaaatggtagttttggagttttggtggcaaccaatgttgctgcacgtgggttagacatccctgaggttgatttggttatacaaagctctccaccaaaggatgtagagtcctacattcatcgatccgggcggacaggcagagctggaaggacgggggtgtgcatctgcttttatcagcacaaggaagaatatcagttagtacaagtggagcaaaaagcgggaattaagttcaaacgaataggtgttccttctgcaacagaaataataaaagcttccagcaaagatgccatcaggcttttggattccgtgcctcccactgccattagtcacttcaaacaatcagctgagaagctgatagaggagaagggagctgtggaagctctggcagcagcactggcccatatttcaggtgccacgtccgtagaccagcgctccttgatcaactcaaatgtgggttttgtgaccatgatcttgcagtgctcaattgaaatgccaaatattagttatgcttggaaagaacttaaagagcagctgggcgaggagattgattccaaagtgaagggaatggtttttctcaaaggaaagctgggtgtttgctttgatgtacctaccgcatcagtaacagaaatacaggagaaatggcatgattcacgacgctggcagctctctgtggccacagagcaaccagaactggaaggaccacgggaaggatatggaggcttcaggggacagcgggaaggcagtcgaggcttcaggggacagcgggacggaaacagaagattcagaggacagcgggaaggcagtagaggcccgagaggacagcgatcaggaggtggcaacaaaagtaacagatcccaaaacaaaggccagaagcggagtttcagtaaagcatttggtcaataattagaaatagaagatttatatagcaaaaagagaatgatgtttggcaatatagaactgaacattatttttcatgcaaagttaaaagcacattgtgcctccttttgaccacttgccaagtccctgtctctttcagacacagacaagcttcatttaaattatttcatctgatcattatcatttataactttattgttacttcttcatcagtttttccttttgaaaggtgtatgaattcattacatttttattctaatgtattatctgtagattagaagataaaatcaagcatgtatctgcctatactttgtgagttcacctgtctttatactcaaaagtgtcccttaatagtgtccttccctgaaataaatacctaagggagtgtaacagtctctggaggaccactttgagcctttggaagttaaggtttcctcagccacctgccgaacagtttctcatgtggtcctattatttgtctactgagacttaatactgagcaatgttttgaaacaagatttcaaactaatctgggttgtaatacagtttataccagtgtatgctctagacttggaagatgtagtatgtttgatgtggattacctatacttatgttcgttttgatacatttttagcttctcattataaggtgattcatgctttagtgaattcttcatagatagtatatataaaagtacattttaatagaaagccagggttttaaggaatttcacatgtataaggtggctccatagctttatttgtaagtaggctggataaatggtgcttaaatggtaatgtactccacttcttcctattggaagattaacattatttaccaagaaggacttaagggagtagggggcgcagattagcattgctcaagagtatgtaaaaaaaaaaaaaaaaaaaaagaaccaaaccactggaaataatcaaatgcaaaaaggtaacaaattcataactggaaagcaaagagaagaacaagtatgatttggatgataaagcattgttttaatggtgaaaacttcacagatcactaatgtttctagaggttaacttcaagtgggcaagctggggtttttaggtagtcagtggcctagttcctaaagccacagtataggatctgttaaactgaatgtctgttgaaagtttgttttagctgcttggaggcttccttttaagacaaactgtatgtgattaagttgttttgagggaactgaagaacctgatgtagcccctggccagataactgcctgatttctcagatattatttctctgggaaacattctacatagcacaggagcttaagagtggcattatcttctcgccttaatttccagagattatttctgtactgagaatcctggaactactatgctaggaaatttaaagctgcatggtctgtcttgttttcatttaattattgtgaatacctagaatctttcttggtcctgatttctcttgcttaatccagtctttatctctaactgccccttatttgatcaccatgtactaggagctctgatagccagctcagctcctaatccttgaggcaacattctttttctatttgaacttcagttctgtccttgaatcccgactagatatttcttgccctctggtctcagaattctcttggcttttattccttgatccacttgccagttttatcactttacccttgttcctcatggcttcccatcaagccatgggt

SEQ ID NO: 2448 - DNA, 3713 bp, Homo Sapiens
  NM_004730
aagtgatgtcacaggccccatgtgagcggattgcaacacatgcagctgcctggagagagggagccggtgtcctacgtcagagccgccgccgccgcggagccgccgccggggaggagcagccgctgccgcccaggactgggcccttagggaggaggaggcgagaagatggcggacgaccccagtgctgccgacaggaacgtggagatctggaagatcaagaagctcattaagagcttggaggcggcccgcggcaatggcaccagcatgatatcattgatcattcctcccaaagaccagatttcacgagtggcaaaaatgttagcggatgagtttggaactgcatctaacattaagtcacgagtaaaccgcctttcagtcctgggagccattacatctgtacaacaaagactcaaactttataacaaagtacctccaaatggtctggttgtatactgtggaacaattgtaacagaagaaggaaaggaaaagaaagtcaacattgactttgaacctttcaaaccaattaatacgtcattgtatttgtgtgacaacaaattccatacagaggctcttacagcactactttcagatgatagcaagtttggattcattgtaatagatggtagtggtgcactttttggcacactccaaggaaacacaagagaagtcctgcacaaattcactgtggatctcccaaagaaacacggtagaggaggtcagtcagccttgcgttttgcccgtttaagaatggaaaagcgacataactatgttcggaaagtagcagagactgctgtgcagctgtttatttctggggacaaagtgaatgtggctggtctagttttagctggatccgctgactttaaaactgaactaagtcaatctgatatgtttgatcagaggttacaatcaaaagttttaaaattagttgatatatcctatggtggtgaaaatggattcaaccaagctattgagttatctactgaagtcctctccaacgtgaaattcattcaagagaagaaattaataggacgatactttgatgaaatcagccaggacacgggcaagtactgttttggcgttgaagatacactaaaggctttggaaatgggagctgtagaaattctaatagtctatgaaaatctggatataatgagatatgttcttcattgccaaggcacagaagaggagaaaattctctatctaactccagagcaagaaaaggataaatctcatttcacagacaaagagaccggacaggaacatgagcttatcgagagcatgcccctgttggaatggtttgctaacaactataaaaaatttggagctacgttggaaattgtcacagataaatcacaagaagggtctcagtttgtgaaaggatttggtggaattggaggtatcttgcggtaccgagtagatttccagggaatggaataccaaggaggagacgatgaattttttgaccttgatgactactaggtagtcgacatgggtccggcaaaacgtgcctcaccctccagcatccaacccaaggagcatacccatggtggaatccaaacagatccctgccttacaattggaacatttccagaacttaatccatgagcattggatattgaaaagaaaaccgaaacaaaaccagacccagccctacactttggtttgtcatggtgtcagcgcagcagcctacaactaagttcctaaacgccactttggactaatttaaaaaagaatcccagtttttacttttactggatggtgaaattggttgctcttgtattttatgaaaaaaaatgatttttttaaccttcatacatagaagcaaaaatactttaactgctgtaaaccttcaaaagttaatagaagtgagatcatactggtttgtttcttattttgattggagaaaaattaaattgctgcatttcgcagtgacccatttacatggcattctcagcttagactgcgtaagaagaaatatatgtggtgaaatgttggaaccatttctctcttggtctctgtttaatgttgaaagggtgagctaataggaggcactttcaacttcactccctcacgctaccccgtccccctccagactggcagtttcaaggatgcaaattgcattgcaaaatcaaactgactcatgaagcatttgggccagtgcactgtttacttccatctgtttgcagacacatttgtgcccggcgtttgggagccctttgtatcaatgttctgacaagggtccctataaccttaacctactcgaaaccggtttgggatggatatgatggggcttctgtgctattgctgggattgggagaaataaaacatgcaatttaagtggaagcgaagaaatttaaagaggattttattttgcttgggtcaatccttgttaaaagggaggtggatgtgttttccttgtgttggatggcatgagattatgtgaatgttttgatttattaaaatgaactgcaaggtttttcacaggaacgacagacatgtatgactgcatgtaattataaactcctgacctcctggtggggttggagcatctgtttcaaatgtgggacttacaagcacttctcacatgagaaattaggggcgggtgggaagggatgggacacagcttctggcaccatggatttaagaccatgttggatccaaaagttggcctgaaaccctgaagcttatgcttcacagctgggctgtaagtcagacttgaacccagctgatatgcaaggtcatggcgtgcccagggtggtgacagttgaacaaagtgtatagtacgtgcccagtggtagcgatggaaaaaagtataccaaatggactttgaaggaccaaaggttttaaaagtcaattggtatcacctccacactgactagggtagtggggtgcatttggttttcaaattgggtacttttaacactttagtgcctgactgctgttctttactgacttgattcagtcactcgtagctttattggtctgaaccagctccttgttcccaggttacagacctgcctatcgttccaataatcctgtttcacttgaatgaagggagtatgtcttaaatgtaaagtttctggttctcacactgtactctgaggtccaaatactgtctgtcaatgtgtaacctgatgtctcaaccccctgtgagaagagtccattatttggtgttcaccaacgtgggagacttcaccggaacaggcttttttgctttgggctctgctatttgtttgcagaacacccaagagcgagcaaacatgctctcttcacagcagtaccttagggttttgccattgtaaatgggtctgatgtgatatgacaagaccagagaaattggatgtaaatttacatttttgaatatgcttgttgtttcacatgatacatttagggtatgcagctccttttgtagtttttatttttactatttaagtttggaaatgatgccaaatttttgtatttctttaatcaatgtgttctcttcggtgatatatattgcattatatattgatgtgtgtatcaatatatattgatatgtattacacttacacatacaaacacatataagagggggtgaaaaccgtagcctttgcattctctatagcctctgcagagagatactaagcagcaaaatcttggtgttgtgatgtacagaaatggagaagagtattaaaccatatttaagaataaaaaaaaaaaaaaaaaaaaaaaaa

SEQ ID NO: 2449 - DNA, 4201 bp, Homo Sapiens
  NM_004737
gggggcgcggccgcgctcgtctcgccgggctgttcgcgggcaggccctgccctgaagggacgaatcggcttggagcgcgggaggtggagtcggccccggcggtcgctccctggacccaacccgaggctgacccaggcccctgcccatgcggggcgcccctggctcggaagagtcccccgggccgggagcagctccaggcagcggccccggaggaagaggaagaagggacagtgctcagcttgggggacccggaccctcgccgcggcatttggagccgggggcagtcccgaactctgtgcttggcaccgccgctccgagtagggcagcgcctgccgggaccctgacccggaccccctgcgcctcgtaggcggcggcgccgccgcgccaccctgttcttccgtgtctccctctgcctggcggcagtcacggccaagaacctacattaagaaacgcattcagatgcatcagccgtttgtaaagcacctgtcgtgagccagagagtattatgagggaggccgaggacttcatgctccggacagagaaacggcgctgggattagggattgccacttctgagaggatgctgggaatctgcagggggagacggaaattcttggctgcctcgttgagtcttctctgcatcccagccatcacctggatttacctgttttctgggagcttcgaagatggaaagcccgtgtctctgtcaccgctggagtcccaggcacacagccccaggtacacggcctccagccagcgggagcgcgagagcctggaggtgcgcatgcgcgaggtggaggaggagaaccgcgccctccgcaggcagctcagcctggcccagggccgagccccatcccatcgccgaggcaaccactccaagacctactccatggaggagggcactggagacagcgagaaccttcgggctggcatcgtggcaggcaacagctccgagtgtgggcagcagccggtcgtggagaaatgcgagacaatccacgttgctattgtctgcgccggatacaatgccagccgggatgtcgtcaccctggtcaaatccgtcctgttccatagacggaaccctctgcacttccaccttattgctgactccattgcggagcagatcctggccacgctcttccagacctggatggtgcccgctgtgcgtgtggacttctacaatgcagacgagctcaagtctgaagtttcctggatccccaataaacattactctgggatttatggtctgatgaagcttgtcctgaccaagactcttcctgccaacctggagagagtcatcgtccttgacacggatatcacctttgccactgacattgcagagctgtgggctgtgttccacaagttcaaaggtcagcaagtcctgggcttggtggagaaccagagtgactggtaccttggaaacctgtggaaaaatcaccgcccatggccagcccttggaagaggctacaacacaggggtgatcctgttacttctggataagctgcggaagatgaaatgggagcagatgtggaggctgaccgcagagagggagctcatgggcatgctctctacatccttagctgaccaggatattttcaatgccgtcatcaaacaaaaccccttccttgtgtaccagctcccctgcttctggaatgtgcagctgtcagaccacacccgctccgagcagtgctacagagacgtgtctgatctaaaggtcattcactggaactcccccaagaagctccgggtgaagaacaagcatgtggagttttttcgcaacctctacctgaccttcctggagtatgacggcaatcttctgaggcgggaactgtttggctgccccagtgaggctgatgtcaacagtgaaaacctccagaagcagctgtctgagctggacgaggacgacctgtgctatgagttccggcgagagcgcttcactgtccaccgcacccacctgtacttcctgcactacgagtatgagcctgcagcagacagcacggacgtcaccctggtcgctcagctgtccatggacaggctccagatgctggaggccatctgcaagcactgggaggggcccatcagcctggccctctacctgtcagacgccgaggcccagcagttcctccgctacgcacagggctctgaggtgcttatgagccgccacaacgtgggctaccacatcgtgtacaaggagggccagttctaccccgtgaacctgctgcgcaacgtggccatgaagcacatcagcactccctacatgttcctgtctgacattgacttcctgcccatgtatgggctctatgagtacctcaggaagtctgtcatccagctcgatcttgccaacaccaagaaagcaatgattgtccccgcgttcgagacactgcgctaccggctgtccttccccaagtcaaaagcggagttgctgtcaatgctggacatggggaccctcttcacattcaggtaccacgtctggacgaaaggccacgcacccacaaacttcgccaagtggcggaccgccaccacgccttaccgggttgagtgggaggccgattttgagccgtatgttgttgtgagacgtgactgcccggagtacgaccggaggtttgtaggctttggctggaacaaagtggctcatatcatggagctggatgtgcaggagtatgagttcattgtgctgcccaacgcctacatgatccacatgcctcatgcccccagcttcgacattaccaagttccgttccaacaagcaataccgcatctgtctcaaaaccctcaaggaagagtttcagcaggacatgtcccgccgctacggctttgctgccctgaaatatctcacagccgagaacaacagctagcaccaagaagcccaccactagggggagacatgctgtaggggaagtgccactcgctgtttggggcccggccttcaaattcaaaattgagccatgctttttcggtttgtttttatttatctctttggcccagccaagctgccctcactacagagaccttggacaaggatccagccagtccctctctgccccacaaccctgcattcccagaggttagctatgcagcccacctagatgagtctcttcaagaatgggaaatcaaggggtgacagggagtaaaagggttatcatcttactgcaaagccacaagatcagggcagggctttaggatgttctggatgctttttaataattatgcttcccatcataactggggagaaagggaagtcagggttctaggggttattcgtcccaggaaatagaagtgaaattgtctttattaagtgaaaactttcccctttgccctgcaatgtagctgggcattcaaacggagggcaaaccgatgatctaaaccaaccacttggaaaaacccaatggggacattgtaaccagagggtcctggaggtggggttgatgggtttccttatccccaaagtcactcctgttttgttttgtttttctttgggggttttgtttatttttggggctggcaatccaaaatagaaaatctgatcctttgaggctctaaaggaaaatcagctgcctctaccaaccaccctctatcagcagtggcccaggaaggaggtcaagcatcttcggccgatatttaaacatgggcagcttccttcaggatgatcaccgaggctcccgtgactttgaactccctactctccagaatccaggggctatagcgatggggactgcggaattacgagggctggctgttttacaccggtcacattttctattggcagtgactgattcatgggaaagggctttgaaggaactacttcagtgcacacacaaggtacgaacctctcaggcctttcgaagaactttcataattcatgaaagcccagttctgaagattcacgtatccatctggagacctacaggaagaaagtgattgggttcctctggttcttgcctgcttcactgtggatgggaagaggtgacaacctcagtctccctttgggacctgtccaagggtaggcaaccaccttcaccttcacacagattgaggagacactggactttttacccattttctttaatcttcaatattaatattgtgtttacattgatgagaacaagagttaatgccctaccctctgctgggctgtttgtattgagttgcaatgtgaccagcgaaagctgcatttaataaatgaaagtacagactgtttcttcccca

SEQ ID NO: 2450 - DNA, 3060 bp, Homo Sapiens
  NM_004739
tccggaaggaggcgaaccctgaggcgggcccggcaagccttccctgcggccggcagagcccaacgactagtgggactccgcgggggcgggggtagctggagcctggctctggcctggcaggagccgagcttgttccggaagaagccgagcggacgggggccagcctcagcgtcccgggagtgaggcgatagctgcggcggcgacagcgcgggccgggatgaaccgcgacggctgaggcagcggaggtgccggctgcgcgggccccagtgagactccctcgaagcggcagcccaccgttcggggctttgcctcgagccgagccctgcccccgcgagcctcccggacccctttgtgcggccggaggcggcggcgggaacggccatggcggccaacatgtaccgggtgggagattacgtctattttgagaactcttccagcaatccttacctggttagacggattgaggagctcaacaagactgcaaatggaaatgtggaggcaaaggttgtctgtcttttccggcgcagggacatttctagtagcctcaacagcctggctgatagtaatgccagggagtttgaagaggaatcaaagcagccaggggtgtctgagcagcagcgccatcaactgaagcaccgggaactttttctttctcggcaatttgaatcattaccagccacccacatacgggggaaatgcagtgtgaccctcttgaatgagacagatatcttgagccagtacctggaaaaggaggactgctttttttactcactggtgtttgaccccgtgcagaagacacttctcgctgatcagggcgagattagagttggttgcaaataccaagctgagatcccagatcgcctagtagagggagaatctgataatcggaaccagcagaagatggagatgaaggtctgggacccagacaaccctctcacagaccggcagatcgaccagtttcttgtggtggcccgagctgtgggaacctttgcaagagccctagattgtagcagctccattcggcagccaagcttgcacatgagtgcagctgctgcctcccgagatatcactctgtttcacgccatggataccttgcaaaggaacggctacgacctggctaaggccatgtcgaccctggtaccccagggaggcccggtgctgtgtcgggatgagatggaggaatggtcagcctcagaggccatgctatttgaggaggccctagagaagtatgggaaggacttcaatgatattcgccaggattttctaccctggaagtcacttgccagcatagtccagttttattacatgtggaaaaccacagaccggtatattcagcagaaaaggttgaaagctgctgaagcagacagcaaactgaaacaggtctacattcccacctacactaagccaaaccctaaccagatcatttctgtgggttcaaaacctggcatgaatggggctggatttcagaagggcctgacttgtgagagttgccacaccacacagtctgctcagtggtatgcctggggcccacctaacatgcagtgccgcctctgtgcttcctgttggatctactggaagaagtatgggggactgaagaccccaactcagcttgagggggccactcggggcaccacggagccacactcaaggggtcatttatccagacctgaagctcaaagtctctctccttacacaaccagcgccaacagggccaagctactggctaagaacagacaaactttcctgcttcagaccacaaagctgacccgtcttgccagacgcatgtgcagggacctattacagccaaggagggccgcccgacggccttatgctcctatcaatgccaatgccatcaaagcagagtgctccattcgacttcctaaggccgccaagactccattgaagattcaccctctggtgcggctgcccctggcaactatcgtcaaagatctggtggcccaggcacccctgaaaccaaaaacacctcggggtaccaagacaccgatcaacagaaaccagctgtcccagaaccggggactggggggcattatggtgaaacgggcctatgagactatggcaggggcaggggttcctttctctgccaatggaaggcctctggcttcagggattcgttcaagctcacagccagcagccaagcgtcagaaactaaacccagctgatgcccccaatcctgtggtgtttgtggccacaaaggataccagggccctacggaaggctctgacccatctggaaatgcggcgagctgctcgccgacccaacttgcccctgaaggtgaagccaacgctgattgcagtgcggccccctgtccctctacctgcaccctcacatcctgccagcaccaatgagcctattgtcctggaggactgagcacctgtggggaagggaggtgggctgagaggtagagggtggatgcccagggcacccaaacctcccttccctttcgtgtcgaagggagtgaggagtgaattaaggaagagagcaagtgagtgtgtgtccctggaggggttgggcgccctctggtgttaccacctcgagacttgtctcatgcctccatgcttgccgatggaggacagactgcaggaacttggcccatgtgggaacctagcctgttttggggggtaggacccacagatgtcttggacagttttggggggagggttttttaattttttaaaagttttgcctccctttgtgaaaggggatggggaggggaagagtaaacagataacaggtggtggtacctggttgggggaggggggcgtgcactgccatgtctttttttttttttttttttttttttttcctaattgggggtttctctttctgtccggtgtccggactttcctaattggagtttgaggcccctaagctggcatcaaccccaggccacgctcgctctttccttccctcccctccccctctgccttttgtacgccagttctcagaaataaagatcttttgtccgtttttttaacctcggattctgtaattggttcttatagtaacaaataaaaagctgttttcttcagcttctcctgg

SEQ ID NO: 2451 - DNA, 3936 bp, Homo Sapiens
  NM_004741
gcggccggtgggctccgcccttaaccaagatggcgatacgcgtgggaccggaaagagtttatagatttcccgtctaccctacctctgaggtgaaggtgggactgccctgtggagcccaccctttccgttatgcgcccgcgcggcgcaatgacgtaacacaggcccgcccactgcccctgttgggttcctgagtcgtgctgcgtcgacaacggtagtgacgcgtattgcctggaggatggcggacgccggcattcgccgcgtggttcccagcgacctgtatcccctcgtgctcggcttcctgcgcgataaccaactctcagaggtggccaataagttcgccaaagcgacaggagctacacagcaggatgccaatgcctcttccctcttagacatctatagcttctggctcaagtctgccaaggtcccagagcgaaagttacaggcaaatggaccagtggctaagaaagctaagaagaaggcctcatccagtgacagtgaggacagcagcgaggaggaggaggaagttcaagggcctccagcaaagaaggctgctgtacctgccaagcgagtcggtctgcctcctgggaaggctgcagccaaagcatcagagagtagcagcagtgaagagtccagtgatgatgatgatgaggaggaccaaaagaaacagcctgtccagaagggagttaagccccaagccaaggcagccaaagctcctcctaagaaggccaagagctctgattctgattctgactcaagctccgaggatgagccaccaaagaaccagaagccaaagataacacctgtgacagttaaagctcagactaaagcccctcccaaaccagctcgagcagcacctaaaatagccaatggtaaagcagccagtagcagcagtagcagcagcagcagcagtagcagtgatgactcagaggaggagaaggcagcagccacccccaagaagactgtacctaaaaagcaagttgtggccaaggccccagtgaaagcagctaccacccctacccggaagagttctagcagtgaggattcctccagtgacgaggaagaggagcaaaaaaaacccatgaaaaataaaccaggtccctacagttcagtccccccgccttctgctcccccaccaaagaagtctctgggaacccagcctcccaagaaggctgtggagaagcagcagcctgtggaaagcagtgaagacagcagtgatgagtctgattcaagttctgaagaagagaagaaacccccaactaaggcagtagtctctaaagcaaccactaaaccacctccagcaaagaaagcagcagagagctcttcagacagctcagactctgacagctctgaggatgatgaagctccttctaagccagctggtaccaccaagaattcttcaaataagccagctgtcaccaccaagtcacctgcagtgaagccagctgcagcccccaagcaacctgtgggcggtggccagaagcttctgacgagaaaggctgacagcagctccagtgaggaagagagcagctccagtgaggaggagaagacaaagaagatggtggccaccactaagcccaaggcgactgccaaagcagctctatctctgcctgccaagcaggctcctcagggtagtagggacagcagctctgattcagacagctccagcagtgaggaggaggaagagaagacatctaagtctgcagttaagaagaagccacagaaggtagcaggaggtgcagccccttccaagccagcctctgcaaagaaaggaaaggctgagagcagcaacagttcttcttctgatgactccagtgaggaagaggaagagaagctcaagggcaagggctctccaagaccacaagcccccaaggccaatggcacctctgcactgactgcccagaatggaaaagcagctaagaacagtgaggaggaggaagaagaaaagaaaaaggcggcagtggtagtttccaaatcaggttcattaaagaagcggaagcagaatgaggctgccaaggaggcagagactcctcaggccaagaagataaagcttcagacccctaacacatttccaaaaaggaagaaaggagaaaaaagggcatcatccccattccgaagggtcagggaggaggaaattgaggtggattcacgagttgcggacaactcctttgatgccaagcgaggtgcagccggagactggggagagcgagccaatcaggttttgaagttcaccaaaggcaagtcctttcggcatgagaaaaccaagaagaagcggggcagctaccggggaggctcaatctctgtccaggtcaattctattaagtttgacagcgagtgacctgaggccatcttcggtgaagcaagggtgatgatcggagactacttactttctccagtggacctgggaaccctcaggtctctaggtgagggtcttgatgaggacagaagtttagagtaggtcctaagactttacagtgtaacatcctctctggtccttttctgtgttcctagttttgtacagacttgtttttgagtgttgagtagcagggacaaaataagggaatgttattttttaagaaaattcattttcattgttgtctccttccttttctgtgaaagtcctcatactgagaaatttgtatattttatattaaatcacttactattgatttttgttgtgattttcaaaggtggattcccacagataaaatcttggctattgcccaaaacatagtaaagggtcacgtgtgactttttataataggaagaaaattctgcctttgtgagtgcacatgtccacatttcatccctccttccctcaaaaccctagagaggggcattaaagaattgttgatgtatatgcaatgtctgttaagcatgcactatgtatttcatcctcatttattgggtctgggactgaagtttttagccagcatggacctaacctactttttgggataaaattctctgttttgttacaggcaaaattctggtatggcgtgaatgccatgggtcattctgaatatatttttttctgtaattttatcattacacgatgtttgcaatacgtgctttgttttttaatttgaaagcaaacttttctactgttgaaagacattttttgacaacttgacccttcctagtattgagttctaagttgaggactgcatcttctcgttttttacagtatagagaacaaaatgacatgagtttgaaaaatacatatcacttggtattgctgtcttggttgcagtggtgatacagaattggtttcattaattcctacatggttgagaatcactgatcaagaaagtggggggaaaaaaaacaaacgttaaaacctcaatcctcagtaggaaggtagattacattaggtgaaattataggtaatctatgtatgtgctaatggggttggaaagaaccttacagagcatattacctgataaactggagtgggtttgggagaacaaactaataggattattgtgtctcctagttggtacctgggagcaattgacatgcccccttcagaaccttaactgttagtagcagtggctgtaacaacacaaaccagtgaccagagataacagcttttaggccaagctggcctgacggtatggctgcaggaagtgactgagcagtagcggtactcagccagaccaagacggagagggaagagtccacagctttctggaagctaaggcattctggtggtagaaaagtgtgccccaagccttcatggacgagttataggtcttaagattagtctcctcttgtttggattccatacttgctaaataacctgataataacctggttttccatgtaactgcctctaggaagaaaatgtactgttcatgctgacacagatatttcagtctgcatggtaaaagttctaaatcttactacaaaataataaactggctggtttataatgtg

SEQ ID NO: 2452 - DNA, 2299 bp, Homo Sapiens
  NM_004749
gggaagcgcgccgcgcacctcatggttccggggacagttagggcggcggatggaggtcagcggtggtgctcgctgcggtttggaatcacttgctaggagtcttgtctctctgccacccaggacatcatggcagctcacctggtaaagcgatgcacgtgcctcctgagagaagctgctcgtcaggcccctgccatggctccagttggccgactgagacttgcctgggtagcccataagactctgacttcctcagccacctcacccatttcccacctcccaggttccttgatggagccggtggagaaggaacgagcatctactccctacatagagaagcaggtggaccacctcatcaagaaggccacaaggccagaggagctcctggagctacttggtggcagtcacgacttggacagcaatcaagcagcaatggtacttatccggctctctcacttgctgtctgagaagccagaagataaaggcttgctcatacaggatgcccactttcatcaacttctctgtctgctcaacagtcagattgcctcggtctggcatggtaccctctcgaagctgctgggaagcctgtatgctctgggcatccccaaggcctccaaggagctgcagtcggtggagcaggaggtccgctggcgcatgcggaagctcaagtacaagcacctggccttcctggcagagtcctgtgccaccctctcacaggagcagcactcgcaggagctgctggctgagctgctcacacacctggaaaggcgttggacagaaattgaagattcccacacattagtgaccgtcatgatgaaggtgggacacctctcggagccactaatgaaccgcctggaagacaagtgcctggagttggtggagcactttggccccaatgagctgcggaaggtgctggtgatgctggcagctcagagccggcggtccgtgcccttgctgcgggccatctcctaccacctggtgcagaagcccttctctctgacgaaagatgtgctcttggacgtggcctatgcctatggcaaactcagctttcaccagacccaggtgtcccagcgcctggccaccgacctgctatccctcatgcccagcctgacttctggtgaggtggcccactgtgccaagtccttcgccttactcaagtggctcagcctgcccctgtttgaggcctttgcccagcacgtcctgaacagagcgcaggacatcaccctgccccacctgtgcagcgtacttctggcttttgcgcgtctgaacttccatccagaccaagaggatcagttcttcagcctggtacatgagaagctggggtcagagctgccaggcctggagccagccctgcaggtggacctggtgtgggccctgtgtgtgctgcagcaggcacgggaagcagagctgcaagccgtcctccaccctgaatttcacatccaatttctagggggcaagtctcagaaggatcagaacaccttccagaagctgctccacatcaacgccactgccctgctggagtaccccgagtactcgggtccccttctgcctgcctcggctgtggcccctgggccctcagcccttgacaggaaggtgacccccctgcaaaaggagctgcaggagacgctgaaggggctgctggggagcgccgacaagggcagcctcgaggtggccacgcagtatggctgggtgctggatgctgaggtgctgctggacagtgacggcgagtttctgcccgtaagggactttgtggcacctcaccttgcccagccaactgggagccagtcaccacctccagggtctaagaggctagcgttcttgcggtgggagttccccaacttcaacagccgaagcaaggacttgctgggtcgctttgttctggcccggcgacacatagtggctgcaggcttcctgatagtggacgtcccattctatgagtggctggaactcaagtctgaatggcagaaaggcgcctacctcaaggacaagatgcgcaaagcggtggctgaggagctggccaagtgacttgtgccagcagcatggactgcgtgcctctccgccggaggtctagctgtgggcggccaagaagggtcacccttgaggacaaacctctgtgcaggaccttggccagagtggggagggtggccagccactctgagggacagaacgtcctcttgtgtataataaacctttaattttggtgttggacccctggggccttcccaggcttggtcaccctctgcactgtcaaaaaaaaaaaaaaaaaaaaaaaaaaaaaaaaaaaaaaaaaaaaaaaaaaaaa

SEQ ID NO: 2453 - DNA, 1825 bp, Homo Sapiens
  NM_004753
ttttttttttttttttttttttttttaatcttgcactttgaaaccgcgggaccgaggcagggtgcgcgcgtgtggttggtgcctttttttttttttcttcccctccctaaactcctctgtcagtctgtaaacattacctgagaattccccagccgaaacggctgctggggcaagaaacttcttgttagaactttccacctccggcttccccctccacctcttttaccgtcccaaccttaggagacgctttttctcccccagaggagaatttatctttttttttttttttttttttctttttctcacccggtgctttgcatttgggaagaggtgatttcaagagtggccaggtgggacgcctctctcctccttattcggtttactatttattgttcggggtgttttttaattcctgtattgctcggcccggggagtttcgccccctgcccggctccgcggcgcggaggatggtgtggaaacggctgggcgcgctggtgatgttccctctacagatgatctatctggtggtgaaagcagccgtcggactggtgctgcccgccaagctgcgggacctgtcgcgggagaacgtcctcatcaccggcggcgggagaggcatcgggcgtcagctcgcccgcgagttcgcggagcgcggcgccagaaagattgttctctggggccggactgagaaatgcctgaaggagacgacggaggagatccggcagatgggcactgagtgccattacttcatctgtgatgtgggcaaccgggaggaggtgtaccagacggccaaggccgtccgggagaaggtgggtgacatcaccatcctggtgaacaatgccgccgtggtccatgggaagagcctaatggacagtgatgatgatgccctcctcaagtcccaacacatcaacaccctgggccagttctggaccaccaaggccttcctgccacgtatgctggagctgcagaatggccacatcgtgtgcctcaactccgtgctggcactgtctgccatccccggtgccatcgactactgcacatccaaagcgtcagccttcgccttcatggagagcctgaccctggggctgctggactgtccgggagtcagcgccaccacagtgctgcccttccacaccagcaccgagatgttccagggcatgagagtcaggtttcccaacctctttcccccactgaagccggagacggtggcccggaggacagtggaagctgtgcagctcaaccaggccctcctcctcctcccatggacaatgcatgccctcgttatcttgaaaagcatacttccacaggctgcactcgaggagatccacaaattctcaggaacctacacctgcatgaacactttcaaagggcggacatagagacaggatgaagacatgcttgaggagccacggagtttgggggccacagcacctgggcacacacccgagcacctgtccattggcatgcttctgctgggtgagcaggacagctcctgtccccagcgaagaatccggctgcccctgggccagtcccaggacctttgcacaggactgatgggtataactgacccccacagggaggcaggaaaacagccagaagccaccttgacacttttgaacatttccagttctgtagagtttattgtcaattgcttctcaagtctaaccagcctcagcagtgtgcatagaccatttccaggagggtctgtccccagatgctctgcctcccgttccaaaacccactcatcctcagcttgcacaaactggttgaacggcaggaatgaaaaataaagagagatggcttttgtgaaaaaaaaaaaaaaaaaaaa

SEQ ID NO: 2454 - DNA, 3883 bp, Homo Sapiens
  NM_004755
ttggttgcgcggtactagcggtgcccgccgaagggggaggaggcgaggagcgagccgtgcggccagagcgggaaagagactcgtctttgcgtccgagttctggagccgccgcaccccgactcctggggccgcggcagcggctgcgaggggacgggcgtccgctgtctcctgggttcccctcgtagcgacccgcgggatcggaaaaaaaggagaagatggaggaggagggtggcagcagcggcggcgccgcggggaccagcgcggacggcggcgacggaggagagcagctcctcactgtcaagcacgagctgcggactgctaatttgacaggacatgctgagaaggtgggaatagaaaattttgagctcctgaaggtcctaggaactggagcttatggaaaagtatttctagttcgtaaaataagtggccatgatactggaaagctgtatgccatgaaagttttgaaaaaggcaacaatcgttcaaaaggccaaaaccacagagcatacaaggacagaacgacaagtcctggaacacattaggcagtcgccatttttggtaacattacattatgctttccagacagaaaccaaacttcatctcattttagattatataaatggtggtgaactttttactcatctttctcaaagagagcgtttcacagagcatgaggtgcagatttatgttggagagattgtgcttgccctcgaacatctccacaagttggggattatatatcgtgatattaagcttgagaatattctacttgattctaatggccatgtggtgctgacagattttggtctgagtaaggagtttgtggctgatgaaactgaaagagcatattccttttgtggaactattgaatacatggcaccagatattgtcagagggggagattcaggacatgacaaggcagttgactggtggagtttgggtgttctaatgtatgaattactaactggagcatctcctttcactgttgatggagaaaaaaattcccaagctgagatatctaggagaatattaaaaagtgagcctccatatccccaagaaatgagtgctttagcgaaagacctaattcagcgtcttttgatgaaagatcccaagaagagattgggatgtggtccacgtgatgcagatgaaatcaaagaacatctcttctttcagaaaataaattgggatgatttagccgccaaaaaagtgcctgcaccatttaagccagtcattcgagatgaattagatgtgagtaactttgcagaagagttcacagaaatggatcccacttattctcccgcagccctgccccagagttctgagaagctgtttcagggctattcctttgttgctccttccatcctattcaagcgtaatgcagctgtcatagaccctcttcagtttcacatgggagttgaacgtcctggagtgacaaatgttgccaggagtgcaatgatgaaggactctccattctatcaacactatgacctagatttgaaggacaaacccctgggagaaggtagtttttcaatttgtcgaaagtgtgtgcataaaaaaagtaaccaagcttttgcagtcaaaataatcagcaaaaggatggaagccaatactcaaaaggaaataacagctctgaaactctgtgaaggacaccccaatattgtgaagttgcatgaagtttttcatgatcagcttcacacgtttctagtgatggaacttctgaatggaggagaactgtttgagcgcattaagaaaaagaagcacttcagtgagacggaagccagctacatcatgaggaagcttgtttcagctgtaagccacatgcatgatgttggagtggtgcacagggatctgaaacctgagaatttattgttcaccgatgaaaatgacaatttggaaattaaaataattgattttggatttgcacggctaaagccaccggataatcagcccctgaagactccatgcttcacccttcattatgccgccccagagctcttgaatcagaacggctacgatgagtcctgtgacctgtggagcttgggcgtcattttgtacacaatgttgtcaggacaggttcccttccaatctcatgaccgaagtttgacgtgtaccagcgcggtggaaatcatgaagaaaattaaaaagggagatttctcctttgaaggagaagcctggaagaatgtatcccaagaggctaaagatttgatccaaggacttctcacagtagatccaaacaaaaggcttaaaatgtctggcttgaggtacaatgaatggctacaagatggaagtcagctgtcctccaatcctctgatgactccggatattctaggatcttccggagctgccgtgcatacctgtgtgaaagcaaccttccacgcctttaacaaatacaagagagaggggttttgccttcagaatgttgataaggcccctttggctaagagaagaaaaatgaaaaagactagcaccagtaccgagacgcgcagcagttccagtgagagttcccattcttcttcctctcattctcacggtaaaactacacccaccaagacactgcagcccagcaatcctgccgacagcaataacccggagaccctcttccagttctcggactcagtagcttaggcatggtaggagtgtatcagtgatccattgcacctttattccctcagcatatgcctgaggcgatcttttatgcttttaaaaatgtttcccgttggtctcattggaatctgcctcctaatgatttttttcaggaaaacctgtttggttatcctcattcaaaagcactggacagagaatgttactgtgaatagagcacatattactctttttagcaacctagcatgatgccaacaagactattcttgaaagagcaaaggttcctgtaaatttaattagggctagatttgagctgcttgtaagtcacaggttttccagatgtctgccaacaagaaatgactcatactgtgatgataccttttgctttgccttgtggacaatgtgggtttttgaaatttgcacccttcaaacaatgatttatcagagaaaggggtctgttttcaaaaaagattctgtaatgaattttatgtgtggcatatacttatttcttgagagaagattttaacttattgtttttattttatggttacatatgatgataacctgctattattaaactttttctaaaaagtgaaaaaaaaaaaaaaagatataagaactcaaggtcccatactctgtattcgggatccatctgagatgcatgctaagctatgtgtatgtttttaattttgcactgctctttcctggcaatttgttttaatggttattgcagaatattaaggtacatgtctctctgttttaagtaatattgcactttataaaaaagtatgaataaagcaaactattttataaagtgcactgtttaaagcatttgcactgtatttttgccatttattttcattttctactttaaatttgtcctcacattcctcttctactttgtatgcaacaagtagaatggggcatgttgtgtcatgtagtcagccacttatgcaccaatgtgaggaaaacctaaagggaaattaaactaaacactgtgcttcatatttgtacactgtgttgtactacagtgaggaatttcctcctgtagtcatatattatgtacataatattttagaatcatacctatgacttgtttggaaatttttctgttaaattttaaatccagaaagcatattttataaacttatgcagagcacttttattgctcaaaagttctgaattcatacagaaaacaagtactatgtgatgaaaacatttcattaaaagattgctgcatttaaaaatacaattaattcgttccctatgcaaaaaaaaaaaaa

SEQ ID NO: 2455 - DNA, 7706 bp, Homo Sapiens
  NM_004758
ctgaggctcagccctcctcggagcccaccatctcgaggctcctggactgtaagggacccctgcagtccccagagcagaggccagcaggggctgagactatgaggcaagcagcccatcgacccaggcctccttaggaccagcccagccacccagcaagcgaaagagcagcagcagagagcagagccggagataaaggaccacagcggaccactggggatcacccccagcagctcctgaagcctctggccgggctgaggggttgcgacagacggccagacccacagacactgacagacacacaacgacaccgatgcacacagctgcacgacactgacacactcagatacaaccagggacagcatcacatactgccacagccctgcaatacagacacccacacacacacacacaaacaactggcaactctgaaatgggcagacagtgacacacagcaccacccccctcaacacacagaagtgggggcacccatcttcccaacacatgagacagcattgacctgcacggacagacctggagacacacacacgcaccctcacccaggcgcagctgtcggtggcctctgcacatcctccctacccccacagggacaccctcgctcctccacatactcgcgcacacacacagctaccagcaaacatagctcacatacccctggctccagctccagcagccctggcgccttctgcagcctcctttgtgggtggggaagagctcagccaaccttggatggagcgtcggtgaagcaagagctcagaggggagaggggctggcctggcatgaccctcgccagtccccccacctggctgggtgatgtcccccggcccgggttctggggccccttggcagtaccatggagcaactgacaaccctcccacggcctggggaccctggagccatggagccatgggcactgcccacctggcatagctggactccaggtcgagggggtgaacctagcagtgcagccccaagcatcgctgatactcctccggcagctctgcagcttcaagaactgaggtctgaggagagttccaagcccaaaggagacgggagctccaggcccgtggggggaactgaccctgaaggagcagaggcttgtctgcccagcctgggccagcaagcatccagctctggacccgcctgccagaggccagaggatgaggaagtggaggctttcctgaaggccaagctgaatatgagctttggggacaggcccaatctggagctgctgagggccctgggggagctgcggcagcgctgtgccatccttaaggaggaaaaccagatgctgaggaagagcagcttccctgagacagaagagaaggtgcggaggctgaagaggaagaacgccgagctggcggtcattgccaagcgcctggaggagagggcccgaaagctgcaggaaacgaacctgagggtggtgagtgcccccttgccccggccggggaccagcttggagttgtgtcggaaggccctagcccgccagcgagcccgggacctcagtgagacagccagtgcactgctggccaaggacaagcagattgctgccttgcagcgggagtgcagggagctgcaggccaggctcactctggtgggcaaggagggtccccagtggctccacgtgcgggacttcgatcggctgctgcgcgagtcccagcgggaggtgctgcggctgcagaggcagatcgcgctgcgcaaccagcgggagacgctcccgctcccgccgtcctggcccccgggccctgctctccaggccagagcaggggcgcctgctcccggggccccgggagaggccacgccccaggaggatgcggacaacctacccgtgattctaggggagccagagaaagagcagagggtgcagcagctggaatcggagctcagcaagaagcggaagaaatgcgagagcctggagcaggaagcccggaaaaagcagaggcgatgtgaggagctggaactgcagctgagacaagcgcagaatgagaatgcccgcctggtggaggagaactcccggctcagtgggagagccacagagaaggagcaggtggagtgggagaatgcggagctgaggggccagctcctgggggtgacacaggagagggactcagcccttcgcaagagccagggcctgcagagcaagctggagagcctggagcaagtgctgaagcacatgcgggaggtggcccagcggcggcagcagctggaggtggagcatgaacaggctcggctcagcctacgggagaagcaggaggaggtccggagactgcagcaggcccaggctgaagcccagagggaacatgaaggagccgtgcagctgctggagtctaccttggattccatgcaggcccgggttcgagagctcgaagaacagtgccgcagccaaaccgagcagttcagcctcctggcacaggaactccaggctttccgcctgcacccgggccccttggatctgctcacatctgccctggactgtgggagccttggagactgcccaccacccccctgctgctgctccattccccagccttgccgggggtctggccccaaagaccttgacctcccgccgggctcccctgggcgctgcaccccaaagtcttccgagcctgcccctgccactctcactggggtccctcgaaggacagccaagaaggcagagtctctctccaactcctcccactccgagtccatccacaacagccccaagtcatgccctacacctgaggtggacacagccagtgaggtagaggagctggaggcagacagtgtctccctgctcccagctgcgccagagggcagccggggaggagccaggatccaggtcttcctagcacgttatagctacaacccctttgagggtcccaatgagaatccagaagcagagcttccgctgacagctggcgagtacatctacatctatggcaacatggatgaggatggcttttttgaaggagagctcatggatggccgaaggggcctggtcccttccaattttgtagagcgtgtgtcggatgatgacctcctgacctccctccctccagagctggccgatttgtcccacagctcaggccctgaactcagtttcctgagtgtaggtgggggtggcagcagtagcgggggccaaagcagtgtgggaaggagccagcccagacctgaggaggaggatgcaggggacgagctcagtctgagcccatcaccggagggcctgggcgagcctcctgccgtgccttacccccgccgtctggtggtcctcaagcagctggcccacagcgtggtgctggcctgggagccgcctcctgagcaagtggagctacacggcttccatatctgtgtgaatggggagctgcgacaggccctggggcctggggcgccacccaaggccgtgctggagaacctggacctgtgggccgggccccttcacatttctgtccaggccctgactagccggggcagctctgacccactgcgctgttgcttggcggtgggtgcccgggccggagtggtgcccagccagctgcgggtccatcggttgacagccacatctgctgagatcacctgggtgcccggcaatagcaacttggcccatgccatctacctcaatggggaagagtgcccacctgccagccccagtacctactgggccaccttctgccacttacggcctggcacaccctatcaggcccaagtggaggctcagctcccaccccaagggccctgggaaccaggctgggagaggctggagcagcgggctgccaccctgcagttcaccacactcccagcaggcccacctgatgcccctctggatgtgcagatcgagcctgggccctcccctgggatcttgatcatcagttggctcccagtcaccatcgatgctgctggcacatccaacggtgtccgggtcacaggctatgccatctacgctgatgggcagaagatcatggaggtggcctcacccacggcaggcagtgtactggtggagttgtcccagctgcagctgctgcaggtgtgtcgtgaggtggtcgtgcgcaccatgtcgccccacggggagtcggcggactccatcccggctcctatcactcccgccctggctccggccagcctgccagcccgagtctcctgcccctcaccgcacccaagcccagaggccagagcgccccttgcttcagcctccccagggcctggagaccccagctctcctctccagcaccctgctccccttggaactcaagagcctccaggagcaccccctgcaagcccttccagagagatggcaaaagggtcccacgaggaccctccagcaccttgctcccaggaggaggctggggcagcagtgctgggcacctcagaggagaggacagccagcacatctaccctgggtgagaaggaccctggccccgcagctccctcactggccaagcaggaggccgagtggactgcaggagaggcctgtccggcctccagctccacccagggagcacgggcccagcaggcgccaaataccgagatgtgccaaggaggagacccagggtctgggctgaggcccagggctgagaaggaggacacagcagagcttggggttcatctggtgaactccctcgtggaccacggccgcaactcagacctgtcagacatccaggaggaagaggaagaggaggaggaggaggaggaagaggagctgggttccaggacttgctccttccagaagcaggttgctggcaacagcatcagggagaatggggccaagtcccagcccgaccccttttgtgagactgacagcgatgaggagatcttggagcagatcctggagctgcccctccagcagttctgtagcaagaagctctttagcatcccggaggaggaggaagaggaagaggaggacgaggaggaggagaagtcaggggcaggctgttcttcccgagaccctggcccgcctgaacctgcattgctggggctgggctgtgacagtggtcagccccgaagacctggccagtgtcccttgtctcctgagtcctccagggctggagactgcctggaagacatgcctggattagttggtggaagcagccggaggagaggagggggctcccctgagaagcccccaagccgcaggcggcctccagatccccgagaacactgcagccgacttctcagcaacaatgggccccaggcctctggacgactgggccccacacgggagaggggtggcctccccgtaattgagggccccaggactggactagaggctagcgggagaggccggctgggcccttcccggaggtgctcccgtggccgggcgctggagcctggcctggccagctgcctttcccccaagtgcttggaaatcagcattgaatatgattcggaggatgagcaggaggcgggcagcgggggcatcagcatcaccagctcctgctaccctggagatggggaggcctggggcacagcaactgtaggaaggcccagggggcctccgaaggccaattcaggccccaagccctacccacgcctcccagcctgggagaaaggggaaccagagcggagaggccgcagtgcgacgggcagagccaaggagccactctcccgggcaacagagaccggagaggccagagggcaggacggctctgggcggaggggcccccagaagagaggtgtccgagtcctcaggccaagcactgcagagctagtccctgcgaggagcccctcagaaacactggcttaccagcacctacccgtcaggatctttgtggctctgtttgactatgaccccgtgtcaatgtcgcccaatcctgatgctggagaagaagagcttcccttccgagagggtcagatcctgaaggtgtttggggacaaggatgccgatggcttctaccagggcgaaggtgggggccggacaggctacattccctgcaacatggtggctgaggtggctgtggacagccctgctgggagacagcaactgctccagcggggttatttgtccccagatattctccttgagggctcagggaatggtccgtttgtgtactccacagcccacacaactgggcctcctcccaagccccgccgctccaagaaagctgagtcggaaggccctgcccagccctgtccaggcccccctaagctggtcccctctgctgacctgaaagctccccactccatggtggctgcatttgactacaacccccaggagagttcccccaatatggacgtggaggcagagctgcccttccgggcaggggatgtcattactgtgtttgggggcatggacgatgacggtttctactatggggaattaaatggacaaaggggcctggttccatccaacttcctggagggccctgggcctgaggcaggcggcctggacagggaacccaggacaccccaggctgagagtcagagaacgaggaggagaagagtccagtgctagatggagatagatatatgtagagagagcaacatgactggggctgcaccacacaagggtccccagggcccccaggtgggccttgtacccccagctctggcagcgcccccaggattgaacgtggggagccccagggcagaagcgagaaggtgtggggtttcttctccaaggggaagcagctcctcaggaggctgggctctgggaagaaggagtgaagctgtggcccatcctgcaggcagaagaggccctgagaggcccccagatcactgtctctgctgagcagggaaggctcagactgggcccagagcccccgttcttctgcgttaacactgtggcattcagagggaatcaaagagccttggtgaaggtcagagctaaatggctccttaaggatgaactctctagagaagcaccttcctcctacaggaggggaaactgagcccacagtgagtatgtaacttgaccaaggtcactgagccaggactggacccaggaccctcgcgtcctggtccacccacctcgtctactagtgtcccacagtgctgcgctagtcccttctgccacccttcccagtcccaggacgggccctggagggagaaaggagcctgtgccccctgatggctctggctgtcctgatcctgtcttccctcccctgaaggaaagtttgcactggattttattggagccccatctccccagcgggcaggcgggcggagcctgtatatatgtatatactcagtgcctcagttcagcttcctccacctcgcttccactgcacaggcccaggaaggagaaaggccaagccaaagtgggccccaccctgcccccgtcgtgctccatccttccctgccggggcctgctggcccctgtaaggtcccgcccccaaagaccctggggccagcggggccgaaagcggagttgggtttgccttattttgctcattggattcaagttcttttgcatagttttcttctaacccctgttggagtccaggggctggagaaaaggacagatttatgcagctattttcatacattccctgttcagagtggggtaggggttctccgccgttacccgatccactccatcccccaccctctgaggggtgagtgtgtctttgcatgtttcctttgctgtggtgggagatagtttgactgaacccccaccttgaccttggtctccaggggtgtggaatggtgggggaatttgtttaaaaagacattttattataataaagtctattttcacaaaaaaaaaaaaaaaa

SEQ ID NO: 2456 - DNA, 3608 bp, Homo Sapiens
  NM_004759
gcggccgcttccccccggccgggcccccgccgccccgcggtccccagagcgccaggcccccggggggagggagggagggcgccgggccggtgggagccagcggcgcgcggtgggacccacggagccccgcgacccgccgagcctggagccgggccgggtcggggaagccggctccagcccggagcgaacttcgcagcccgtcggggggcggcggggagggggcccggagccggaggagggggcggccgcgggcacccccgcctgtgccccggcgtccccgggcaccatgctgtccaactcccagggccagagcccgccggtgccgttccccgccccggccccgccgccgcagccccccacccctgccctgccgcaccccccggcgcagccgccgccgccgcccccgcagcagttcccgcagttccacgtcaagtccggcctgcagatcaagaagaacgccatcatcgatgactacaaggtcaccagccaggtcctggggctgggcatcaacggcaaagttttgcagatcttcaacaagaggacccaggagaaattcgccctcaaaatgcttcaggactgccccaaggcccgcagggaggtggagctgcactggcgggcctcccagtgcccgcacatcgtacggatcgtggatgtgtacgagaatctgtacgcagggaggaagtgcctgctgattgtcatggaatgtttggacggtggagaactctttagccgaatccaggatcgaggagaccaggcattcacagaaagagaagcatccgaaatcatgaagagcatcggtgaggccatccagtatctgcattcaatcaacattgcccatcgggatgtcaagcctgagaatctcttatacacctccaaaaggcccaacgccatcctgaaactcactgactttggctttgccaaggaaaccaccagccacaactctttgaccactccttgttatacaccgtactatgtggctccagaagtgctgggtccagagaagtatgacaagtcctgtgacatgtggtccctgggtgtcatcatgtacatcctgctgtgtgggtatccccccttctactccaaccacggccttgccatctctccgggcatgaagactcgcatccgaatgggccagtatgaatttcccaacccagaatggtcagaagtatcagaggaagtgaagatgctcattcggaatctgctgaaaacagagcccacccagagaatgaccatcaccgagtttatgaaccacccttggatcatgcaatcaacaaaggtccctcaaaccccactgcacaccagccgggtcctgaaggaggacaaggagcggtgggaggatgtcaaggggtgtcttcatgacaagaacagcgaccaggccacttggctgaccaggttgtgagcagaggattctgtgttcctgtccaaactcagtgctgtttcttagaatccttttattccctgggtctctaatgggaccttaaagaccatctggtatcatcttctcattttgcagaagagaaactgaggcccagaggcggagggcagtctgctcaaggtcacgcagctggtgactggttggggcagaccggacccaggtttcctgactcctggcccaagtctcttcctcctatcctgcgggatcactggggggctctcagggaacagcagcagtgccatagccaggctctctgctgcccagcgctggggtgaggctgccgttgtcagcgtggaccactaaccagcccgtcttctctctctgctcccacccctgccgccctcaccctgcccttgttgtctctgtctctcacgtctctcttctgctgtctctcctacctgtcttctggctctctctgtacccttcctggtgctgccgtgcccccaggaggagatgaccagtgccttggccacaatgcgcgttgactacgagcagatcaagataaaaaagattgaagatgcatccaaccctctgctgctgaagaggcggaagaaagctcgggccctggaggctgcggctctggcccactgagccaccgcgccctcctgcccacgggaggacaagcaataactctctacaggaatatattttttaaacgaagagacagaactgtccacatctgcctcctctcctcctcagctgcatggagcctggaactgcatcagtgactgaattctgccttggttctggccaccccagagtgggagaggctgggaggttgggaggctgtggagagaagtgagcaaggtgctcttgaacctgtgctcattttgcaattttatcagtaatttgacttagagtttttacgaaacctcttttgttgtccttgccccactcctctccaccagacgccttcctctctggatactgcaaaggcttgtggtttgttagagggtatttgtggaaactgtcatagggattgtccctgtgttgtcccatctgccctccctgtttctccacaacagcctggggttgtccccgctggctcacgcgttctgggagctcaaggccaccttggaggaggatgccacgcacttcctctctcggagccctcagacatctccagtgtgccagacaaataggagtgagtgtatgtgtgtgtgtgtgtgtgtgtgtgtgcacacgtgtgtatgagtgcgcagatctgtgcctgggatcgtgcatttgaggggccaggggcaggcagggctgcagagggagacggccctgctggggcttaggaaccttctcccttcttgggtctgccctgcccatactgagcctgccaaagtgcctgggaagcccacccagattctgaaacaggccctctgtggcctgtctctattagctgggttccgggaggcagagaggagtgaccgggcactggcactgcgatcaggaagactggacccccagcccccagggcccccctccccccacttagtgctggtcctaggtcctctgaggcactcatctactgaatgacctctctacttccccttcttgccattattaacccatttttgtttattttccttaaatttttagccatttctccatgggccaccgcccagctcatgtaggtgagcctgggcagcttctgttggcagagcttttgcatttcctgtgtttgtcctgggttctggggcatcagccagctaccccttgtgggcaaaggcagggccacttttgaagtcttccctcagatttccattgtgtggcctggtgggtcagggggagtctttgcaccaaagatgtcctgactttgcccccttgcccatcagccatttgccatcaccccaaacaactcagcttcggggccggtgaggggaggggcctcccccagcacagatgaggagcagctggggtaggctgtctgtgccatggccccccactcccccttcccttggagggagaggtggcaggaatacttcacctttcctctccctcaggggcaggtggtggaggggcgcccagggtcgtctttgtgtatgggggaaggcgctgggtgcctgcagcgcctcccttgtctcagatggtgtgtccagcactcgattgttgtaaactgttgttttgtatgagcgaaattgtctttactaaacagatttaatagttaaaaaaaaaaaaaaaaaaa

SEQ ID NO: 2457 - DNA, 877 bp, Homo Sapiens
  NM_004765
cgagagagggcgcggccaactccaggggggacggcaggccgagagcgcggcgcccgggcctggcgcggagcctgagcccgccggacgggaggcggccccgccgcgggctcggccccggccccagccccgccagcatggccggccggactgtacgggccgagacccggagccgggccaaggatgacatcaagaaggtgatggcgaccatcgagaaggtccggagatgggagaagcgatgggtgactgtgggcgacacttcccttcgtatcttcaagtgggtgccagtggtggatccccaggaggaggagcgaaggcgggcaggtggcggggcagagagatcccgtggccgggaacgtcggggcaggggcgccagtccccgagggggtggccctctcatcctgctggatcttaatgatgagaacagcaaccagagtttccattcggaaggttccctgcaaaagggcacagagcccagtcctgggggcaccccccagcccagccgccctgtgtcacctgccggacccccagaaggggtccctgaggaggctcagcccccacggctgggccaagagagagatcccgggggcataactgctggcagcaccgacgaacccccaatgctgaccaaggaggagcctgttccagaactgctggaagctgaggcccccgaagcttaccctgtctttgagccagtgccacctgtccctgaggcagcccagggtgacacagaggactcggagggtgcccccccactcaagcgcatctgcccaaatgcccctgacccctgagaagccggcctgcctgtcctgttgccccaggggcccctttggctttttacaaataaagacccttttgtaaaaaaaaaaaaaaaaaaaaa

SEQ ID NO: 2458 - DNA, 3142 bp, Homo Sapiens
  NM_004766
gactatcgcgagaatcggctcccggaagttccacgtcagtcagtctgacggtcagtggatcggtgggtttatctcaaggcctgagtagccggtaacaaacgagggttcccgggattggaccgacgcagccatgcctctgcgacttgatatcaaaagaaagctaactgctagatctgatcgagttaagagtgtggatctgcatcctacagagccatggatgttggcaagtctttacaatggcagtgtgtgtgtttggaatcatgaaacacagacactggtgaagacatttgaagtatgtgatcttcctgttcgagctgcaaagtttgttgcaaggaagaattgggttgtgacaggagcggatgacatgcagattagagtgttcaattacaatactctggagagagttcatatgtttgaagcacactcagactacattcgctgtattgctgttcatccaacccagcctttcattctaactagcagtgatgacatgcttattaagctctgggactgggataaaaaatggtcttgctcacaagtgtttgaaggacacacccattatgttatgcagattgtgatcaaccccaaagataacaatcagtttgccagtgcctctttggacaggactatcaaggtgtggcagttgggctcttcgtcaccaaacttcactttggaaggacatgagaaaggcgtgaattgcattgattactacagtggtggggacaagccatacctcatttcaggtgcagatgaccgtcttgttaaaatatgggattatcagaataaaacatgtgtgcagacactggaaggacatgcccaaaatgtgtcttgtgccagctttcatcctgagttgccaatcattatcacaggttcagaagatggaacagtacgtatttggcattcaagcacctaccggcttgagagcacactgaattatggaatggagagggtatggtgcgtggccagtctaagagggtcaaacaatgtcgctttgggctatgatgaagggagcatcattgttaagcttggtcgggaggaacctgccatgtccatggatgccaatggaaagataatttgggccaagcattcagaagtccagcaggccaacctaaaagcaatgggagatgctgaaattaaagatggtgaaagattgccactggcagtaaaggatatgggcagttgtgaaatataccctcagactattcagcacaatcctaatgggcggtttgtggtggtgtgtggtgatggggagtatatcatctacacagcaatggcattgagaaacaagagctttggatctgctcaggagtttgcatgggcccacgattcttcagagtatgcaataagagagagcaacagcattgtaaagatatttaagaactttaaggaaaaaaaatcatttaaaccagattttggagcagaaagtatctacggcggcttcttattgggagtcagatctgtaaatggcttagccttctatgactgggacaatacagaactcatacgaagaattgaaattcagcccaaacatattttctggtctgactctggagagctagtctgtattgctactgaggaatcattttttatccttaagtatctgtcagaaaaagtcttggctgcacaggaaacacatgagggagttactgaagatggcattgaagatgcctttgaggttcttggtgagattcaggaaattgtgaaaacagggctttgggtaggcgattgcttcatttacacaagttctgtgaacagattaaattattatgttggaggagaaatagtcaccattgcccacttggacaggacgatgtatctcctaggctacattcctaaagacaacaggctttatctgggggataaagaattgaacatcattagctattccctgctggtttcagtcctggaataccagacagctgtcatgcggagggactttagcatggctgataaggtccttcctaccattccaaaagaacagaggaccagagttgcacactttttggaaaagcagggcttcaagcagcaagctcttacagtatccacagatcctgagcatcgttttgagcttgctcttcagcttggagagttaaaaattgcataccagttagcagtggaagcagagtcagaacagaagtggaaacaacttgctgaacttgccattagtaaatgtcagtttggcctagcccaggagtgcctgcatcatgcacaggattatgggggcctgctgcttttggccactgcctctggaaatgctaatatggtgaacaagctagcagagggtgcggagagagatggcaaaaataatgtggcattcatgagctactttttacagggcaaggttgatgcctgcctagagctcttaattagaactggacggctgccagaagctgccttcttggcccgaacttacttacccagtcaggtttcaagggtagtgaaactctggagagagaatctctcaaaagtcaatcagaaagcagcagaatcccttgctgacccaacagagtatgaaaacctgttccctggattaaaagaagcctttgttgttgaagaatgggtgaaggaaacacatgctgatctgtggccagccaaacaatacccacttgtcacgccaaatgaagagagaaatgtcatggaagagggaaaagactttcagccctcaagatctacagctcaacaggaacttgatgggaaacctgcttctcctactccggttattgtggcctcccacacagccaacaaagaagaaaagagtttactcgaactagaagtagatttggataatttggaattagaagatattgacacaacagatatcaatctggatgaagatattttggatgattgactgtaatgctttccatttacctgactaaacagatcattattatatataggtattgattgctaccctgaccacagtgctttggactatgagaaacttcttagatttttatatgtaaatgctgtggaccactgggagcacaatgcccacatcatcttaagaagagtttatgtgcagcatttaaatcactgtgttttccttgttaactaaaacagacatgggctttgatttttttcatactattagaccatatctcataaaaccttttgaattaaaaaaaaaaaaaaaaaaaaa

SEQ ID NO: 2459 - DNA, 8148 bp, Homo Sapiens
  NM_004774
gcgaattttgggaagttccgttggggaagatggcggcggcctcgagcacccttctcttcttgccgccggggacttcagattgatccttcccgggaagagtagggactgctggtgccctgcgtcccgggatcccgagccaacttgtttcctccgttagtggtggggaagggcttatccttttgtggcggatctagcttctcctcgccttcaggatgaaagctcagggggaaaccgaggagtcagaaaagctgagtaagatgagttctctcctggaacggctccatgcaaaatttaaccaaaatagaccctggagtgaaaccattaagcttgtgcgtcaagtcatggagaagagggttgtgatgagttctggagggcatcaacatttggtcagctgtttggagacattgcagaaggctctcaaagtaacatctttaccagcaatgactgatcgtttggagtccatagcaagacagaatggactgggctctcatctcagtgccagtggcactgaatgttacatcacgtcagatatgttctatgtggaagtgcagttagatcctgcaggacagctttgtgatgtaaaagtggctcaccatggggagaatcctgtgagctgtccggagcttgtacagcagctaagggaaaaaaattttgatgaattttctaagcaccttaagggccttgttaatctgtataaccttccaggggacaacaaactgaagactaaaatgtacttggctctccaatccttagaacaagatctttctaaaatggcaattatgtactggaaagcaactaatgctggtcccttggataagattcttcatggaagtgttggctatctcacaccaaggagtgggggtcatttaatgaacctgaagtactatgtctctccttctgacctactggatgacaagactgcatctcccatcattttgcatgagaataatgtttctcgatctttgggcatgaatgcatcagtgacaattgaaggaacatctgctgtgtacaaactcccaattgcaccattaattatggggtcacatccagttgacaataaatggaccccttccttctcctcaatcaccagtgccaacagtgttgatcttcctgcctgtttcttcttgaaatttccccagccaatcccagtatctagagcatttgttcagaaactgcagaactgcacaggaattccattgtttgaaactcaaccaacttatgcacccctgtatgaactgatcactcagtttgagctatcaaaggaccctgaccccatacctttgaatcacaacatgagattttatgctgctcttcctggtcagcagcactgctatttcctcaacaaggatgctcctcttccagatggccgaagtctacagggaacccttgttagcaaaatcacctttcagcaccctggccgagttcctcttatcctaaatctgatcagacaccaagtggcctataacaccctcattggaagctgtgtcaaaagaactattctgaaagaagattctcctgggcttctccaatttgaagtgtgtcctctctcagagtctcgtttcagcgtatcttttcagcaccctgtgaatgactccctggtgtgtgtggtaatggatgtgcaggactcaacacatgtgagctgtaaactctacaaagggctgtcggatgcactgatctgcacagatgacttcattgccaaagttgttcaaagatgtatgtccatccctgtgacgatgagggctattcggaggaaagctgaaaccattcaagccgacaccccagcactgtccctcattgcagagacagttgaagacatggtgaaaaagaacctgcccccggctagcagcccagggtatggcatgaccacaggcaacaacccaatgagtggtaccactacaccaaccaacacctttccggggggtcccattaccaccttgtttaatatgagcatgagcatcaaagatcggcatgagtcggtgggccatggggaggacttcagcaaggtgtctcagaacccaattcttaccagtttgttgcaaatcacagggaacggggggtctaccattggctcgagtccgacccctcctcatcacacgccgccacctgtctcttcgatggccggcaacaccaagaaccacccgatgctcatgaaccttcttaaagataatcctgcccaggatttctcaaccctttatggaagcagccctttagaaaggcagaactcctcttccggctcaccccgcatggaaatatgctcggggagcaacaagaccaagaaaaagaagtcatcaagattaccacctgagaaaccaaagcaccagactgaagatgactttcagagggagctattttcaatggatgttgactcacagaaccctatctttgatgtcaacatgacagctgacacgctggatacgccacacatcactccagctccaagccagtgtagcactcccccaacaacttacccacaaccagtacctcacccccaacccagtattcaaaggatggtccgactatccagttcagacagcattggcccagatgtaactgacatcctttcagacattgcagaagaagcttctaaacttcccagcactagtgatgattgcccagccattggcacccctcttcgagattcttcaagctctgggcattctcagagtaccctgtttgactctgatgtctttcaaactaacaataatgaaaatccatacactgatccagctgatcttattgcagatgctgctggaagccccagtagtgactctcctaccaatcatttttttcatgatggagtagatttcaatcctgatttattgaacagccagagccaaagtggttttggagaagaatattttgatgaaagcagccaaagtggggataatgatgatttcaaaggatttgcatctcaggcactaaatactttgggggtgccaatgcttggaggtgataatggggagaccaagtttaagggcaataaccaagccgacacagttgatttcagtattatttcagtagccggcaaagctttagctcctgcagatcttatggagcatcacagtggtagtcagggtcctttactgaccactggggacttagggaaagaaaagactcaaaagagggtaaaggaaggcaatggcaccagtaatagtactctctcggggcccggattagacagcaaaccagggaagcgcagtcggaccccttctaatgatgggaaaagcaaagataagcctccaaagcggaagaaggcagacactgagggaaagtctccatctcatagttcttctaacagaccttttaccccacctaccagtacaggtggatctaaatcgccaggcagtgcaggaagatctcagactcccccaggtgttgccacaccacccattcccaaaatcactattcagattcctaagggaacagtgatggtgggcaagccttcctctcacagtcagtataccagcagtggttctgtgtcttcctcaggcagcaaaagccaccatagccattcttcctcctcttcctcatctgcttccacctcagggaagatgaaaagcagtaaatcagaaggttcatcaagttccaagttaagtagcagtatgtattctagccaggggtcttctggatctagccagtccaaaaattcatcccagtctggggggaagccaggctcctctcccataaccaagcatggactgagcagtggctctagcagcaccaagatgaaacctcaaggaaagccatcatcacttatgaatccttctttaagtaaaccaaacatatccccttctcattcaaggccacctggaggctctgacaagcttgcctctccaatgaagcctgttcctggaactcctccatcctctaaagccaagtcccctatcagttcaggttctggtggttctcatatgtctggaactagttcaagctctggcatgaagtcatcttcagggttaggatcctcaggctcgttgtcccagaaaactcccccatcatctaattcctgtacggcatcttcctcctccttttcctcaagtggctcttccatgtcatcctctcagaaccagcatgggagttctaaaggaaaatctcccagcagaaacaagaagccgtccttgacagctgtcatagataaactgaagcatggggttgtcaccagtggccctgggggtgaagacccactggacggccagatgggggtgagcacaaattcttccagccatcctatgtcctccaaacataacatgtcaggaggagagtttcagggcaagcgtgagaaaagtgataaagacaaatcaaaggtttccacctccgggagttcagtggattcttctaagaagacctcagagtcaaaaaatgtggggagcacaggtgtggcaaaaattatcatcagtaagcatgatggaggctcccctagcattaaagccaaagtgactttgcagaaacctggggaaagtagtggagaagggcttaggcctcaaatggcttcttctaaaaactatggctctccactcatcagtggttccactccaaagcatgagcgtggctctcccagccatagtaagtcaccagcatataccccccagaatctggacagtgaaagtgagtcaggctcctccatagcagagaaatcttatcagaatagtcccagctcagacgatggtatccgaccacttccagaatacagcacagagaaacataagaagcacaaaaaggaaaagaagaaagtaaaagacaaagatagggaccgagaccgggacaaagaccgagacaagaaaaaatctcatagcatcaagccagagagttggtccaaatcacccatctcttcagaccagtccttgtctatgacaagtaacacaatcttatctgcagacagaccctcaaggctcagcccagactttatgattggggaggaagatgatgatcttatggatgtggccctgattgggaattaggaaccttatttcctaaaagaaacagggccagaggaaaaaaaactattgataagtttataggcaaaccaccataaggggtgagtcagacaggtctgatttggttaagaatcctaaatggcatggctttgacatcaagctgggtgaattagaaaggcatatccagaccctattaaagaaaccacagggtttgattctggttaccaggaagtcttctttgttcctgtgccagaaagaaagttaaaatacttgcttaagaaagggaggggggtgggaggggtgtagggagagggaagggagggaaacagttttgtgggaaatattcatatatattttcttctccctttttccatttttaggccatgttttaaactcattttagtgcatgtatatgaagggctgggcagaaaatgaaaaagcaatacattccttgatgcatttgcatgaaggttgttcaactttgtttgaggtagttgtccgtttgagtcatgggcaaatgaaggactttggtcattttggacacttaagtaatgtttggtgtctgtttcttaggagtgactgggggagggaagattattttagctatttatttgtaatattttaaccctttatctgtttgtttttatacagtgtttcgttctaaatctatgaggtttagggttcaaaatgatggaaggccgaagagcaaggcttatatggtggtagggagcttatagcttgtgctaatactgtagcatcaagcccaagcaaattagtcagagcccgcctttagagttaaatataatagaaaaaccaaaatgatatttttattttaggagggtttaaatagggttcagagatcataggaatattaggagttacctctctgtggaggtattgacttgtaatctcattttcctttcaaaaaaaaaaaaaaaagctaaggtggcttgttgggatgtaaacatgttttcagatgcagtaaggtttagtgtaggacagccttcctgacccagtggcatgaaaaccattacaggattaatagttctcctacttccacaatgtgccaaaagtctgcatcccagcattttgtttgcaggagaactgatgccattcctaagagctggactcactgtttctcttcatcacaaggagaaggagtccaaactttaatcactccactgtatgctccctgagataaaacagtaaaaaatccgcagccatagttcacttaaaacaatttcaagctcacttttgaagtaatgggggcctggaatgctaggtgagcatgaagataaacccttgctactatgtagcaacccaattggacctttttggagaaataggtctgagtctggattctgggggacatcaataagagcccttcacataaaaatatagaaatccaggagactgtttcgagtgcaacagaagttctcagtatttggagggtcctctcaaaaattctgcggccttactttgatattgacacctgcactgtgccattcctgattattccattcaggatctgtatcagcgggatggggcatggtccccagcacaactcttctgggttaaaaaaaaaaagccaggtgattcctttgtgtgttatgtcgtaagtggagtgacttcatcatatatggaagaagatttctatattcagctttttctgcaggttggagtcagcatagagttggaaaatcagctttggctttctttcctgtctcatttcctctagtgttctcctttttattgtcatcagctctcaacaactctgccacttttgtgtcccaaggtaataagatgtaggaaacaaaacattgtaaagtggagcaagaaaagttatcaattaaccacatcagagtcaaatgtcttgggtgacactaaggaggatatgggcaggtgataccagagtgctttatcttgtgatgttgatacagtagcagcctctcagacattcagccaggttggatttctcatgagtttgtcacctagttttgaatcctatcccgttggtttctgcaggaaaaaaaaaaaaatttatgtggtttttaaaatttgttctgagtggggagaatcttagggggaatgtactgaatagtatcatgggctcagctcccccatgcagggccaacaaataccaaaatgagtaaactgggaagcttttctctctttctgtcttcatcccagatcaaagaatcccgagttaggatctggatgaaggataagcccctgaattgtcgatgggctcacccccacactgacccagcatctgaacttgcttaacagggagccggggctaaactgcttcaccctgcctgagaaccagggagcactgcatttctccacagggtggaggagaagaggcagaataaaccaagcctgggacacctccctcctgtctaggtgtactcattcttctgtttcaaaagaaggcaaggacatgaagtcaacttctacctatcttctgctgctggtgtcttatgtattctcagtttgacctgattcctcttctgtcttttgacttaacattaggggttcttggtcataacctgctctgatgtacataaagatttcaggttcaatatcaatgtgtcttaaaacagaagtattttagcgggtggggggtggggtggtggggacaaacaacgcaggatataattgccaaaaccaggcttgaggttggtgactcttgaaagattttctttcttcaggcctagatcagaaaattaagtgcagcaatatcatgaattctcagaagccctttcagggagccagtgagtcatacagtatccacagttgagtcacttaaagatgtcagtatacgaaacattattcacaatccttgggcaatctcatttttttttccttctcccctcctcccctgccccccatacatttctatccttgagttagttttggaggggcaggaagtacttaacatctcagaagctagattgggaaacatgctcagctataagaactgagctttaaattttgagtttaaaaatgtacatcaggagcagctggggagggtctttttttaaaaaaatctttcaaatttggttttctgtgcatatggccgttttgtaaatactttggggtttttcatttttttgaaagtagatgaaatctgttgtgggatttttttcccgaaacattacaaaataacctgtttatttacatgcaaataaacttctttgataaaaagtaa

SEQ ID NO: 2460 - DNA, 4743 bp, Homo Sapiens
  NM_004776
cgcttcatgtggcccggcccgcgacggccggcggctgggagcggcgaggcggcggcggcggcgagtggcggcccgcgaggcccgggaggcggtggccgaggcccaggcggtggcggcggcggcccaggaggcggcggacggggagctgcgggagcaggcccggcctggctctctagcggccgcctggctgcagcatgcgcgcccgccgggggctgctgcggctgccgcgccgctcgctgctcgccgcgctcttcttcttttctctctcgtcctcgctgctgtacttcgtctatgtggcgcccggcatagtgaacacctacctcttcatgatgcaagcccaaggcattctgatccgggacaacgtgagaacaatcggtgctcaggtttatgagcaggtgcttcggagtgcttatgccaagaggaacagcagtgtaaatgactcagattatcctcttgacttgaaccacagtgaaaccttcctgcaaactacaacatttcttcctgaagacttcacctactttgcaaaccatacctgccctgaaagactcccttccatgaagggcccaatagacataaacatgagtgaaattggaatggattacattcatgaactcttctccaaagacccaaccatcaagctcggaggtcactggaagccttctgattgcatgcctcggtggaaggtggcgatccttatccccttccggaaccgccacgagcacctcccagtcctgttcagacacctgcttcccatgctccagcgccagcgcttgcagtttgcattttatgtggttgaacaagttggtacccaaccctttaatcgagccatgcttttcaacgttggctttcaagaggcaatgaaagacttggattgggactgtttgatttttcatgatgtagatcacataccggaaagtgatcgcaactattatggatgtggacagatgccgaggcattttgcaaccaaattggataagtatatgtatctgcttccttataccgagttctttggcggagtgagtggcttaacagtggaacaatttcggaaaatcaatggctttcctaatgctttctggggttggggtggagaagatgacgacctctggaacagagtacagaatgcaggctattctgtgagccggccagagggtgacacaggaaagtacaagtccattcctcatcaccatcgaggagaagtccagtttcttggaaggtatgctctgctgaggaagtcaaaagaacggcaagggctggatggcctcaacaacctgaactactttgcaaacatcacatacgacgccttgtataaaaacataactgtcaacctgacacccgagctggctcaggtgaacgagtactgagaggagagaatgtacgtttgctttacccaccgccaccaagaaagcagtccgatgagatttttttttggaggggggagggtctacacagcaagagaacagaaatactgtgtctcatgaaggatcacagagttcagggggaaaatgtgacagcacacgcacaaacgccttcactggatcagccgctggaactgagggagtgagcttggggacttccttcgtcagcactggctttctgttttcacaagacagacgtctgtcccgctgctctctccccatctcctaccccacatcctgtcttagccgcagtctccagaacccatgatgaactgtgatctgccgtggtcctgccgtggtcctgccgtggagcctgtccctacacatgaccttggagcctcttggccttcagagcagaggcaaacccaccacagggcagctgcgttttaggaagagcaaatgaaactccacaccattcttctagatctctggtgttctctttggtttcatttttttaaaaaattaccttctttgggtggggattgagggtggaggggagggtgtttgggaaagataaatagacataaatatataacaatcacttcttgaagaagtataattgtaaataagccatgtaaaatgcctttttaaaatttaattttctagctggctccaattcaaattgaggatttatgtattaggccacttacttggttggcaagtgcaggaactcagttaaaatgcagttgaagaatgtcatctcccgaattgctgtcactttggcgagggagtggatatagggcatgtcacaaaagaacaaaataacccgacctttattgctgggagctggcttctgtccctttcttcccccccccacgagtcttgcccttgacttctgctctggattcactcttccctgtcggccgcgcatgtgctcatcccactctccgctaagcgggaggctgctgttagagcaggctgcttcctgcctaaagcaggcccttcggggctcgctgcacacacatctctggctctccaggcttcgtgttctgtcttttcatcagcatggcggggcggggggcggggggcgggggtgtgtatgggaatccctccccctcttactttttctcttgtggaacttggccacagtttctgaacaatgtgcctacattaccagctggcttcagtgattcctctgtgtccctttttggtttctggaaagattctttgtcaacattagtaactgatacatagaaccaaggagcactcaaatagggagccaggagccagggagctggtgacacttgtgtgctgtggggcagctgggatccaggtaagaccggattgaagctttgaaattagactaacaaagctccagacagcaagagcccaggtgcactgctcacacccccacctgcattttgaagtcatattattttttgttttgttttttaagacggtctggctctgtcgcctaagctggagtgtggtggcacgatcacagctcactgcagcctccatctcctaggctcaagccattttcccacctcagcctcccgagtagctgggactacaggtgcacaccaccacacctggctaattttttgtatttttagtagagacaggggtttcttccatgttgcccaggctggtctcgaactcctggactcaagcaatccgcccaccttgacttcccaaagtgctgggattatgggcgggtgtgagccattgcgcccagccttgaagtcatgttctaaattgtatttgaatttgtgcctctttgtttttccccaaaccaaagccctcaaattgtagtctctgtcggcttctgcagaattctggaaaatgccagttttcctcccccgcccttgttttccataaaacatatttatatattgtgatgaggagtactttctgaagagtacttcgtatttttttttaattgccttgtttgccttcaacttccttgattttcatagtttacatgggtgtgtgtaggggtgtgtgtgtgtatgtgtgtgggttagggcttttttcgttgcatgtgatggttctgtggacatatgatccccacaaactgtgggagtgattggccaggccttgttttgtttgtttgtttgtttgtgtttttgttcttttgaagaatagagtggtatttagaaaataaattgcattgcaaagctcttatcggctcatatgagagagcaggttcctgcccttgaaaatgccggtaagctatagcatatgttttttaagacttaagcatttcatgctttaaaataccttcacaagtgaacattacacacagaagttcatttggttttcctttgttttatggtgcatatagcaataaagacccccctccaccctgcaacccccatcccccaccgggcctttgtccctgccttggcttttctccccttctcattctcctctcccctttcctcactgaaggctgtgagttgctttcaatgtgacaacactatgatgtcatttggaaggatttgccaggacagactgattctgagtcctgggtgccgtatgtgtatgcggcagtgttgtcaggcgatcttgtttgaagctctatgttgccataattaccatcaagtacacactgttggcaaaaggctaacacctgactttagaaaatgctgatttgagaacaaaaggaaaggtcttttttcactgcttaaagtggggtcactttgatacctttgcggtcatgtctgtgtctgatgagtgtagaatctctggatgtgcactgtcagtcatgtgtccaccaggcctcgaatatcatatgggaaatgtcatagttaaaaacgtacagccaggcccgtgtgctgttaatagtgtgaaattgtcatgttaaaaaaaaaaacaggaaccaaatgtgaccttgtgcatatattggtagctgaaaatcttcaaggctactgatgggtggccccttaatcttgtctttgattgctgtgtgcagggaaaggtgtccccgtttgttcatgctgttttggggggtgggggggtatttgcaagaatactcattttgacataataggtcctcttgtcagagatcctctaccacagacattaatagctgagcaggagccacatggattgattgtatccactcaccattgacgatggcattgagcgtagctagcttatttccatcactacgtgtttttgagcttgctcttacgttttaagaggtgccaggggtacatttttgcactgaaatctaaagatgttttaaaaaacacttttcacaaaaatagtcctttgtcattacattatttactcatgtgtttgtacatttttgtatgttaatttatgaatgattttttcagtaaaaaatacatattcaagaaccaaaaaaaaaaaaaaaaaa

SEQ ID NO: 2461 - DNA, 2910 bp, Homo Sapiens
  NM_004778
cagcctccctctcccacctctgtctgcccgctgcctcttgtctagctgctgtcaggagctgactgcctccagggctggaatcctgtgctccctctgtgcccagagccccacgatgtcggccaacgccacactgaagccactctgccccatcctggagcagatgagccgtctccagagccacagcaacaccagcatccgctacatcgaccacgcggccgtgctgctgcacgggctggcctcgctgctgggcctggtggagaatggagtcatcctcttcgtggtgggctgccgcatgcgccagaccgtggtcaccacctgggtgctgcacctggcgctgtccgacctgttggcctctgcttccctgcccttcttcacctacttcttggccgtgggccactcgtgggagctgggcaccaccttctgcaaactgcactcctccatcttctttctcaacatgttcgccagcggcttcctgctcagcgccatcagcctggaccgctgcctgcaggtggtgcggccggtgtgggcgcagaaccaccgcaccgtggccgcggcgcacaaagtctgcctggtgctttgggcactagcggtgctcaacacggtgccctatttcgtgttccgggacaccatctcgcggctggacgggcgcattatgtgctactacaatgtgctgctcctgaacccggggcctgaccgcgatgccacgtgcaactcgcggcaggtggccctggccgtcagcaagttcctgctggccttcctggtgccgctggcgatcatcgcctcgagccacgcggccgtgagcctgcggttgcagcaccgcggccgccggcggccaggccgcttcgtgcgcctggtggcggccgtcgtggccgccttcgcgctctgctgggggccctaccacgtgttcagcctgctggaggcgcgggcgcacgcaaacccggggctgcggccgctcgtgtggcgcgggctgcccttcgtcaccagcctggccttcttcaacagcgtggccaacccggtgctctacgtgctcacctgccccgacatgctgcgcaagctgcggcgctcgctgcgcacggtgctggagagcgtgctggtggacgacagcgagctgggtggcgcgggaagcagccgccgccgccgcacctcctccaccgcccgctcggcctcccctttagctctctgcagccgcccggaggaaccgcggggccccgcgcgtctcctcggctggctgctgggcagctgcgcagcgtccccgcagacgggccccctgaaccgggcgctgagcagcacctcgagttagaacccggcccacgtagggcggcactcacacgcgaaagtatcaccagggtgccgcggttcaattcgatatccggactcctgccgcagtgatcaaagtccgaggggcgggacccaggcacctgcattttaaagcgccccgggagactctgaatctttttcagaaacagtgagttaaagcagtgcttctcaaaccttgatgtgcctgtgaatcacctaggggtcttgttaagtgcagtctgatccaggaggccggggccgggtactgagagtctgcacttaacaagctcccaggccgagaagccagtgcggcaggttcacaggcgaggcctggagtaacacaaagtgaaactcataatagacttcccactctagggcagtggagtcggaagggcacacggggtgcgtctccccggagttcagttttaccagatgatgggggaggggggaaggagttttatgttaaaccatccatgtatttttggagaagagagaggaaaggtttgagaagcactgttccagcctgccctcttcatttagccaatgcttactgcgctagacgcttcatcccacaatcttaaggggcagcttctattagccagtctttacagctgagcacattctggctcagggaggttaagtgacttgcccagtttcagggctaacgaccacagggtctgcactctaaccctaggcatcacatgctcaatgactctctggtgagcgaggacattctctgacctactcgagggacttaagatgctaccttgtgacccagcactgcccaaagtgcttccaaggcagaagcagcaggggatggcgtggtcaagcactcgggaaacctggggctaatcaaatccaatgggggaaatgactaaaagtcttcggtcgttagaagttgaatgggcacagcaactctaagactacagcacacgtcatttcttagctaagcggaccagcctccctgtcggcctggtgttctgtgggatccctctgggcactggtaatcccaagatctgtgcagccccgcctccaggccacatggggctgggcagctaccatttcccttttgcggatgggaggggtaacttgcacctctgacctatcacttccactgcaccccgtctcattcctccacctgccgtggacttggggtcagagactgctgtgtttgagctctgcagcccagggaccgaaaagttggtgtcaatgaattttgcttggtggatgaaatgtcagtggaagaagcagatgagaaactcttgagatcttggtcctgtgttttttctgccaccaaaggccagggtcactgaaggcctggcccacagcaggtgctgagcaaagggaacagtgaggtgcccagctagctgcagagccaccctgtgttgacacctcgcccctgctccctcccatcccttccccctttactcatagcacttcccccattggacacgtggtgcattttgcttgtttattatgttttctctccatcagaatgaaagctcctcgagggcagggactttggtctattgtctgtatttgccggtgcctaggattgtgcctgtatgcaacaggcactcaataaatatttttgctgtagactggacaggcatg

SEQ ID NO: 2462 - DNA, 2225 bp, Homo Sapiens
  NM_004781
agtgacgtctttgccccgcgccgcgccgtcccacccatctccctggcctccggtcccaacttcgcttctctgctgaccctctctcgtcgccgctgccgccgccgcagctgccaaaatgtctacaggtccaactgctgccactggcagtaatcgaagacttcagcagacacaaaatcaagtagatgaggtggtggacataatgcgagttaacgtggacaaggttctggaaagagaccagaagctctctgagttagacgaccgtgcagacgcactgcaggcaggcgcttctcaatttgaaacgagcgcagccaagttgaagaggaaatattggtggaagaattgcaagatgtgggcaatcgggattactgttctggttatcttcatcatcatcatcatcgtgtgggttgtctcttcatgaagaaccagcggaactcaaaactgctgttcaagaaacctcttcaagacttttgacttagaacctgctatattatcaagcttacctactgttatctctaaaattttttttgtgttaatgtaaagttgaatttctaggaaacgtgcctttgttttttaatatgcactccaaattagaaggccggccccgtccacattttgcacagtgcctttacagatttacgtatgggctgatgaagaggccttcttaagttccagagtgctataatctagatgtaatgttgtcactaattaattgccattactcccagttagttacccttgtcatttggcattattttcagaaccacattttaaacctttgggtaatcagatttccaacttatgccttccagaaaaaaacactactgcctaacacaaatctgtgataacaacaggctgtgccttattttgataattttctgattccctagaagagaaccctctactttttgtaagcactactgactctcgctgtatttaagatgctggtgaagagcttttgctcttgcattagatttgaagatgtttacattgttgttattgttatgtatcacttgctaaaaatattgttttaatcagagataacctctttaaaaaaatttttaaagaactatggctatgaccaaagcttctattttgccaaaaagttaaataccgataaaatggccttaagtgtattcctgacagttaaattcagaaacgtgccaaatggaactcaaggtgccccttcagaattaaaatcattaccttgtgtgtgaaccttctacatcttcataggcctttcttccttttgaaaggctgtagacagtgtggctccccttctgattcagtattttgcatgggggttagagaaggtttgaggtagactctgaccgtctcataaaagagttctacccagcagttggcagattatcagctgtggactccagcatgtttctgataattatgcaagcaacaattctgtagcctcaagtaagaccacctgtgaacttgatcattatctggcccaaatatgaagataaactataactttggagtttgtttcctatttgtattcacattctgcttcctaaatcagttttctaaattatgcctgcaattaggcattggtcaggggtgaatggctcttttcacagagagtagccaaccagagacctttgctttgatatcatcaactgcagagaatgctgttgatgggaatgctggaagcagaaactttgtcatcggaaaaacttttcttgtatgcatgagactcaacatcaggatccacagcttaaagatgggaattcaggtatgaaagaaaacaggcaaggaggcactgagggagaaagacacagactttatcgctctgtggctcattgttactggaatattctaaaactcttgttcacatgctattatgacttataaagcagcaacagctgaggcgcaccaggacacagcttccatttctttaacgtctgttcccttaacatcgctgaaatgatttactgttgaagagatgccttgcggtgtggccagctgtgaggagaaagcagctggcagtgttaggacattagtccaccttcagcgcagggtctctggccgggtctgactcagaaaccttggtactcgccccttggccacagtgcccagacccatgtaacccactggctcctgcattaacccagaaatacctcgcttctatctgtgcacttagctgggaacttacccactgtaatcacctaaataaagtgtttataaacatgaaaaaaaaaaaaaaaaaaaaa

SEQ ID NO: 2463 - DNA, 3111 bp, Homo Sapiens
  NM_004793
gcgagttgtgtgagccgccagtatggccgggctatggcggcgagcactggctacgtgcgactgtggggagcggcgcggtgctgggtgctgcggcggccgatgctggccgccgccggggggcgggttcccactgcagcaggagcgtggttgctccgaggccagcggacctgcgacgcctctcctccttgggcactgtggggccgaggcccggcaattgggggccaatggcgggggttttgggaagcgagcagccgcggcggaggcgcattctcggggggcgaggacgcctccgagggcggcgcggaggaaggagccggcggcgcggggggcagcgcgggcgccggggaaggcccggtcataacggcgctcacgcccatgacgatccccgatgtgtttccgcacctgccgctcatcgccatcacccgcaacccggtgttcccgcgctttatcaagattatcgaggttaaaaataagaagttggttgagctgctgagaaggaaagttcgtctcgcccagccttatgtcggcgtctttctaaagagagatgacagcaatgagtcggatgtggtcgagagcctggatgaaatctaccacacggggacgtttgcccagatccatgagatgcaggaccttggggacaagctgcgcatgatcgtcatgggacacagaagagtccatatcagcagacagctggaggtggagcccgaggagccggaggcggagaacaagcacaagccccgcaggaagtcaaagcggggcaagaaggaggcggaggacgagctgagcgccaggcacccggcggagctggcgatggagcccacccctgagctcccggctgaggtgctcatggtggaggtagagaacgttgtccacgaggacttccaggtcacggaggaggtgaaagccctgactgcagagatcgtgaagaccatccgggacatcattgccttgaaccctctctacagggagtcagtgctgcagatgatgcaggctggccagcgggtggtggacaaccccatctacctgagcgacatgggcgccgcgctcaccggggccgagtcccatgagctgcaggacgtcctggaagagaccaatattcctaagcggctgtacaaggccctctccctgctgaagaaggaatttgaactgagcaagctgcagcagcgcctggggcgggaggtggaggagaagatcaagcagacccaccgtaagtacctgctgcaggagcagctaaagatcatcaagaaggagctgggcctggagaaggacgacaaggatgccatcgaggagaagttccgggagcgcctgaaggagctcgtggtccccaagcacgtcatggatgttgtggacgaggagctgagcaagctgggcctgctggacaaccactcctcggagttcaatgtcacccgcaactacctagactggctcacgtccatcccttggggcaagtacagcaacgagaacctggacctggcgcgggcacaggcagtgctggaggaagaccactacggcatggaggacgtcaagaaacgcatcctggagttcattgccgttagccagctccgcggctccacccagggcaagatcctctgcttctatggcccccctggcgtgggtaagaccagcattgctcgctccatcgcccgcgccctgaaccgagagtacttccgcttcagcgtcgggggcatgactgacgtggctgagatcaagggccacaggcggacctacgtgggcgccatgcccgggaagatcatccagtgtttgaagaagaccaagacggagaaccccctgatcctcatcgacgaggtggacaagatcggccgaggctaccagggggacccgtcgtcggcactgctggagctgctggacccagagcagaatgccaacttcctggaccactacctggacgtgcccgtggacttgtccaaggtgctgttcatctgcacggccaacgtcacggacaccatccccgagccgctgcgagaccgtatggagatgatcaacgtgtcgggctacgtggcccaggagaagctggccattgcggagcgctacctggtgccccaggctcgcgccctgtgtggcttggatgagagcaaggccaagctgtcatcggacgtgctgacgctgctcatcaagcagtactgccgcgagagcggtgtccgcaacctgcagaagcaagtggagaaggtgttacggaaatcggcctacaagattgtcagcggcgaggccgagtccgtggaggtgacgcccgagaacctgcaggacttcgtggggaagcccgtgttcaccgtggagcgcatgtatgacgtgacaccgcccggcgtggtcatggggctggcctggaccgcaatgggaggctccacgctgtttgtggagacatccctgagacggccacaggacaaggatgccaagggtgacaaggatggcagcctggaggtgacaggccagctgggggaggtgatgaaggagagcgcccgcatagcctacaccttcgccagagccttcctcatgcagcacgcccccgccaatgactacctggtgacctcacacatccacctgcatgtgcccgagggcgccacccccaaggacggcccaagcgcaggctgcaccatcgtcacggccctgctgtccctggccatgggcaggcctgtccggcagaatctggccatgactggcgaagtctccctcacgggcaagatcctgcctgttggtggcatcaaggagaagaccattgcggccaagcgcgcaggggtgacgtgcatcgtcctgccagccgagaacaagaaggacttctacgacctggcagccttcatcaccgagggcctggaggtgcacttcgtggaacactaccgggagatcttcgacatcgccttcccggacgagcaggcagaggcgctggccgtggaacggtgacggccaccccgggactgcaggcggcggatgtcaggccctgtctgggccagaactgagcgctgtggggagcgcgcccggacctggcagtggagccaccgagcgagcagctcggtccagtgacccagatcccagggacctcagtcggcttaatcagagtgtggcatagaagctatttaatgattaaagtcatttgcagta

SEQ ID NO: 2464 - DNA, 1128 bp, Homo Sapiens
  NM_004794
cctcctctccctggcttttgtgttggtgcctccgagctgcaaggagggtgcgctggaggaggaggaggggggcccggagtgagaggcacccccttcacgcgcgcgcgcgcacacggtgccggcgcacgcacacacgggcggacacacacacacgcgcgcacacacacacgcacagagctcgctcgcctcgagcgcacgaacgtggacgttctctttgtgtggagccctcaaggggggttggggccccggttcggtccgggggagatggcgcagcccatcctgggccatgggagcctgcagcccgcctcggccgctggcctggcgtccctggagctcgactcgtcgctggaccagtacgtgcagattcgcatcttcaaaataatcgtgattggggactccaacgtgggcaagacctgcctgaccttccgcttctgcgggggtaccttcccagacaagactgaagccaccatcggcgtggacttcagggagaagaccgtggaaatcgagggcgagaagatcaaggttcaggtgtgggacacagcaggtcaggaacgtttccgcaaaagcatggtcgagcattactaccgcaacgtacatgccgtggtcttcgtctatgacgtcaccaagatgacatctttcaccaacctcaaaatgtggatccaagaatgcaatgggcatgctgtgcccccactagtccccaaagtgcttgtgggcaacaagtgtgacttgagggaacagatccaggtgccctccaacttagccctgaaatttgctgatgcccacaacatgctcttgtttgagacatcggccaaggaccccaaagagagccagaacgtggagtcgattttcatgtgcttggcttgccgattgaaggcccagaaatccctgctgtatcgtgatgctgagaggcagcaggggaaggtgcagaaactggagttcccacaggaagctaacagtaaaacttcctgtccttgttgaaaccaaacgatataaatacaagataaattatcactggagttttttctttcccttttttctgtgcctgcataatgctgacacctgcttgtttccatacaaattgatatcaaaataaaatttgtatagattaaaaaaaaaaaaaaaaaaaaa

SEQ ID NO: 2465 - DNA, 6135 bp, Homo Sapiens
  NM_004798
actgtctctccccatccggggcagcggggaatggctgagccaggggttcgccgcccccgccgccgccgccgccgccgccgccgccgccgccgcccgctttcggctcgggcctcaggaccgtagcatcctgagacattttgaattgacacttctcaagatttgactggatcagagttcatcatgtcaaagttgaaaagctcagagtcagtcagggtggtggttcgctgtcggcccatgaatggcaaggaaaaggctgcttcgtatgacaaagtggtggatgtggatgttaagctggggcaggtgtctgtgaagaaccccaaagggacggcccatgaaatgcccaagaccttcacctttgatgccgtctatgactggaatgccaagcagtttgaactgtacgatgagacgttccgaccacttgttgactctgtcctgcaaggtttcaatggaaccatttttgcctatggacaaactgggacaggaaaaacctacaccatggaaggaatccgtggtgaccctgaaaaaagaggagtcattcctaactcatttgaccatatcttcacccacatctctcgatcccagaatcaacaatacctggtcagggcttcttacttagagatctaccaggaggagatccgagatttgctctcaaaggatcagaccaaaaggcttgagctcaaagagaggcctgacacaggagtgtatgtgaaagacctgtcttcctttgtcaccaagagtgtgaaggagatagagcatgtgatgaatgtggggaaccagaaccgttctgtcggtgctaccaacatgaacgagcacagctcgcgttctcatgcaattttcgttatcactattgagtgcagcgaggtgggcctcgatggtgaaaaccacatccgtgtaggaaaattgaaccttgtagatcttgctggcagcgaacggcaagccaagaccggcgcacaaggggagagattaaaagaagctaccaagatcaacctctccctttccgctttgggtaatgtcatctctgctctagtggacggcaaaagcactcacattccatatcgggactcaaagcttaccaggctcctccaagattcccttggtggcaatgccaagactgtgatggtggccaacgtggggcctgcctcttacaacgtagaagagactctgaccactctgcgatatgccaaccgtgccaaaaacattaagaacaaaccaagggtcaatgaggaccccaaggatgccctccttcgagaattccaggaagagattgctcggctcaaggcccagctggaaaaacggtccattggtaggaggaagaggcgagagaagcggagggaaggtggtggcagtggtgggggtggggaagaggaggaggaggagggagaagagggtgaggaggaaggggatgataaggatgattactggcgggaacagcaagaaaaactggagattgagaagcgggccattgtagaggatcacagcttggttgcagaggagaagatgaggctgctgaaggagaaagagaaaaagatggaggacctgcggcgggagaaggatgctgccgagatgctgggcgccaagatcaaggccatggagagtaagttgcttgttggaggaaaaaatatagtagatcatacgaatgaacagcagaaaatcctggagcagaaacgacaggaaattgcagagcagaaacgtcgagaaagagaaatccagcaacagatggaaagtcgagatgaggagaccttggaacttaaagagacatacagctcattgcagcaagaggtggacatcaagaccaaaaaactcaaaaagctcttctccaagcttcaggcagtgaaggctgagatccatgacctccaagaagaacacatcaaggagcgccaagagctagagcagactcagaatgagctcaccagggagctgaaactcaagcatcttattatagaaaactttatccctctggaagaaaaaagtaaaattatgaatagagccttctttgatgaagaggaagatcattggaaactacatcctataaccagactggagaaccagcagatgatgaagcggccagtctcagccgtgggatataagagaccattgagccagcacgcaagaatgtccatgatgattcgtccagaggcccgatatagggcagaaaacattgtgctgttagagctggacatgcccagccggaccaccagagactatgagggtccagccattgcccccaaggtccaggctgcattggatgcggctctgcaggatgaagatgagatacaggtggatgcatcatcatttgaaagcactgcaaataagaaatccaaggccaggcctaaaagtggaaggaagtcgggatcctcctcctcttcctcaggaacccctgcatctcagctttatccacagtctcgggggctggttccaaagtaaagccagcttctcctctcccagggcggaaacagcatttgccttctgagagaagagactagcaaaaagctgcagagaggattcggcccaaactcagaactgttcccctgaggagaagcggtggcctctttgcagatcaaccaacttaatctggttgaacgtgctgttcctaatctggcactcagcccctctgggaaacatcttttaattagcatctcagaaatgcatgggtaaggtaaagtgcgatagttcaagtggaaagcaagagaatgaccagtgaccttgcttccttcccccttgccttcttctcccccttcccctgtgctccctttctctcctctctccttttctagcctgttctttacatggggctcccttcttgttgaacaatagggcagaatcaggagtcaccttagcaggaccacatctttggagcctcgggataaaatgacagtgaggttgaaaagtgaaaaccctagaacttgaataggtgcctgttcttgtagggagaaatgagaaatcgcatttggatccaggccccaggtgggcaccatcagcagtcttgcttccatgcacctcagtaagaagtggatctgcctttgggacctgctcagtgaggaaatctcttccaatttctgcttctgaatgattcaatgttgggagcaatagaaataacattccctttgccttctctgagtgtttagggaaatagcttctttaaaacctcaaaaccatgaccatcctgtcaaagacctaagtctgtaagctggtgccatgtccatacaccatgtcactttactcttcatttgtcaccatcttttcccatgcacgcatactctgaacatccttgtgtgggcccatcctctgcatccagagcatgctctgcagtgggcctgttttgtggaagaaaggaggctgtctctgccttctctgatgggactggagttgagggaaggagctgtattgtggcacttctgaattccccgttttgttccatattggtatagagagcagaagagtagctaggcagatgcagagatggagacatgagactcagtgcagtgggcagggaagacataacagatggaagcaaaggaatcctgcctgccttcagcagagaattcaccgaatcctagaactgtggctccctccaggcagagcctaagatgctggtgaagaatagctgtgtgattgaataggctcaaaggagagttcagaattcccatttacatattactagtttggtttgtaagttttagttccttgtattattgagattcagagcttcattttatgttggtcattaggtgaatattactcattttccctcaagagaagctcataagtgtgtgtgggtgtgagagcacgatggtgcctgtgttctgtgaatgtgtccatatgtgtctgtaagagagacagagaccaagaacttgcccaattttagaaatacactaatgtgcagttgttgccttttgtctgtattgaaggcccattgaatgactaatccaggctggaagcattcccatgtgggtgtctgagtccatgagccaagcctgaggggacagtgagtctccaggtctgccacactggtgcaccttgctggcacggtgcctcaggaaggtggcgactcaggtgggccttgagttatattttaactcagctgctcagttcccagggcacatttctggatcagaacccatgggaaacaggaggtactaagtgcaatgtcttagcattctgcaaaatggagatctgttgtccagcggcttatctcctttttagtaacccttctttctgaacccagggcccttttcagccttccctcatattttcttgagatcaaactttacttctttcttatttactaagaatttgcctgtttgaataagaacaaaacgctaaggtgggtagcctaagctgattttctgctggttacacgtgtctctcacaccacatttcctcaaagctaatctgaattctgtaggctaaaaatattcatgtagcaaatctgagaattgaaaactgcagataaccggccgggtatggtgactcatgcctgtaatcctagcactttgggaggccgaggtgggtggaccacctgaggttaggacttcaagaccagcctggccaacatggtgaaaccccatctgtactaaaaatacaaaaatttgcctggtgtggtggtgcatgcctctagtcctagctactcgggaggctgaggcacgagaatcacttgaacctgggaggcggaggttgcagtgagtcgagataacactactgcattccagcctgggtgacagagtgagactccccctcaaaaaaaaaaaaaaaaaaaaaaaaaacagaaagaaagaaaaagaaaactgcagataaccctatacattaatactggtatctcgaggtgactcttctgaccaagggtggttaagtgacacatagaacttttctaagagaagacagacaagttgacaggcatgccttgtactcagctgtgttcatgtggtggtctgtggaaagaaaagaagactcatttggaaatgaagctgtccctttccaagcagtctctggtgcttttcttctctcaaaatggatccgataaatatttgaatagagcagattgtagaatgtcgtgctgtcaccagaaagctgctgttttgggttctgcattgagccaaatatgtagaggacctaccaagcccactgagggactaggttttcatgtctctagtcatacctagaatgttctgagccgtctgagggccttcatgccggcagcagctagcaaagccagaaagcaagtctaacaggatctaagatgaccatcaggagaaggagtttgagactgtgtatgcaacccccaatagacccccttttactctgatctggagaatgtatctggcttcatattttcaagtcacatgtctctcagacccctggattcagaacccaaggccacaaatcataggcatgaagcactttcttaagactgacctaacgctggattatttcccgtccaatgcctgcatgctgcttgaattgctccacccacacctccatgaccaagggcgccagagtgctgcaactggggcgtgggccgctctctgcttttcctgtctgactctgacaagtcctccctcactgaatgtagaatcgttgccaagtttctgagaagtgtcgattccctgttaacatggatatcagttctgcctcacatttcccacttgaggttgaggcgtactggagacaacacctcagaccatctgaaccccatcagtggacgaaaatggggctgttaatatactctaaaagccatactaaaaatgctctgagggaactggctaagaatagtgggcctggtgattgtctatcacgcaaggctttgttttgtactgttcagaaatctgtcacctttctgcctgcccttgtttcctgaatgaaatgcttctggggttatttatgaaaggagtgatcctggggcaggcaggaggcagtgggcttcatggctccttgaagttattactgatcttgaccttctctttggctacctttagacaaagaatacgccaatcaatacttggggctctaagttttacaattgatatttatttgtatcatctctttgtctaggaatgtaaaagtgattctaaactaagatgtgtaataaaaatcaatcagatttattgtacctacaaaaaaaaaaaaaaaaaaaaaaaa

SEQ ID NO: 2466 - DNA, 2391 bp, Homo Sapiens
  NM_004800
cgcaaccggaactagccttctgggggccggcttggtttatctctggcggccttgtagtcgtctccgagactccccacccctccttccctcttgaccccctaggtttgattgccctttccccgaaacaactatcatgagcgcgaggctgccggtgttgtctccacctcggtggccgcggctgttgctgctgtcgctgctcctgctgggggcggttcctggcccgcgccggagcggcgctttctacctgcccggcctggcgcccgtcaacttctgcgacgaagaaaaaaagagcgacgagtgcaaggccgaaatagaactatttgtgaacagacttgattcagtggaatcagttcttccttatgaatacacagcgtttgatttttgccaagcatcagaaggaaagcgcccatctgaaaatcttggtcaggtactattcggggaaagaattgaaccttcaccatataagtttacgtttaataagaaggagacctgtaagcttgtttgtacaaaaacataccatacagagaaagctgaagacaaacaaaagttagaattcttgaaaaaaagcatgttattgaattatcaacatcactggattgtggataatatgcctgtaacgtggtgttacgatgttgaagatggtcagaggttctgtaatcctggatttcctattggctgttacattacagataaaggccatgcaaaagatgcctgtgttattagttcagatttccatgaaagagatacattttacatcttcaaccatgttgacatcaaaatatactatcatgttgttgaaactgggtccatgggagcaagattagtggctgctaaacttgaaccgaaaagcttcaaacatacccatatagataaaccagactgctcagggccccccatggacataagtaacaaggcttctggggagataaaaattgcctatacttactctgttagcttcgaggaagatgataagatcagatgggcgtctagatgggactatattctggagtctatgcctcatacccacattcagtggtttagcattatgaattccctggtcattgttctcttcttatctggaatggtagctatgattatgttacggacactgcacaaagatattgctagatataatcagatggactctacggaagatgcccaggaagaatttggctggaaacttgttcatggtgatatattccgtcctccaagaaaagggatgctgctatcagtctttctaggatccgggacacagattttaattatgacctttgtgactctatttttcgcttgcctgggatttttgtcacctgccaaccgaggagcgctgatgacgtgtgctgtggtcctgtgggtgctgctgggcacccctgcaggctatgttgctgccagattctataagtcctttggaggtgagaagtggaaaacaaatgttttattaacatcatttctttgtcctgggattgtatttgctgacttctttataatgaatctgatcctctggggagaaggatcttcagcagctattccttttgggacactggttgccatattggccctttggttctgcatatctgtgcctctgacgtttattggtgcatactttggttttaagaagaatgccattgaacacccagttcgaaccaatcagattccacgtcagattcctgaacagtcgttctacacgaagcccttgcctggtattatcatgggagggattttgccctttggctgcatctttatacaacttttcttcattctgaatagtatttggtcacaccagatgtattacatgtttggcttcctatttctggtgtttatcattttggttattacctgttctgaagcaactatacttctttgctatttccacctatgtgcagaggattatcattggcaatggcgttcattccttacgagtggctttactgcagtttatttcttaatctatgcagtacactacttcttttcaaaactgcagatcacgggaacagcaagcacaattctgtactttggttataccatgataatggttttgatcttctttctttttacaggaacaattggcttctttgcatgcttttggtttgttaccaaaatatacagtgtggtgaaggttgactgaagaagtccagtgtgtccagttaaaacagaaataaattaaactcttcatcaacaaagacctgtttttgtgactgccttgagttttatcagaattattggcctagtaatccttcagaaacaccgtaattctaaataaacctcttcccatacacctttcccccataagatctgtcttcaacactataaagcatttgtattgtgatttgattaagtatatatttggttgttctcaatgaagagcaaatttaaatattatgtgcatttgaa

SEQ ID NO: 2467 - DNA, 4053 bp, Homo Sapiens
  NM_004804
ggggagcgactacaactcccagagggtatggcggccgcagcagtgggcagttgagtttccggggcgacccaggtcctccggcggaagcgggagcctctgtcggccgcggaagcctggagtgggcggtacgcagacgcgcgcggtgagacccgctgtctgctcagcggactctgcccgcccccacctccccctgcgtcgggccgacatgaaggactcgctggtgctgctgggccgtgtcccggcgcacccggactcccgctgctggttcctggcctggaaccccgcggggaccctgctggcctcgtgcggcggcgaccggagaatccgcatctggggcacggagggtgacagctggatctgcaagtctgtcctttctgaaggccaccagcgcaccgtgcggaaggtagcctggtccccctgcggtaattacctggcctctgccagctttgatgctaccacttgcatttggaagaagaaccaggatgactttgagtgtgtaaccactctcgagggccatgaaaatgaggtcaagtcagtggcttgggccccatctggcaacctcctggccacttgcagccgagataagagcgtttgggtctgggaagttgatgaagaggatgagtatgaatgtgtcagtgttctcaactcccacacacaggatgtcaagcatgtggtttggcacccaagtcaggagctcttagcttctgccagctatgatgacacagtgaagctgtaccgggaggaagaggatgactgggtatgctgtgccacccttgagggccatgaatccactgtgtggagcttggcctttgacccgagtggccagcgcctggcgtcttgtagtgatgaccgtactgtgcgtatctggcgtcagtatctaccaggcaatgaacaaggggtggcatgcagcggctctgaccccagttggaaatgtatctgtactttgtccggcttccactcaaggaccatttatgacattgcttggtgtcagctgacaggggctctggccacagcttgtggggatgacgcgatccgcgtgtttcaggaggatcccaactcggatccacagcagcccaccttctccctgacagcccacttgcatcaggcccattcccaggatgtcaactgtgtggcctggaaccccaaggagccagggctactggcctcctgcagtgatgatggggaggtggccttctggaagtatcagcggcctgaaggcctctgagctacctcgactttggacagagtaatgactccccagaaaacgtcatataagactttaccagcccctgagaggaccaggaggagcatccttgaccttcatttaacttggctcacttctcttcagacttgggtagaagtgcagagccacagaattgctttccttccccgcctttgacatgaggccttcagtaaagagctacagaacatgagtacattgttataccacagatttttcttgcattagggcacagtgttaaattttttggaggtaaatatactatttataatcactatatatagtaggagggggtatgtgtctcaggcttttctgaagttgcaagacttaaagaaataatccatctgcatcccaagtcctattttataaggatattcataaaaattccatggtgaatccttgtctgaaataggtcctcccttcccagtttctgtgtaagtctttgcatttaagacatccaatcaataatgaaggaaatttttttctgaatgtaggtttgagtgaggggcacctctgctttcccttagcaaccctcatatacctccctgcaccgttacgctgtgatggcaactggggatagaaaaaaaatggggaaagacaggaatcctaaaagggagagttattactggccacaagccctgtattctcaacagggatgcaaattggttcttcagtaaggataaaaaaaaatcacaagcagttgtttgtggccctcctaaggcccacagcacatatagtgtgtctgtgatattccattttcatggcagggagtgatcaggaagaaggcttcctaggggactggcgatttaaaccagttgagaaacactgccatcagcaggcagtttcagactcactcaagttgtctcttgacagtcacttctaaatgggttctaatgtgacaatggcctccaaaactacagccttccctgaagtttaagctgtgaccttagattttagaaggacagtggggctgtacctagaatagtggttctcgaagaatgcggcctgcagatcctgggagtcccaagaccctttcagggaggatctgtgaggtcaactgttggcactgtggcatgaatcaaggtggtggcagcaaacttctagtagttttgatatgtccttgatagaacaaatagcaatggttaactattaaatgttgacctagccagcgcagtggctcatgcctgtaatcccagcactttgggaggctgaggcgggcggatcacctgaggtcgggagttcgaggccagcctgaccaacatggagaaaccccgtctcttctaaaaatacaaaattagctgggcatggtggtgcatgcctgtaattccagctactcgggaggctgaggcaagagaatcgcttgaatccggtaggtggaggttgcagtgagccgagatcataccattgcactccagcccaggcaacaagagtgaaaccctgtctcaaaaagaaaaaaaaagttgaccttgagaatttataatattctgagaaaactggaagcatgcataaagcccctctgctgtgcactgaagtatgggtgccttgaggaaaagcagttacacagttgagttgcaagctgaattggctgtgttcaaggcatgccctttagaattgaaagaactagcagattacggtatttagacttgaatatttggctgatattttctggaaattaatggaatgagcctctcacctcaagggaaacaactgatagtgttgccagtgataaagctttcaagcaaaaattggaatttccgaaaatctgtactccaccatgagctttattgttggggatattaacaaatgtgatttgtataatgaaatgcatttcatttggaagaattcaatgaaccatttttccaagtgaccagtacgtgatgttacaaaatcatgcatggctcaaagattgattcaaaagtgtaagacaggccagtggattttaatgtattaacaatataagagtgcattaagttttcggagtctacattgcctttaagaaactatgacttgtagtaagccgggcgcggtggctcacgcctgtaatcccaacactttgggaggccaaggtgggtggatcacaaggtcaggagttcaagaccagcctggccaatatggtgaaagtccgtctctactaaaattacaaaaattagccgggcgtggtggcagatcccttgtagtcccagctactcgggaggctgaggcaggagaatagcttgaacccgggaggtggaggttgcagtgagtcgagatcgtgccactggactccagcctgggtgacagagcgagactccatttcaaaaaaaaaaaaaaaaaaaaaaaatcacttgtagtcttggtgtggtatcaaagaatagccacaattagctgaaaaggctattttaaaaacttttccaactgcgtatctgtgtgaagtcaacttacttcaacaaaaaagtttggatgtagaagcagctgtaagaattcaactgtttattataacaagatactaaagagactgtaaaatgccacccttctccttggattgttttggaagttattcttcataaaaaatgttaacgtgggctgggcatggtggctcatgcctgtaatcccagcactctgggaggctgaggtgggcggatcacttgagctcaggaattcaaggtcagcctgggcaacatggctaaactctgtctctattaagaaaaaaaatgttaacattatgatttaaaagtgcattaaccttaatctagataataaaagctttttggggcaacctccagaactgtgaaaaataaatttgttatttaaaaagaaaaaaaaaaaaacaaaaa

SEQ ID NO: 2468 - DNA, 2338 bp, Homo Sapiens
  NM_004805
gctccgcgcttctgcttccggcggcgctggtggtggcgcgcggcgcggcgcggcgatggcggcgggtggcagcgatccgcgggctggcgacgtagaggaggacgcctcacagctcatctttcctaaagagtttgaaacagctgagacacttctaaattcagaagttcatatgcttctggaacatcgaaagcagcagaatgagagtgcagaggacgaacaggagctctcagaagtcttcatgaaaacattaaactacacagcccgtttcagtcgtttcaaaaacagagagaccattgccagtgttcgtagcttgctactccagaaaaagcttcataagtttgagttggcctgtttggccaacctttgcccagagactgctgaggagtccaaggctctaatcccaagcttggagggacggtttgaagatgaggagctgcagcagattcttgatgatatccagacaaagcgcagctttcagtattaatctccaaacatcactgctgctcggagaaaccacatccccaggcataacaccaccttcccactgtctggggctgacttgcacagaaattctgttgaagacagttgagaattcctttggagaaaacagcccagcttggcgtggggttaggttgctgtttcaaataactcacaggcccaggtgacatggaatcttggagcagccttgtgcagtggcagccagtggcttcctgaacgtgcctctgcgaagtgtgagatgaggggtcacataaccacactgttgactacctcattcctggtttttggcctccacatcatcttttttcttaatatttcatgttttaatttcagggtgtttatactttttgaaactagaccagaagatagtagactttatagagaaagaccagttttacctagatactaaaggaagaattaaaccgctgttagtttgaaatgctttttttttttttttttaaatggagatagggtcttaactcttgtccaggctggaggagtgcagtcgtacagtcatggctcactgaagtcttgaccccgctgcctcagcctcccaaataactggggccacaggtgtgcaccacaactctcagctaatttttaaaattttttatagaggtggggttttactatgctgtccagactggtcttaaactcctgggctcaagtgatccccctgccttggcctcccaaactggtgagattacaggcatgagccaccacaactggcctgaaattcttaaaggatgggagtgtcgatgacagcaccttggcatcgttgtgcctaacctgggagacggaagaagcacgccatgggaagtgtttacacttggggacaagtgctaagtattgtggagcccatagccccttgagatagatggctactttgcctttcttcttgaactgtcttgcagaatgtggatttggggtaagtggtcttgaaggattcatttagtcaccctcaaattaagatttttacttcatctttcttgggcctgcacctccaagataacaaagaagaagcaatggtcgtgccaaagaggtccacaaccaggtgtgcactgttcactgcagcccatttgctgtatgaactgtggttgttgtgtgcccaatgacaaggctactaagaaattcatcatttgaaacgtagaggccgcagcagtcagcgatgtttctgaaatgagcatccttgacgcctgtgtacttcccaggctggatgtgaagctacattaccatgtgagttgtgccattcacagcacagtggtgaggaattgagctcatgaagcaggcaaggaccgaacacctccaccccaacgtagacctgcaggtgctgccccatgacctccaccaaagcccatataaggagcggagttgttaaggactgaagaaaaacttctctggagaaaaataaaattgcaattctacttaaaaaaatttttttttttttttacttcataggccaggcttgaagttctgaacactttgaagtctccaattatgagagatccagtctaagcctctggcctgctaattagcaataagtgctttatttggaaggagggagtcatccactcttgagccactgcagtgaagtcacttgatctcagtctgggggaaaacacttcaatagctaaacattctagctttgatttttctgaagggaatacacttgttttcaattttggggtttttctttggggcacttgcttgactctgtatgaacttgtgatccaaggaaaaaggagaaagaacagtgttggcttttaaaatcaggatggttttatgtttgctacgaaataaggcaagaataaaaaattcttatttttaaaaaaaaaaaaaa

SEQ ID NO: 2469 - DNA, 5004 bp, Homo Sapiens
  NM_004808
agcagtacggcgggaggcactagagggagctgcggccgctccggcccggccccgagcaccgcctccccagccagcgccgccgcgatggcggaggacagcgagtctgcggccagccagcagagcctggaactggacgaccaggacacgtgcgggatagacggggacaatgaggaggagacggagcacgccaaaggaagtcctggagggtatttgggagccaaaaagaaaaagaagaaacagaagagaaaaaaggagaaaccaaattccggaggcaccaagtcagactcggcatctgattcccaggagattaaaattcagcagccttcgaaaaatcccagtgttccaatgcagaagttgcaggatatccagagagcaatggagctgctatccgcatgccagggcccagccaggaacattgatgaggctgcaaagcacagataccagttttgggacacacaaccggtaccaaaactagatgaagtcataacatctcatggtgcaattgaaccagataaagacaacgtacgccaagaaccgtattctttgccacagggttttatgtgggacactttagacttgagtgatgccgaagtgctcaaggagttatacacgttgttaaatgagaattacgtagaagatgatgacaatatgttccgatttgactattcacccgagttcctgttgtgggctctgcgtccaccaggctggctcctgcagtggcactgtggggtcagagtgtcttcaaataaaaaactggtcgggttcataagtgccatcccagcaaacattcggatttatgacagtgtgaagaagatggtagaaatcaactttctttgtgttcataagaagttgagatcgaaacgggtagccccagtgctaatccgagagatcactagaagagtgaacctggaagggatcttccaggctgtgtacaccgcgggagtggttcttcctaagcccatagccacatgcagatactggcatcgatcactaaaccccagaaaattggtagaagtgaaattttctcacttgagtagaaatatgactttacagagaacaatgaagctatacagacttccagatgttacaaagacttcaggtttgagaccaatggaaccaaaagatatcaaatcagttcgagaattaatcaacacttacctgaagcagtttcatctggctccagtgatggatgaagaggaagtagcccactggttcctcccccgggagcacattattgacacgtttgtagtggagagccccaacggtaaactgactgatttcctgagcttctatacgctcccctccacggtgatgcaccaccctgctcacaagagcctcaaagccgcctactcattctacaacatccacacagagacgcccctgctggacctcatgagcgacgcgctcatcctggctaaatcgaaaggatttgatgtattcaatgcactggatttgatggaaaataagacattcttggaaaaactcaagtttggtataggagatggcaatttgcagtattacctgtacaattggaggtgtccaggtacagattctgaaaaggttggactagtactacaatagatggatatttttatttctagaactctgacatcatcatttgttaatatttaatgatttctggaactgccattccaaagaagaataaaagcacaactcaagtgaaattgaagtagtcgataatcagaaaagatgacaaaagtccacatgtgacatttgtacgtttctagctagaatgttaaacttcatcctttttttactgttgacctatttgtgggagggatgaaaggctacaaagagcacattcttgtaattttcaaatttttgcctgtctcttgaagaggtattttttcacccttagaaaagggactgtttttctatggactaagtagaagttacagagtcatgtaagaaaatctttgctattgtgtggagagaaattgctgcatttctgtttcttaagtgatggtacatttgtccatgtaacagaacaaaagatccatttggaaattttttttactggtatcaccttacatggtatcactgggaacatttatggaatcaacacttctgtagctcagtgacaggtggtggttgtttaagtgcagagcaatattaaaatgtactggtgactagtacatgtatttctccataagcagagttgccgaatcaataaacatgcaagtttgtactttgatctttaccaggtcagtggattgcttcaaaagcagagttttgtgcaagcactcactgtgctctctgaaagagcctgaggccgggcgtggtggctcacgcctgtaatcccagcactttgggaggccaaggtgggcagatcatgaggtcaggagatcgagaccattctggccaacatagtgaaaccccatctctactaaaaatacaaaaattagccgggcgtggtggcgtgtgcctgtagtcccagctgcttgggaggctgaggcaggagaatcgcttgaacctgagaggtgaggttgcagtgagccgagatcgagccactgcactccagcctgggtgacagagcgtgagactccgtctcaaaaaaaaaaaaaaagaaagagcctgtacccgcgactaactagacttttctgctgttgtgcaaagttcagtttcttctcagcaacatcaaggatatatgaagaaaaggaaataaaaaactgtaaagtcaaaagagatgcctggtggaacttattcgtgctatcagggcattgatagtttgaatgtttttattacttatgcaaaattgcacatactcctctatgctgattttatcatgaaaactgtcatgtgtcatgctaatggaaaatgtcttatttgtaaataagtattcataattttgttactgatggtgtttttaatctagaatttgaaaaactttcatggcttacagatgtgtgtttatattgccaataatctgcgggaaaaataagatgctaaccgaggccacgtagcctggcctcaactcagataccacaaagtagatgccttggctgggtgtggtggctcacgcctgtaatcccagcactttgggaggccaaggcgggcgaaacatttgaggtcaggggttcgagaccagcctggccaacatggtgaaaccccatctctactaaaaattcaaaaagaactagctgggtgtggtggcgggtgcctgtaatcccagctgctaggaggctgaggcaggagaatcacttgaacccaggaggcggaagttgcagtgagccaagatcgtgccactgcactccagcctgggtgacagtgcaagactccgtctcaaaaaacaaaagtagatacttttccctgcttttactgggccagtgcctaggaagttcagtgcagaagttaattgttttagacatgatggcatttccttcaagttatgagtccagtgaaaccaatcatatcttatcccaggcaggggccaccaaactatggcctgtgggctaaatccagcccattgcttatttttgtgtagcccacaggctaagaatgtttttattttctggaatggttgaggagaaaaagccaaaaaatgacatcattttgtgacatgtgcaaattacacaaaattcaaattccggtgtccctcaataaggttttattggaacatagccatactttttttttttttttttttaggacagggtctcactctattgtccaggctagaatacagtggcacagtcaacagctcactgcagccccaaactcctgggttaaaatgatcctcctgcttcagcgtctttttgaagaaaaagaactagctgggcgtgcataccaccacgcctggctaagtttttcattttttgtagagacaaggtcttgctatgtttcccgtgctggtctttaactcctggcctcaagtgatccttctgccttggcctcccaaagtactgggattatagacatgagccaccactcttggccacagccactttcatttacatattgcctatggctgcttcacactacaaagctgagttgagttgttgtgacagattgtgtggcctgcaaagcctaagatattcactctctggtcttttacagaaagtttgttgaccttggtcactacgaaggagttggaactctcctttctataggttgccgtgattctaaagaccaacccacagctgtgacatccctgagactaccaccagagggcgactgggccccacagtagtacataatataggacctctcttggagataatggaagacttggaatttcagatggttccaccctaattgcattagcgttctttcttaacaggagaaaggcttcaagaaacaaaacagtcctcattcactggaacagggtttgagataccagcattaagtaaatgagattttgacttaacctggagtcaaggctctaatttaggactttacttcccactcattttcatgccacaaagtctatacaaagtaggttttcaaataattgcagaatcagccaggcacggtggctcacacctgtaatccctgcactttgggaggccaaggtgagcagatcacttgaggtcaggagtcttgagaccagcctggccaacatggtgaagccctatctctactaaaattacaaaaactagccggacatgggggtgtgcacctgtaatcccagctattcaggaggctgaggcaggagaatcgcttgaacccaggaggcggggttgcagtgagccgggatcacaccactgcactccagcctgggcaacagagtgagactctatctcgaaagtaaaataaataactgcagcattgccagttggaaactttgtcatgagcttacctcacggtgacagttacactgctcctttaaagagtcatttacataatttgttatcaaattattaaccacttttaaatagaataataactacatttgcctccataattgaagcagattactaattaacattttcgagaattaaactgcttgcttatgaagtagctattaaaactaaattgaaatgc

SEQ ID NO: 2470 - DNA, 1926 bp, Homo Sapiens
  NM_004811
agtgctaagcaaatacaggaaccaaaaaggtttatagaggctgccttatgctgtctcatccagttcctttgcggtcctcttcttcagcacatgccaaagctgttcctcacggcctgtgagacaagagcatcttggatgtaggacaatggaagagttagatgccttattggaggaactggaacgctccacccttcaggacagtgatgaatattccaacccagctcctcttcccctggatcagcattccagaaaggagactaaccttgatgagacttcggagatcctttctattcaggataacacaagtcccttgccggcgcagctcgtgtatactaccaatatccaggagctcaatgtctacagtgaagcccaagagccaaaggaatcaccaccaccttctaaaacgtcagcagctgctcagttggatgagctcatggctcacctgactgagatgcaggccaaggttgcagtgagagcagatgctggcaagaagcacttaccagacaagcaggatcacaaggcctccctggactcaatgcttgggggtctggagcaggaattgcaggaccttggcattgccacagtgcccaagggccattgtgcatcctgccagaaaccgattgctgggaaggtgatccatgctctagggcaatcatggcatcctgagcattttgtctgtactcattgcaaagaagagattggctccagtcccttctttgagcggagtggcttggcctactgccccaacgactaccaccaacttttttctccacgctgtgcttactgcgctgctcccatcctggataaagtgctgacagcaatgaaccagacctggcacccagagcacttcttctgctctcactgcggagaggtgtttggtgcagaaggctttcatgagaaggacaagaagccatattgccgaaaggatttcttagccatgttctcacccaagtgtggtggctgcaatcgcccagtgttggaaaactacctttcagccatggacactgtctggcacccagagtgctttgtttgtggggactgcttcaccagtttttctactggctccttctttgaactggatggacgtccattctgtgagctccattaccatcaccgccggggaacgctctgccatgggtgtgggcagcccatcactggccgttgtatcagtgccatggggtacaagttccatcctgagcactttgtgtgtgctttctgcctgacacagttgtcgaagggcattttcagggagcagaatgacaagacctattgtcaaccttgcttcaataagctcttcccactgtaatgccaactgatccatagcctcttcagattccttataaaatttaaaccaagagaggagaggaaagggtaaattttctgttactgaccttctgcttaatagtcttatagaaaaaggaaaggtgatgagcaaataaaggaacttctagactttacatgactaggctgataatcttattttttaggcttctatacagttaattctataaattctctttctccctctcttctccaatcaagcacttggagttagatctaggtccttctatctcgtccctctacagatgtattttccacttgcataattcatgccaacactggttttcttaggtttctccattttcacctctagtgatggccctactcatatcttctctaatttggtcctgatacttgtttcttttcacgttttcccatttccctgtggctcactgtcttacaatcactgctgtggaatcatgataccacttttagctctttgcatcttccttcagtgtatttttgtttttcaagaggaagtagattttaactggacaactttgagtactgacatcattgataaataaactggcttgtggtttcaataaaaaaaaaaaaaaaaaaaaaaaaaaaaaaaaaaaaaaa

SEQ ID NO: 2471 - DNA, 1929 bp, Homo Sapiens
  NM_004813
cggtaaacggaagagctgggtgctgacggcgctgggcgggtcaggggcggagagcgtgctaaccaatgacttgagggagtagggggccgggtttgggccctcagttgctaagggctacccgagtgggaagcggttcaagagatggggtgaagggtggttcaccggttcttcaagtcctcagccttctggcccgcggaagttaagcaaccaagaggcgggcctaagaccggaagcaggaaggagggcgcaggaagcagggcgccgcagcctgtcgtacggtccttctgtgggtctgtcggtgccgagggcaggatggagaagctgcggctcctgggcctccgctaccaggagtacgtgactcgtcacccggccgccacggcccagctggagacagcagtgcggggcttcagttacctgctggcaggtcgattcgccgattcgcacgagctgtcagagctggtgtactctgcctctaacctgcttgtgctgctcaatgacgggatcctacggaaggagcttcggaaaaagttgcctgtgtcgctgtcccagcagaagctgctgacatggctgagcgtgctggagtgcgtggaggtgttcatggagatgggagctgccaaggtgtggggtgaagtgggccgctggcttgtcatcgccctcatccagctggccaaggctgtactgcggatgctcctgctgctctggttcaaggctggcctccagacttcaccccctatcgttccactggacagagagacccaggcacagcccccggatggtgaccacagccctggcaaccatgagcagtcctacgtggggaagcggtcaaaccgggtggtgcgaaccctccagaacacgccgtccctgcactccaggcactggggagctccccagcagcgggagggacggcagcagcagcatcacgaggagctgagtgcgacccccacccccctggggctgcaggagaccatcgcagagtttttgtacattgcccggccgctgctgcacttgctcagcctgggcctgtggggtcagaggtcgtggaaaccctggctcttggctggtgttgtggacgtgaccagcctgagcctcctgagtgacagaaagggcctgacccggagggagcggcgggagctgcggcgccggaccatcctgctgctctactacctgctgcgctctcctttctatgaccgcttctccgaggccaggatcctcttcctgctccagttgctggccgaccacgtccctggcgttggcctggtcacaaggccgctcatggattacttgcccacctggcagaaaatctacttctacagttggggctgacagacctcccggaaggagggtgtggggaggggtggggcagggagcccctcttccctaataaaactgactccggcagcgtcccagcgtgcggcctctccgtgcctaccggccaggccccacacacagccctggtcgccaccagcgttcctcccaggacacccttgactgcgctctcctgtgacgatgccactgcagcccgcaccttgtcactgctgggccaagaagccttcactaggagtgggatccaggctcctctcccacagaaagcggtgacttcacctcatggagcccgggaagctgctcgcctcggcagccataggagcgaacactgctgctctctcgctggcccctggtgaggacaggaagcctgaacccgggtgatggctgaacgctgcccagcgtgtcttctggctggggccctccgtctgccccttctccgcagggccctgtggctctggcagccccaggccatggcgttgccagcctccctgtgacagagcctggtgaacagtgagcctggctcccacgcaagtggcactttaagccctgcatcctcggttgagagtaaaaggcttttctcccttaaaaaaaaaaaaaaaaaaaaaa

SEQ ID NO: 2472 - DNA, 1638 bp, Homo Sapiens
  NM_004814
agcggcagcgcggtcagtggcggcgctgaagagaccggttgccgccatgatagaacagcagaagcgtaagggcccagagttgccgctggttccagtcaagcggcagcggcatgagttgctgttgggagcggggtctggcccaggagccgggcagcagcaggcgacgccgggagccttgctgcaagcgggacctccaagatgttcctcccttcaagccccaatcatgctgctctctggacatgaaggggaagtctactgctgcaagttccaccccaacggatccaccttagcatctgcaggatttgaccgactgatattactgtggaatgtctatggtgactgtgataactatgccacactgaagggacacagtggagcagtgatggaattgcattacaacacagatggcagtatgcttttctcagcatccacagataaaaccgtggctgtgtgggatagtgaaacaggtgagagggttaaaaggctaaagggacatacttcctttgtgaattcctgttatccagccaggagaggccctcagcttgtctgcactggcagtgacgatggcacagttaagctttgggacatccggaagaaagcagccatccagacatttcagaacacgtaccaggtgttagctgtgaccttcaatgacacaagtgatcagattatttctggtggaatagacaatgatatcaaggtctgggacctgcgccagaacaagctaacctacaccatgagaggccatgcagattcagtgactggcctgagtttaagttctgaaggctcttatcttttgtccaatgcaatggacaatacagttcgtgtctgggatgtccggccatttgcccccaaagagagatgtgtaaagatatttcaaggaaatgtgcacaactttgaaaagaaccttctgagatgttcttggtcacctgatggaagcaaaatagcagctggctcagccgacaggtttgtttatgtgtgggataccacaagcaggagaatattgtataagctgcccggccatgctggctccatcaatgaagtggctttccaccctgatgagcccatcattatctcagcatcgagtgacaagagactgtatatgggagagattcagtgaagatatggactggaagactccaaggccgcttgtctttgagacctcagactgcataagtgatgccaaatgttggatgtccaggctagcaccctcccttcagatgaccattgctagcaagaaacaggaggcggtggccatattccaaaaaccacttctgtcccatttcaccaggatgactaaggcaagctccctgtggcctctaaaaaccacctgccagatttcagggactgtttttttttttctttttcttttttcctgttttctaatgcaggcccaatgtgacaaatttgttggttgggattttttttttttttttgtaactggcttgtatgatattttctttctgtatttctctatatcattttgtattaaaagccaaatagatgcctttttacaagagccatgtggattggatttattgctgtcttttttttgaggcttgattgctataaatcagaatagagcatgatgtggccacagaatacaattcatttaaacttccaaaaaaaaaaaaaaaa

SEQ ID NO: 2473 - DNA, 2671 bp, Homo Sapiens
  NM_004823
gggtgccgcgcctgtagcactcccggaactggaactaggtgccagacggtccggaggcgggggccacgtcagcggggccacccagggctcgcggggtcccggtgggtgccatgcggaggggcgcgcttctggcgggcgccttggccgcgtacgccgcgtacctggtgctgggcgcgctgttggtggcgcggctggaggggccgcacgaagccaggctccgagccgagctggagacgctgcgggcgcagctgcttcagcgcagcccgtgtgtggctgcccccgccctggacgccttcgtggagcgagtgctggcggccggacggctggggcgggtcgtgcttgctaacgcttcggggtccgccaacgcctcggaccccgcctgggacttcgcctctgctctcttcttcgccagcacgctgatcaccaccgtgggctatgggtacacaacgccactgactgatgcgggcaaggccttctccatcgcctttgcgctcctgggcgtgccgaccaccatgctgctgctgaccgcctcagcccagcgcctgtcactgctgctgactcacgtgcccctgtcttggctgagcatgcgttggggctgggacccccggcgggcggcctgctggcacttggtggccctgttgggggtcgtagtgaccgtctgctttctggtgccggctgtgatctttgcccacctcgaggaggcctggagcttcttggatgccttctacttctgctttatctctctgtccaccatcggcctgggcgactacgtgcccggggaggcccctggccagccctaccgggccctctacaaggtgctggtcacagtctacctcttcctgggcctggtggccatggtgctggtgctgcagaccttccgccacgtgtccgacctccacggcctcacggagctcatcctgctgccccctccgtgccctgccagtttcaatgcggatgaggacgatcgggtggacatcctgggcccccagccggagtcgcaccagcaactctctgccagctcccacaccgactacgcttccatccccaggtagctggggcagcctctgccaggcttgggtgtgcctggcctgggactgaggggtccaggcgaccagagctggctgtacaggaatgtccacgagcacagcaggtgatcttgaggccttgccgtccaccgtctctcctttgtttcccagcatctggctgggatgtgaagggcagcactccctgtccccatgtcccgggctccactgggcaccaacataaccttgttctctgtcctttctctcatcctctttacactgtgtctctctggctctctggcattctcgctgcctctgtctttccctcttgctgtctctgtttctcattctctttcatgttccgtctgtgtctctcaattaaccactcgtcaactgctgattctactgggctgtgggctcagacctcatttcaggcaccagattggtcgctacaccctggacaagtgactgcccgtctctgagccttgatttcctcagctgccaaatgggaagaatagaagaatttgcccctaaacccctcctgtgtgctggccctgtgctagacagtgctggagacatagttgggggtggagaactgcccttatggagcttgcagtccagtgaggtggacagacctgtccccagacagtgatggcccaaaatggtcaggactttaatggaggaggtgaggtgttgaaagcacaggcagagtggtcagggctgaagtcggagaagcatagggactaggcccaatccagcctggaaagtcagggaggacttcctagaggaagggacatcgaactaagacctgaactatgagaaataggcaggaagaagttgtacctgactcatttttctcaggtgtctccagggagcaggacccatggagggacccctggtgtaggcctgggcgatagactcttcctcagcagcctggcaggcaggaaacagacataggaccccagcccagatctgaatggcatgggaggtgctgcccttaaccatgacaccattgtaagagctgtccacatttgtatgttgtgccctggaatcagcctggttgagctcaaatcccaacttagccacgtctggcctgtgtccttgggcagtcacactacctctctgattttgtttccttatctgtaaaatggtgatcatcataatacaacttcaaaaggatttcaggctgagtgtggtggctcacgcctatacacccagcactttggaaggctgaggaaggaggatcgcttgaggccaggagtttgagactagcctaggcaacacagtgaggccttatctcaacaacaaccacaaaatctaaaaattagctgggtgtggtggtgcatgcctgtgatcctggctacttcagaggctgaggtggaaggatcacttgaggccaggagtttgaggctgcagtgagttatgatggcactgctgcactccagcctgcgggacagagtgagaccctgtctgaaagaaagagagaaagaaagaaagaaagagagagaaagaaagaaagaaagaaagggaaagatggaaggaaggaaggaaaaagaaagagaaagagagagagagagaaagaaaaagaaagaaaagtaagaaagaaaaaagaaaaagaaagaaaagtaagaaagaaaaaaaaaaaaaaa

SEQ ID NO: 2474 - DNA, 1017 bp, Homo Sapiens
  NM_004832
cccttggccagcgagatgctttgacacagccccttaagatgttttaagggctatcccataaagccgggaaggcacaacgggtggagctggcggccgccgggggcaggcacttttgagctaaggaggaagcgggggagggaaggagggcgggaaggacgcgccacctacttcctgaatcccctgcaaaccccagaggagctcggcctgcgctgcgccacgatgtccggggagtcagccaggagcttggggaagggaagcgcgcccccggggccggtcccggagggctcgatccgcatctacagcatgaggttctgcccgtttgctgagaggacgcgtctagtcctgaaggccaagggaatcaggcatgaagtcatcaatatcaacctgaaaaataagcctgagtggttctttaagaaaaatccctttggtctggtgccagttctggaaaacagtcagggtcagctgatctacgagtctgccatcacctgtgagtacctggatgaagcatacccagggaagaagctgttgccggatgacccctatgagaaagcttgccagaagatgatcttagagttgttttctaaggtgccatccttggtaggaagctttattagaagccaaaataaagaagactatgctggcctaaaagaagaatttcgtaaagaatttaccaagctagaggaggttctgactaataagaagacgaccttctttggtggcaattctatctctatgattgattacctcatctggccctggtttgaacggctggaagcaatgaagttaaatgagtgtgtagaccacactccaaaactgaaactgtggatggcagccatgaaggaagatcccacagtctcagccctgcttactagtgagaaagactggcaaggtttcctagagctctacttacagaacagccctgaggcctgtgactatgggctctgaagggggcaggagtcagcaataaagctatgtctgatattttccttcactaatatgaataaaaaaaaaaaaaaa

SEQ ID NO: 2475 - DNA, 1485 bp, Homo Sapiens
  NM_004833
tcagccaattagagctccagttgtcactcctacccacactgggcctgggggtgaagggaagtgtttattaggggtacatgtgaagccgtccagaagtgtcagagtctttgtagctttgaaagtcacctaggttatttgggcatgctctcctgagtcctctgctagttaagctctctgaaaagaaggtggcagacccggtttgctgatcgccccagggatcaggaggctgatcccaaagttgtcagatggagagtaaatacaaggagatactcttgctaacaggcctggataacatcactgatgaggaactggataggtttaagttctttctttcagacgagtttaatattgccacaggcaaactacatactgcaaacagaatacaagtagctaccttgatgattcaaaatgctggggcggtgtctgcagtgatgaagaccattcgtatttttcagaagttgaattatatgcttttggcaaaacgtcttcaggaggagaaggagaaagttgataagcaatacaaatcggtaacaaaaccaaagccactaagtcaagctgaaatgagtcctgctgcatctgcagccatcagaaatgatgtcgcaaagcaacgtgctgcaccaaaagtctctcctcatgttaagcctgaacagaaacagatggtggcccagcaggaatctatcagagaagggtttcagaagcgctgtttgccagttatggtactgaaagcaaagaagcccttcacgtttgagacccaagaaggcaagcaggagatgtttcatgctacagtggctacagaaaaggaattcttctttgtaaaagtttttaatacactgctgaaagataaattcattccaaagagaataattataatagcaagatattatcggcacagtggtttcttagaggtaaatagcgcctcacgtgtgttagatgctgaatctgaccaaaaggttaatgtcccgctgaacattatcagaaaagctggtgaaaccccgaagatcaacacgcttcaaactcagccccttggaacaattgtgaatggtttgtttgtagtccagaaggtaacagaaaagaagaaaaacatattatttgacctaagtgacaacactgggaaaatggaagtactgggggttagaaacgaggacacaatgaaatgtaaggaaggagataaggttcgacttacattcttcacactgtcaaaaaatggagaaaaactacagctgacatctggagttcatagcaccataaaggttattaaggccaaaaaaaaaacatagagaagtaaaaaggaccaattcaagccaactggtctaagcagcatttaattgaagaatatgtgatacagcctcttcaatcagattgtaagttacctgaaagctgcagttcacaggctcctctctccaccaaattaggatagaataattgctggataaacaaattcagaatatcaacagatgatcacaataaacatctgtttctcattcc

SEQ ID NO: 2476 - DNA, 4665 bp, Homo Sapiens
  NM_004836
ggaaagtccaccttccccaacaaggccagcctgggaacatggagtggcagcggccgcagccaatgagagagcaaacgcgcggaaagtttgctcaatgggcgatgtccgagataggctgtcactcaggtggcagcggcagaggccgggctgagacgtggccaggggaacacggctggctgtccaggccgtcggggcggcagtagggtccctagcacgtccttgccttcttgggagctccaagcggcgggagaggcaggcgtcagtggctgcgcctccatgcctgcgcgcggggcgggacgctgatggagcgcgccatcagcccggggctgctggtacgggcgctgctgctgctgctgctgctgctggggctcgcggcaaggacggtggccgcggggcgcgcccgtggcctcccagcgccgacggcggaggcggcgttcggcctcggggcggccgctgctcccacctcagcgacgcgagtaccggcggcgggcgccgtggctgcggccgaggtgactgtggaggacgctgaggcgctgccggcagccgcgggagagcaggagcctcggggtccggaaccagacgatgagacagagttgcgaccgcgcggcaggtcattagtaattatcagcactttagatgggagaattgctgccttggatcctgaaaatcatggtaaaaagcagtgggatttggatgtgggatccggttccttggtgtcatccagccttagcaaaccagaggtatttgggaataagatgatcattccttccctggatggagccctcttccagtgggaccaagaccgtgaaagcatggaaacagttcctttcacagttgaatcacttcttgaatcttcttataaatttggagatgatgttgttttggttggaggaaaatctctgactacatatggactcagtgcatatagtggaaaggtgaggtatatctgttcagctctgggttgtcgccaatgggatagtgacgaaatggaacaagaggaagacatcctgcttctacagcgtacccaaaaaactgttagagctgtcggacctcgcagtggcaatgagaagtggaatttcagtgttggccactttgaacttcggtatattccagacatggaaacgagagccggatttattgaaagcacctttaagcccaatgagaacacagaagagtctaaaattatttcagatgtggaagaacaggaagctgccataatggacatagtgataaaggtttcggttgctgactggaaagttatggcattcagtaagaagggaggacatctggaatgggagtaccagttttgtactccaattgcatctgcctggttacttaaggatgggaaagtcattcccatcagtctttttgatgatacaagttatacatctaatgatgatgttttagaagatgaagaagacattgtagaagctgccagaggagccacagaaaacagtgtttacttgggaatgtatagaggccagctgtatctgcagtcatcagtcagaatttcagaaaagtttccttcaagtcccaaggctttggaatctgtcactaatgaaaacgcaattattcctttaccaacaatcaaatggaaacccttaattcattctccttccagaactcctgtcttggtaggatctgatgaatttgacaaatgtctcagtaatgataagttttctcatgaagaatatagtaatggtgcactttcaatcttgcagtatccatatgataatggttattatctaccatactacaagagggagaggaacaaacgaagcacacagattacagtcagattcctcgacaacccacattacaacaagaatatccgcaaaaaggatcctgttcttcttttacactggtggaaagaaatagttgcaacgattttgttttgtatcatagcaacaacgtttattgtgcgcaggcttttccatcctcatcctcacaggcaaaggaaggagtctgaaactcagtgtcaaactgaaaataaatatgattctgtaagtggtgaagccaatgacagtagctggaatgacataaaaaactctggatatatatcacgatatctaactgattttgagccaattcaatgcctgggacgtggtggctttggagttgtttttgaagctaaaaacaaagtagatgactgcaattatgctatcaagaggatccgtctccccaatagggaattggctcgggaaaaggtaatgcgagaagttaaagccttagccaagcttgaacacccgggcattgttagatatttcaatgcctggctcgaagcaccaccagagaagtggcaagaaaagatggatgaaatttggctgaaagatgaaagcacagactggccactcagctctcctagcccaatggatgcaccatcagttaaaatacgcagaatggatcctttcgctacaaaagaacatattgaaatcatagctccttcaccacaaagaagcaggtctttttcagtagggatttcctgtgaccagacaagttcatctgagagccagttctcaccactggaattctcaggaatggaccatgaggacatcagtgagtcagtggatgcagcatacaacctccaggacagttgccttacagactgtgatgtggaagatgggactatggatggcaatgatgaggggcactcctttgaactttgtccttctgaagcttctccttatgtaaggtcaagggagagaacctcctcttcaatagtatttgaagattctggctgtgataatgcttccagtaaagaagagccgaaaactaatcgattgcatattggcaaccattgtgctaataaactaactgctttcaagcccaccagtagcaaatcttcttctgaagctacattgtctatttctcctccaagaccaaccactttaagtttagatctcactaaaaacaccacagaaaaactccagcccagttcaccaaaggtgtatctttacattcaaatgcagctgtgcagaaaagaaaacctcaaagactggatgaatggacgatgtaccatagaggagagagagaggagcgtgtgtctgcacatcttcctgcagatcgcagaggcagtggagtttcttcacagtaaaggactgatgcacagggacctcaagccatccaacatattctttacaatggatgatgtggtcaaggttggagactttgggttagtgactgcaatggaccaggatgaggaagagcagacggttctgaccccaatgccagcttatgccagacacacaggacaagtagggaccaaactgtatatgagcccagagcagattcatggaaacagctattctcataaagtggacatcttttctttaggcctgattctatttgaattgctgtatccattcagcactcagatggagagagtcaggaccttaactgatgtaagaaatctcaaatttccaccattatttactcagaaatatccttgtgagtacgtgatggttcaagacatgctctctccatcccccatggaacgacctgaagctataaacatcattgaaaatgctgtatttgaggacttggactttccaggaaaaacagtgctcagacagaggtctcgctccttgagttcatcgggaacaaaacattcaagacagtccaacaactcccatagccctttgccaagcaattagccttaagttgtgctagcaaccctaataggtgatgcagataatagcctacttcttagaatatgcctgtccaaaattgcagacttgaaaagtttgttcttcgctcaatttttttgtggactactttttttatatcaaatttaagctggatttgggggcataacctaatttgagccaactcctgagttttgctatacttaaggaaagggctatctttgttctttgttagtctcttgaaactggctgctggccaagctttatagccctcaccatttgcctaaggaggtagcagcaatccctaatatatatatatagtgagaactaaaatggatatatttttataatgcagaagaaggaaagtccccctgtgtggtaactgtattgttctagaaatatgctttctagagatatgatgattttgaaactgatttctagaaaaagctgactccatttttgtccctggcgggtaaattaggaatctgcactattttggaggacaagtagcacaaactgtataacggtttatgtccgtagttttatagtcctatttgtagcattcaatagctttattccttagatggttctagggtgggtttacagctttttgtacttttacctccaataaagggaaaatgaagctttttatgtaaattggttgaaaggtctagttttgggaggaaaaaagccgtagtaagaaatggatcatatatattacaactaacttcttcaactatggactttttaagcctaatgaaatcttaagtgtcttatatgtaatcctgtaggttggtacttcccccaaactgattataggtaacagtttaatcatctcacttgctaacatgtttttatttttcactgtaaatatgtttatgttttatttataaaaattctgaaatcaatccatttgggttggtggtgtacagaacacacttaagtgtgttaacttgtgacttctttcaagtctaaatgatttaataaaactttttttaaattaaaaaaaaaaaaaaaaaaa

SEQ ID NO: 2477 - DNA, 1587 bp, Homo Sapiens
  NM_004838
gggaccggaggcggcgcgggcggcggcggcgcagacaaaggcacgggcggcgtggagggcggcgcggagggcgcgggcccgggagccagggagcgagcggggcgcccggcagcgcggagtcagcgccgcgggggccgcacccgactcgcgcctggacactcgcggggcgccgacctggcagggggccaaaccagtgctcctgccacctctctggctgccccctagagcctgcccatcccagcctgaccaatgtccacagccagggagcagccaatcttcagcacacgggcgcacgtgttccaaattgacccagccaccaagcgaaactggatcccagcgggcaagcacgcactcactgtctcctatttctacgatgccacccgcaatgtgtaccgcatcatcagcatcggaggcgccaaggccatcatcaacagcactgtcactcccaacatgaccttcaccaaaacttcccagaagttcgggcagtgggccgacagtcgcgccaacacagtctacggcctgggctttgcctctgaacagcatctgacacagtttgccgagaagttccaggaagtgaaggaagcagccaggctggccagggagaaatctcaggatggcggggagctcaccagtccagccctggggctcgcctcccaccaggtgcccccgagccctctcgtcagtgccaacggccccggcgaggaaaaactgttccgcagccagagcgctgatgcccccggccccacagagcgcgagcggctaaagaagatgttgtctgagggctccgtgggcgaggtacagtgggaggccgagtttttcgcactgcaggacagcaacaacaagctggcaggcgccctgcgagaggccaacgccgccgcagcccagtggaggcagcagctggaggctcagcgtgcagaggccgagcggctgcggcagcgggtggctgagctggaggctcaggcagcttcagaggtgacccccaccggtgagaaggaggggctgggccagggccagtcgctggaacagctggaagctctggtgcaaaccaaggaccaggagattcagaccctgaagagtcagactggggggccccgcgaggccctggaggctgccgagcgtgaggagactcagcagaaggtgcaggacctggagacccgcaatgcggagttggagcaccagctgcgggcgatggagcgcagcctggaggaggcacgggcagagcgggagcgggcgcgggctgaggtgggccgggcagcgcagctgctggacgtcagcctgtttgagctgagtgagctgcgtgagggcctggcccgcctggctgaggctgcgccctgagccggggctggttttctatgaacgattccggcctgggatgcgggccaggctgcaggcggcatagttgggcccattcgtcctggaaagggactggggggtcccaacttagccctgggtgggccgggccgggctgggctggggtgggccccagtcggctctggttgttggcagctttggggctgtttttgagcttctcattgtgtagaatttctagatcccccgattacatttctaagcgtggcaaaaaaaaaa

SEQ ID NO: 2478 - DNA, 2279 bp, Homo Sapiens
  NM_004842
aggtggagccttttttgctcacggcagcaagttcccttctcctttctctcccccggcggcgtgtgcattggctcttcaagctgcctgtgctgctccgtggagtgaaaaaggcagggtgtgctcgcagactgtgctataaactgcaatttctatttggggtcctcacggagaagaacaccaggaaagacagacaggaccagtgccatgggccagctttgctgctttcctttctcaagagatgaaggaaaaatcagtgaaaagaacggaggggagcccgatgacgctgaactagtaaggctcagtaagaggctggtggagaacgcggtgctcaaggctgtccagcagtatctggaggaaacacagaataaaaacaagccgggggaggggagctctgtgaaaaccgaagcagctgatcagaatggcaatgacaatgagaacaacaggaaatgagcccggaacgcaggcccccatgtctctgtgcaaagcctccctgcttccctctgctgagtctagggactgacttgcagcgtgctgtttaagttaagtttctctggtgcaatctgtgaagattgcctaatacttttcatgatcgatgtgttcgcattgctgaaacacaacagaagaaaaatggagtgctgggactggcagaggaaattaattgatgaaagaagaatggcccaagtttcattcgccctcagccacgcacaagggaaagggaactttgggttatgcctcctggacgcaaattaaaggccgagaaagaggccttgccatcaatggaatactgccatttatattgcttagcagggcatttgactactttatctgaggccagaactctcacacacagctatcaagtgctaagtttaaaataatcactgttggaattgtcatctgtacaattagtccataatgtttcatgtttgtcctaagtgtgctgttgctatgcagtgtgatctttatttatagtaaattatgtttcatgtaaatgatatatttttggtgaaatgcaaccttttctataaaatgtgggcaacattttaaagtttttttaaaatcctattttgataagtcagtatgccatatttaatgaaatgttattatataatttttttttcttaggcaagaaacctattggaattcgagacttaattaatgaagctttgcatcgagaaacgatgggtctgaagtccaaagtgaaacagataaaggaacttttattaaagcctgagactcaggccagaattaggagggagctttttgaaggaagacttattaacaacagtaattcagcaaatgacgttgatttcagcacaactttgacataagctctacattgcgattgtgacaacatagcttatgaaatcttttcagcttattaagtagctctttggtaaacaccaaagaagtttctgatagtgtctgcacaacagcaaaccaacatttggtgaggaattagcaatttcttgccaaagaaaattgattctgcccaattattttttgagctacacttgtgttttagaatatctgtttctgtaatattgagagttattttatagaaatgatttcttaattagctgttgtgagatatttctcgggtccttgcagaaaaaaacatacagactgtgaacaaatcattcacaaacagaataaaacagagccaacaacagtattttaagggtcacttgcctcctgttgacacaattgttgctaaatcaaaagaagcgttgtccaggtgtgtctacatctagtgttacttttaatgagaatttgaatgtttattgaacaatagtacttgaatgaacatttataaatgtaattattgcgatcactggttaagaatgttttatatatccttataatatttttcactgatcaaaatgttgttctgctttttcatttcttaaggaatacatgtttgggatttttattttttacgtgtccgaagataagctccaggtcttatcgtatcccttgccatctgaacttgtttgcactgcttctgtttgaaagagcatcttgaaaaacttccccggtatgatgattgttggtaacaactttttctatagtcattgatggagtagatcatgatggaggggaaatcactggagatcaaatatgtaaaatcatttcaaatataaaatccagtttactcatggattttagctattttttcactgggtaaattatactacatttatttacaaatgagtttatgcattttcatggctcttaataaacatattgttttcccttgaaaaaaaaaaaaaaaaaaaaaa

SEQ ID NO: 2479 - DNA, 3258 bp, Homo Sapiens
  NM_004843
aaggctgtggaccccagagaaggtggcaggtggcccccctaggagagctctgggcacattcgaatcttcccaaactccaataataaaaattcgaagactttggcagagagtgtgtgtgtgtgtgtatggttgttgggcgtaggacaggtttcggggatgcgcggtacgcggtaccacccctcggaggcccccacccccagacgcccaggccgcctccccactccccctcaagcagccccagccggggactttccgtcgcggggaaggggcggggaccctgagcgaaaggtgcggaggcggcctgccggggtggttcggcttcccgttgccgcctcgggcgctgtacccagagctcgaagaggagcagcgcggccgcgcggacccggcaaggctgggccggactcggggctcccgagggacgccatgcggggaggcaggggcgcccctttctggctgtggccgctgcccaagctggcgctgctgcctctgttgtgggtgcttttccagcggacgcgtccccagggcagcgccgggccactgcagtgctacggagttggacccttgggcgacttgaactgctcgtgggagcctcttggggacctgggagccccctccgagttacacctccagagccaaaagtaccgttccaacaaaacccagactgtggcagtggcagccggacggagctgggtggccattcctcgggaacagctcaccatgtctgacaaactccttgtctggggcactaaggcaggccagcctctctggccccccgtcttcgtgaacctagaaacccaaatgaagccaaacgccccccggctgggccctgacgtggacttttccgaggatgaccccctggaggccactgtccattgggccccacctacatggccatctcataaagttctgatctgccagttccactaccgaagatgtcaggaggcggcctggaccctgctggaaccggagctgaagaccatacccctgacccctgttgagatccaagatttggagctagccactggctacaaagtgtatggccgctgccggatggagaaagaagaggatttgtggggcgagtggagccccattttgtccttccagacaccgccttctgctccaaaagatgtgtgggtatcagggaacctctgtgggacgcctggaggagaggaacctttgcttctatggaaggccccagggccctgtgtgcaggtgagctacaaagtctggttctgggttggaggtcgtgagctgagtccagaaggaattacctgctgctgctccctaattcccagtggggcggagtgggccagggtgtccgctgtcaacgccacaagctgggagcctctcaccaacctctctttggtctgcttggattcagcctctgccccccgtagcgtggcagtcagcagcatcgctgggagcacggagctactggtgacctggcaaccggggcctggggaaccactggagcatgtagtggactgggctcgagatggggaccccctggagaaactcaactgggtccggcttccccctgggaacctcagtgctctgttaccagggaatttcactgtcggggtcccctatcgaatcactgtgaccgcagtctctgcttcaggcttggcctctgcatcctccgtctgggggttcagggaggaattagcacccctagtggggccaacgctttggcgactccaagatgcccctccagggacccccgccatagcgtggggagaggtcccaaggcaccagcttcgaggccacctcacccactacaccttgtgtgcacagagtggaaccagcccctccgtctgcatgaatgtgagtggcaacacacagagtgtcaccctgcctgaccttccttggggtccctgtgagctgtgggtgacagcatctaccatcgctggacagggccctcctggtcccatcctccggcttcatctaccagataacaccctgaggtggaaagttctgccgggcatcctattcttgtggggcttgttcctgttggggtgtggcctgagcctggccacctctggaaggtgctaccacctaaggcacaaagtgctgccccgctgggtctgggagaaagttcctgatcctgccaacagcagttcaggccagccccacatggagcaagtacctgaggcccagccccttggggacttgcccatcctggaagtggaggagatggagcccccgccggttatggagtcctcccagcccgcccaggccaccgccccgcttgactctgggtatgagaagcacttcctgcccacacctgaggagctgggccttctggggccccccaggccacaggttctggcctgaaccacacgtctggctgggggctgccagccaggctagagggatgctcatgcaggttgcaccccagtcctggattagccctcttgatggatgaagacactgaggactcagagaggctgagtcacttacctgaggacacccagccaggcagagctgggattgaaggacccctatagagaagggcttggcccccatggggaagacacggatggaaggtggagcaaaggaaaatacatgaaattgagagtggcagctgcctgccaaaatctgttccgctgtaacagaactgaatttggaccccagcacagtggctcacgcctgtaatcccagcactttggcaggccaaggtggaaggatcacttagagctaggagtttgagaccagcctgggcaatatagcaagacccctcactacaaaaataaaacatcaaaaacaaaaacaattagctgggcatgatggcacacacctgtagtccgagccacttgggaggctgaggtgggaggatcggttgagcccaggagttcgaagctgcagggacctctgattgcaccactgcactccaggctgggtaacagaatgagaccttatctcaaaaataaacaaactaataaaaagcaaaaaaaaaaaaaaaagaaaagaaaaaacactgcatttgggcaccatctcagctcccttgcatccaggtgcagcatggactgagttcttgacaacagaatgtggtcagaagtgacatatgccaacacggggtctgggtgggggctcccccacatcctttccttgcctatgagctggaacataacacatgcctatgatccagctttggtcatacccaaggggaaggtggagcaagaaatgaaaaggaacctgaatccctgaatgactgcatggatagaaccactaagaaaaataaacttttatatttttata

SEQ ID NO: 2480 - DNA, 5564 bp, Homo Sapiens
  NM_004845
tggttgttatagtgataaactgaggccttgcctcttggcttctgggagagagagagagagagaggggcggggggtaacctctttacttcccctagggaagacagaaagaaggggagaagaagcggggggatgggtggagggtagaggggagaaaaatacgtgacaaagaaaacattctctgcctgggaggagactctctgagggtgtagagctagagggagcattcactggccatgccagtagttaccactgatgctgagtcagaaacaggtatcccaaaatccctttccaatgagcctccctcagaaaccatggaggaaatagagcacacatgcccacagcctcgactgaccctgactgcacctgccccatttgctgatgaaaccaactgccagtgtcaagcaccccatgaaaaactgaccattgctcaggcccgcttaggaacaccagctgacaggcctgtcagagtatacgccgatggaatatttgacctcttccactcaggtcatgcaagagcccttatgcaagcaaaaacactgtttcccaacagctacttgttggtaggagtttgcagtgatgatctcacccacaaattcaaaggtttcaccgtgatgaatgaagccgagagatacgaagctctcagacactgtcgctacgtagacgaagttatcagagatgctccctggacactcacgccagagtttctggaaaaacacaagattgactttgtggctcatgatgacattccgtattcctctgctggctctgatgatgtttacaagcacataaaggaagcagggatgttcgttccaacgcagagaacagaaggcatctcaacatcggacatcattaccagaattgttcgtgactatgatgtttatgcccgacgtaacctccagagagggtatacagccaaggaactgaatgtcagctttataaatgagaagaggtaccgtttccagaaccaagtggacaaaatgaaggaaaaagtcaagaatgtggaggaaagatcaaaggaatttgtgaacagagtggaagaaaagagccatgatctaattcaaaagtgggaagagaagtcaagggaattcattggcaacttcctagaactgtttggacctgatggagcatggaagcagatgttccaggagaggagcagccggatgctgcaggccttatccccgaagcagagccctgtgagcagcccaacccggagccggtccccttcccgctccccatcgcccaccttctcatggcttccactcaaaacctcacccccttcctcacccaaagcagcctcagcctctatcagcagcatgagcgagggggatgaggatgaaaagtagaggctgctgggaggcaagagccgcaccatgcaggatggggaggagggcgagagtcacagggttgcctgggtggtgtttgaagggtaatagtcacaggagctgcagctcagcagagagaccctgaactctgctaagggaaggtcttgggaccagttctctctcactctccgtacagctgaagagttgggcgaggtgcagagacttctagctggacaacctacacaaaccttagcgtctagagtcactctaaccttgctaaggaaggatgcagagttccctagagagacttgcactgatggggtgacttctgctttggtccttccaccacccccaccaagtaaaccacctgtggcagcggctgttccctcaacctgctacttctgcgtccataagggtcctgcacgttgcctcccaccaccccagctctgccagaataaaattgtttccaatagaggtggcaaagtgcttctgaaatagtcgagaaaaagacagattccaacctcctcagtccagccactgagacctgatgttggaacgcatcagctccttccagttccatgaatgtggctcatagacaaagccttgctttaggctggttataaaaggtcatctagtgtgaaccttaactttttattcaaaggacagttttgtcaagaactccacgtaaggcctgatgtgctcctggttgtactttctcatcactggtttgacttcattgttttgcagaaattaccttaatccgtgggaactgcaacaaagaaaaacttcctaatatataaaaaagaggagctgctttgctttgcctccaggtttagcggacaagaaatgtctcctgaagcttctccttaaaggatgctattatggaatggcttttcccatttctgaccagttaacagtttcatagacctcaagtaacagtttgaggtatcaaacatagtataccaatagggggtgctacctgcacgtatctgttctatatatgctccaatatgtcatccccgggtgtatcccatgtgcaatatgagtatatagtggtggcattttataatagaccccactcctgcgctccaccataatactcctctgaaatccttggtctcaagaaacatctgttctcttgtgacttgggcactttgtcaagcttattccagattcctgtggaaacgttttatcccaaccaggaaattagtattttgttctcgtggcctcctataacatttttgggtgaaggagaactcaagactttttacagagaactgtgggctcagttatgatctcagcatctgaatggtctaggtagtatcaccattatctctggccctaggtttgccaagtaggatgaagactctaagtgttcctgctgagttgtccaaaggtcctgctccttagtcacctgtgcgaaatgagcagggagagttaaggcatagaaccaaactctttgggttattgtatgggtatgccagtaaattcagacacagagctggggtctgactgaatagaggcccaaaccagcaacttgtaggcagagcccagaatctcttgtgatagaaataccccttttcagaggccttgggaaccagccttctaggtgacaaggggacaaccagtgaaggaaggcggcatgtctttccccttcttgttggggttgaactacctccctatccacttggagatgagtgctgtctgctgtgaagcaaaactatgaggctgagctggcttggaacctctttgttcttggcactttccttctccaggactctgggaagcactcatatgggacagagggctggcaggaacatggcatgtgaagaagaaaacttctttttgcagtcaagggccacccagaatattgctcttcagagagggacaagggcctcattcttccatttggtctctgtcttccatcatgcactcaggtcaagccatgcaagtctgcctaccatttgagttagttggcacttgtagcagtgaaggatgaggccagccaggcaagggaaggtggcgggaacaagggaagagaaaaggaggaaagaagttcctggagggaggaaaggaggataaagaaaatctgctctcataaaaccatttcaggacctcactttacaggtgagactctcttgggaaggcctttgtgcccctgctccatggcccagggcagatagattcacttttacctgaatcttatactctggagcaaatagtgtatcaggctgactatacatttgcaggccttacacgccatactgacaggtgccacttacgtgactcatcagataatgtcaccattgctgccaattatgggaaataactaatgcctattccagggatgagcccaaaccacacataaatgggttctaaatctcaccctcctaacctgcagtgagtccccccgttccaccctcttgaggctgcaaatctactgagaaggaatgggaaggattctacaacccaacttttgatactttttggccatctctcagtctctcccagcccctacccccacaccacctccctgctcccaggcagagaccgggttgcactttgttagggccagcaggtcaactgtaatggccaagagtgagttaaggctggaatgagaaatatgccccaagcttggaggggtaagcaggaataacacaaagcaaggaaagagattctttttgccctagtgaggaaaggaagcttcagaatgagggctggaggatagcaacttaggactgcagaagggggcagcttatgaagatgggagaaagtgggactgaagttgtaggggagcaggagggtagtgattttccgcttttctttctttctttcttttactttctttctctttctttctctctctctctctttctttttctttcttctttctctttttctttcctctttttctttctttctttttctttctctttcttccttctttctttcattcttctttgttctttcttctttctttctttttttttttttttgagatggagttttgctcttgttgctcaggctggagtgcaatggcacaatctcggctcactgcagcctccacctcccaggttcaaggggttcttctgcctcagcctcccaagtagctgggattacaggtgcctgccacgacacccagctaatttttgtatgtttagtagagacggggtttcaccatgttggccaggctggtctcaaattcctgacctcaggtgattctcccgcctcggcctcccaaagtgctgggattatgagcacgagccacggcgtccagccgattttccgctccctttcaagtgttaactcaccccctgacaggtgaagagggaagggttccttttacgcacaaccaaggttagcaaatgcccatgcaggatatggggtccctgcctctctggttgcttcatttcagcacttctatattagctgcttatggggaccctaaaatgaactggtcacccctccaccagctaagaaacaagggtgggattgctgtgccataagtcacactgaacgacttgcttctggcaagcatgctcctgtgtgtcaggaccttaccaaggcaaagaaatgccaggctcaagaggagcaggacgtgagacattggcctggcttctaacctggtctgagtggaagagacacagcttagggatttcagttttgctcttaggctactagatactgttatttcaccccctgagggagggacaggaagagcacggatttattttctctccgtcttcagtacttattttagcatctagtcataccccagggagagatgcgagacggtgtcactggctcagctgaagcagatgagcccgtctctagcagagatgtgcctgtttcttaggcatccgttcagcactagtcttggccatcagatttttaaaaaagaaatagctcatgaggcatttgcaacttctcctctctagacttctttctagttttcctctgttgtgtcactgcgatgtgtccagggacaaagccataagtagagcatacatacttaagactatgctgtacatataagacaagacctgtctgggttaaagcacgaccttatgcccaagcatttactctggtgctgaataacgcgaactactggaatcagcctcccccaactctgcgcgccccctgcccccctgctcctatcccattcttgctctcaaatggaccacaccattctcaactcgtttataaataaagggatgcagaattgcaaaaaaaaaaaaaaaa

SEQ ID NO: 2481 - DNA, 1650 bp, Homo Sapiens
  NM_004848
agtctgagcccagagagccgcggggaccatggagccggtgccgctgcaggacttcgtgcgcgccttggaccccgcctccctcccgcgcgtgctgcgggtctgctcgggggtctacttcgagggctccatctatgagatctctgggaatgagtgctgcctctccacgggggacctgatcaaggtcacccaggtccgcctccagaaggtggtctgtgagaacccgaagaccagccagaccatggagctcgcccccaacttccagggctacttcacccccctcaacaccccacagagctatgaaaccctggaggagctggtctctgccacaactcagagctccaagcagctgcccacttgcttcatgtcgacccacaggattgtcacagagggcagggtggtgactgaggaccagctcctcatgcttgaggctgtggtgatgcacctcgggatccgctctgcccgctgtgtcctgggcatggagggtcagcaggtcatcctgcacctgcccctatcccagaaggggcccttctggacatgggagcctagtgcccctcgaactctgctccaggtcctacaggatccagccctgaaagacctcgtcctcacctgccccaccctgccctggcattccctgatcctgcggccccagtatgagatccaagccatcatgcacatcttctcaagtcttaggattgcagcaacacgctcggctgcccaaacccaaggcgaagaccttgccagagttcatcaaggatggctccagtacgtacagcaagattcctgcccacaggaagggccacaggcccgctaagccccaaaggcaggatctagatgatgatgaacatgattatgaagaaatacttgagcaatttcagaaaaccatctaagtgctggaggaaccacgcttcctaactgctgcttctcagggaatccgacaccagccaaccattttaagcctctaaaagacctcgggcaagtctcacagaaactgagctgcagacggggagtagctttgtggaaactgatttgatggacactgcaccagcttccttcaggttctagattcttgctacttagggcgggctggtttggacctaacatctcgcacgtgactccctcagcctcagagccttgggatgcagagcagctggcagggttcctctcaatcctgcaaccccagctgtcccaccggtggatgcagaggggaatccgaggccatcaaccttggtgacagcagcgcagtgccaatgctgatcacactgcatgggagattttgttaacgtctgccacccccactctcacccccaagctctaagcccccgggaggcctggactgtcttcctcatctctgtagcaccaagcctgatagatctgtatatggtaaacaggggtttaaccacatgtggttaacatggattaatgtgggaacttggcttcaagaacacaaccttaggaccttgggccccaaaagctggtggtgaaatgaggaggagccaatttaagaagacccttatggagacctgaggctgcagaaactggtaggtttcatcaggtggttaaagtcgtcaaagttgtaagtgactaaccaagattatttcattttaaaaccatagaataaaaatgacacctgagcttctctatgaatgaaaa

SEQ ID NO: 2482 - DNA, 1438 bp, Homo Sapiens
  NM_004851
gggaaagaaaatgaggccccaggacacctgggttcacacccaggtccccagcgatgtctccaccaccgctgctgcaacccctgctgctgctgctgcctctgctgaatgtggagccttccggggccacactgatccgcatccctcttcatcgagtccaacctggacgcaggatcctgaacctactgaggggatggagagaaccagcagagctccccaagttgggggccccatcccctggggacaagcccatcttcgtacctctctcgaactacagggatgtgcagtattttggggaaattgggctgggaacgcctccacaaaacttcactgttgcctttgacactggctcctccaatctctgggtcccgtccaggagatgccacttcttcagtgtgccctgctggttacaccaccgatttgatcccaaagcctctagctccttccaggccaatgggaccaagtttgccattcaatatggaactgggcgggtagatggaatcctgagcgaggacaagctgactattggtggaatcaagggtgcatcagtgattttcggggaggctctctgggagcccagcctggtcttcgcttttgcccattttgatgggatattgggcctcggttttcccattctgtctgtggaaggagttcggcccccgatggatgtactggtggagcaggggctattggataagcctgtcttctccttttacctcaacagggaccctgaagagcctgatggaggagagctggtcctggggggctcggacccggcacactacatcccacccctcaccttcgtgccagtcacggtccctgcctactggcagatccacatggagcgtgtgaaggtgggcccagggctgactctctgtgccaagggctgtgctgccatcctggatacgggcacgtccctcatcacaggacccactgaggagatccgggccctgcatgcagccattgggggaatccccttgctggctggggagtacatcatcctgtgctcggaaatcccaaagctccccgcagtctccttccttcttgggggggtctggtttaacctcacggcccatgattacgtcatccagactactcgaaatggcgtccgcctctgcttgtccggtttccaggccctggatgtccctccgcctgcagggcccttctggatcctcggtgacgtcttcttggggacgtatgtggccgtcttcgaccgcggggacatgaagagcagcgcccgggtgggcctggcgcgcgctcgcactcgcggagcggacctcggatggggagagactgcgcaggcgcagttccccgggtgacgcccaagtgaagcgcatgcgcagcgggtggtcgcggaggtcctgctacccagtaaaaatccactatttccattgaaaaaaaaaaaaaaaaaaaaaaaaaaaaaaaaaaaaaaaaaaaaaaa

SEQ ID NO: 2483 - DNA, 988 bp, Homo Sapiens
  NM_004853
ctgattatagttctgaggccctagctactcactttgcaaactccaggctccggtcgcgcacgggacgaactgcggggagtgagccgcgcgggccgccgtagtcagctgctaagagcaggaagagtccgagcggcgggcggagtctgcaggatggcaccggacccctggttctccacatacgattctacttgtcaaattgcccaagaaattgctgagaaaattcaacaacgaaatcaatatgaaagaaaaggtgaaaaggcaccaaagcttaccgtgacaatcagagctttgttgcagaacctgaaggaaaagatcgcccttttgaaggacttattgctaagagctgtgtcaacacatcagataacacagcttgaaggggaccgaagacagaacctcttggatgatcttgtaactcgagagagactacttctggcatcctttaagaatgagggtgccgaaccagatctaatcaggtccagcctgatgagtgaagaggctaagcgaggagcacccaacccttggctctttgaggagccagaggagaccagaggcttgggttttgatgaaatccggcaacagcagcagaaaattatccaagaacaggacgcaggccttgatgccctttcctctatcataagtcgccaaaaacaaatggggcaggaaattgggaatgaattggatgaacaaaatgagataattgacgaccttgccaacctagtggagaacacagatgaaaaacttcgcaatgaaaccaggcgggtaaacatggtggacagaaagtcagcctcttgtgggatgatcatggtgattttactgctgcttgtggctatcgtggttgttgcagtctggccgaccaactgatggcagtaaagagaccaccagcagtgacacctgccaatgacagatgcaagcccaacacccttttggtacgcaaaacctgctctcaataaattcccccaaagctctgaaaaaaaaaaaaaaaaaaaaa

SEQ ID NO: 2484 - DNA, 2872 bp, Homo Sapiens
  NM_004854
aggcggcgcgcacggccggataggcgcgagggggccgcgtgaggcggtgccggcgttctggcccccaaagccggtctagcgcgccgggcgtcttccttacttccgctgccgccgccgccacatcccgggacccgacgggccgcggcgcggaggcctcggggcaaggtggggcgggcctcccgagctcccaggaccccgcgcgcttcgcccacaggcccggcgaagcccgacccgcgcggcgcccccagggccaggggaggagcctaaggacccggacgagcgccgctccagtaggtgacaagaggaaccaagaacctcagttcaggggaaacacagcaaggaaatgtgagccccaggctgcagaaggaagagtcagtgaatggctgcggtgtgacaacatgcaccaccagtggcttctgctggccgcatgcttttgggtgattttcatgttcatggtggctagcaagttcatcacgttgacctttaaagacccagatgtgtacagtgccaaacaggagtttctgttcctgacaaccatgccggaagtgaggaagttgccagaagagaagcacattcctgaggaactgaagccaactgggaaggagcttccagacagccagctcgttcagcccctggtctacatggagcgcctggaactcatcagaaacgtctgcagggatgatgccctgaagaatctctcgcacactcctgtctccaagtttgtcctggaccgaatatttgtctgtgacaagcacaagattcttttctgccagactcccaaagtgggcaacacccagtggaagaaagtgctgattgttctaaatggagcattttcttccattgaggagatccccgaaaacgtggtgcacgaccacgagaagaacggccttcctcggctctcttccttcagtgatgcagaaattcagaagcgattgaaaacatacttcaagttttttattgtaagagatcccttcgaaagacttatttctgcatttaaggataaatttgttcacaatccccggtttgagccttggtacaggcatgagattgctcctggcatcatcagaaaatacaggaggaaccggacagagacccgggggatccagtttgaagatttcgtgcgctacctcggcgatccgaaccacagatggctagaccttcagtttggggaccacatcattcactgggtgacgtatgtagagctctgtgctccctgtgagataatgtacagtgtgattggacaccacgagaccctggaggacgatgccccatacatcttaaaagaggctggcattgaccacctggtgtcatacccgactatccctccgggcattaccgtgtataacagaaccaaggtggagcactatttcctgggcatcagcaaacgagacatccgacgcctgtatgcccgtttcgaaggggactttaagctctttgggtaccagaaaccagactttttgctaaactaatgcataagacctatgaattcaaatatctttattagacctggggctaaccaggtgaagatctgagcccagaaatgacccttcctccaccacacccctcctttgaggacgcccggggtctcccacaggcctgtgagttgcctcggcatatgacgcagaaccccaactgttacaacttagtttggatgtaagatgctctgaggaccctgcccacacccctgcgtgcattaggatgtcgctggcctttgctcacctcagaggggagaaaaggctaaagatttgcagtttgacagcccagcagggaggaagcatcacacagcgttaggagccgtttccttcaggtgttaaggaaggggatgcccctgaggttctcctggctagtcagggtggcttcacccatcactggtgggttgcaggaacagcacccaggactctgaggagggacagagaagcaagggggctgctgaaatcgcagagacttttgcagcatcagatctgaggagtaaaacggcacctctggccttcatcttggtgctgcgacaattgtggaggcaaagcattctttctgtgactattttgttcctgtagacagtcagcgatggccagagggtggtgtggtgtccaggggtccatctttccagaatccatgcctgtgtaatgctggtccatgcttctgaacctgtgtctgccaagcgcctatttcattcagcacaagacatacgattttagaaggtgaggggaggggaggctttttctacctgagaaggggagtgtctttgagggccttaaaaggaccatggcccaggaatgggggcgctggttgggcttggagctcaggctgctgtggatcccggcgcatcagttctgacttgccttacctgggtggacagcagtgaatctccacctgtcttctccagggagctcccatgttggggctgaagacgagcaggggcaacctgccagcatcacagaattcagtgtagtttatacatttcgattcctttcatctcagcaaaatgggcactgccagagccatttctgatcacaccaccatcctggaccatgtgactggaaggtgggtaaccaagttcaccagcaataaaacccagcgcccaggtagcctccagcagtgcggcttcctggcaacaaggtaggccctggtgcagggcaagccgcagcgaccatttcagataccgtccacagccaggaccgctgagaactgggacagtttcctgggatgagtgccagcctgagcctgcatggtgccgccgagcccggggtggaggagggagccaggcttcgcttcaaggcggcctctaccttttctcagaatggtttcctgattgtgtcaatgtgaaagttaaataaaatttatgtgccaaacctgaaaaaaaaaaaaaaaaaaa

SEQ ID NO: 2485 - DNA, 2227 bp, Homo Sapiens
  NM_004855
gactgttctgcgcctgctccacgtcactaaactcgctaccgcctgctcccctccagagaccgggggccttccagcagttttcggacccccgagcacagagaccgccaagccaaaggcgagtagcaatccctcggttcggaaacggcgaaaggaaaccgcaaggaggccaccacgtcgggtgggagctacgaagttgcccgttcccggttacttccgggcttgcgagcgacgactgctctcaaaggccaaacttaatggatggacgagcagcgcgctactgcagctttcttccgccttaggaaggtggcggccagggatgaggaggcccctaagcaagtgcggaatggagccggggggcggagatgccagcctcactttgcatggtctccagaaccgctcccacggcaagataaagctgcgaaagagaaagtctaccttgtacttcaacacccaggagaagagcgccaggcgccgcggggatcttcttggagaaaatatttatctgctcttgtttaccatagctttacgaatattaaactgctttttagtgcagacaagttttgttccagatgaatactggcagtctcttgaagtttcacatcacatggttttcaattatggttatttgacttgggaatggacagagagactgaggagttacacttatcccttaatctttgcaagcatttacaagattcttcatcttttagggaaagatagtgttcagttgctgatttggattcctagacttgcccaagcacttctgtctgctgtagcagatgtgagactttactcattaatgaagcaactagaaaatcaggaagtggcaagatgggtgtttttttgccagttgtgctcctggttcacatggtattgctgtaccagaacccttacaaacaccatggaaactgttctcactataattgctcttttctactatcctttggaaggttcaaagtctatgaacagtgtcaaatactcatccctggtggcacttgccttcataattcgtcccacagctgtcattctgtggacacctttgctcttcagacatttctgtcaagaaccaagaaagcttgatcttattctacatcattttttacctgtaggctttgttactttgagtttgtctctgatgattgatcgtattttttttggccaatggactctggttcaatttaattttttgaaatttaacgtgctgcagaactggggaacattttatggttctcatccatggcactggtacttcagtcaaggatttccagttatcttgggtactcacttacccttctttattcatggctgctatctagcaccaaagagataccggatacttttggtgactgtgctgtggacactgcttgtttatagcatgttgagccacaaagaattcaggtttatttatccagttttaccattctgtatggtgttctgtggatactcattaacccacctgaaaacatggaagaaaccagctctaagtttcctgtttttatcaaatttgttcctcgccctttatactggtttagttcatcaacgaggtactcttgatgtcatgagtcatattcaaaaagtttgttacaacaatcccaataaatcttcagcttcaatatttataatgatgccttgccactctactccttattacagccatgttcactgcccacttcccatgagatttctccagtgcccgccagacctgactggaaaaagtcattatcttgatgaagcagatgtattttacctaaatcccttaaactggttacatagagagtttcatgatgatgcatcattgcctactcacttgatcaccttcagcattttggaagaggaaataagcgctttcctaatttcaagcaattataaaagaactgctgttttcttccacactcacttgccagagggtcgaattggaagtcacatatatgtctatgaacggaagttaaaagggaaattcaacatgaagatgaaattctgaactttcctagataaattaacattgctgggtggaaatattcagatgctgcttaaatacttcggtaaacactgggtaagattcatggaacttagaaaaaagctgtatgaactgctttaccaaatatcactactgaggaaatgtataaaataccacatagtataaaattacatgttaatacaatgccagattttaaataaagacctttagttttcctcaaaaaaaaaaaaaaaaaaaaaaaaaaaaaaa

SEQ ID NO: 2486 - DNA, 4010 bp, Homo Sapiens
  NM_004858
attggttgcggcggatgcctcgcgggccggtggctatggaggcggcggcggttgatggttgaccgttggctccggggtgggggtcgccgttcgagtgatctgctcagacccgaccagagggcgcgggctgctgatgcttggcttggagcccgtgggggagacctagttcggctccgccatgccggccgccgggagtaacgagccggacggcgtcctcagctatcagagaccagatgaagaagctgtggtggatcagggtgggaccagtacaattctcaacattcactatgaaaaagaagagctggaaggtcacagaactctgtatgtgggagttcggatgccgcttggccggcagagccatcggcatcaccgcactcatggccagaagcaccggagacgagggcggggcaaaggagccagccagggggaggaaggcctggaagccctggcccacgacacaccatctcagcgtgttcagttcattcttggcaccgaggaagatgaagagcatgtgcctcatgagctgtttacagagctggatgagatctgtatgaaagagggagaagatgctgagtggaaggaaacagccaggtggctgaagtttgaagaagatgttgaagatgggggagaacgctggagcaagccttatgtggcaaccctttcattgcacagcctgtttgagctaaggagctgccttattaatggaacagtcctcctggatatgcatgcaaatagcatagaagaaatttcagacctgatcctggatcagcaagaactgtccagtgacctgaatgacagcatgagggttaaagtgcgggaagcccttctcaaaaagcatcatcatcagaatgaaaagaagagaaacaacctcattcccattgttcgctcctttgctgaggttggcaagaagcagtctgatcctcatttgatggataaacatggtcaaaccgtgtctcctcagtctgttccaactacaaatcttgaagtaaaaaatggagtgaattgtgaacatagtcctgtggatttaagcaaggtagaccttcatttcatgaaaaaaattcctactggggccgaggcctccaatgtcctggttggagaggtggatattttggaccgtcccattgttgcctttgtgaggctgtctccagctgttcttctctcaggcctaacagaagtgccaatcccaacaagatttttgtttatcttattgggtccagtagggaaaggtcagcagtaccatgagattggcagatccatggccaccatcatgacagatgagatttttcatgacgtagcatataaggcaaaagagcgagatgatctcctggcggggattgatgagttcctagaccaggtgacggtgctccctccaggagagtgggatccctccattagaattgagccacccaaaaatgtcccttcccaggagaaaaggaaaatgcctggagttccaaatggaaatgtttgccacatagaacaggaaccacatgggggtcacagtgggccagaacttcagcgcactgggcggctatttgggggcttggtgctggacatcaagcggaaggccccctggtactggagcgactaccgagatgcactcagcttacagtgtttggcttcctttctgttcctgtactgtgcctgcatgtcacctgtcatcacctttgggggactgcttggagaagccactgagggacgcataagtgcaattgaatccttgtttggagcttccatgactgggattgcttattccttgtttgcgggacaggctctcaccatcctgggaagtactggaccagtgcttgtgtttgaaaagattttgttcaaattctgcaaagactatgctctttcatacctctccctgcgagcttgtattggactgtggaccgctttcctgtgtattgtccttgtggcaactgatgccagttcccttgtctgctacattacccgtttcactgaagaagcatttgcctccctaatttgcattattttcatctatgaagcaatagaaaaactgattcacctggcagagacctaccccatccacatgcacagccagctggaccaccttagcctctattactgcaggtgtactctgccagagaatccaaacaatcacaccctccagtactggaaggaccacaacatcgtgacagcagaagtccactgggctaacctgactgtcagtgaatgccaggagatgcatggagagttcatgggatctgcgtgcggccatcatggaccctacactcctgatgtcctcttttggtcctgtattctctttttcaccaccttcatcctctcaagcaccttaaagacgtttaagacgagccgttatttcccaaccagagtacgctccatggtgagtgactttgctgttttcctcactatcttcacaatggtgattattgattttttgattggagtcccatcaccaaagcttcaagttcccagtgtgttcaagccaacaagggatgatcgcggatggattattaatcccattggccccaatccctggtggactgtgatagctgcaattatcccagctcttctctgtactatcttgatattcatggatcagcagatcacagccgtcattattaacaggaaggaacataagctcaagaaaggctgtggctaccacctggacctactgatggtggccatcatgctgggtgtctgctccatcatgggcctgccctggtttgtagctgcaactgtcttgtccatcacacatgtgaacagcctcaagctagaatctgaatgctctgctcctggagaacagcccaagttcctgggcatccgagaacagagagtgacaggccttatgatctttgtgctgatgggctgctcagtcttcatgacggctatcttaaagtttattccaatgccagtactctacggagttttcctttacatgggagtttcttcactacagggaattcagttctttgatcgtctaaagctctttgggatgcccgcaaagcaccagccagatttcatctacctgcggcatgtgccgctgcgcaaagtgcacctcttcaccctcatccagttgacctgtctcgtcctgctctgggtcatcaaggcatctccagctgccattgttttcccaatgatggttttggccttggtctttgtcaggaaagtcatggatctctgtttctctaagcgagagctgagctggctagatgatctcatgcctgaaagcaaaaagaagaagttggatgatgccaaaaagaaggccaaggaggaagaggtcatagtccttgcaccaactgtatacctgggggcctcaaattacagaacataggaagggtcatgtgaaaagtcagcatgtctggaatcccgagggttatatttaggagctgggaagattacccccaaagatgttctcagctaagaatggattagggattcttgcttctgtctgttcttaatttttgggtttgacaaccacttattttttcctttgtttacaatctactcaccaggctcatacctacaatgtgaacatacagtatgcccttattagcagattcaatggctcacattctttcaaaaggtctaatttgacaaatacataagacccattatttcctagaatgtttgtaatatatctaattgcaaatggtgctgtggttggcaccatgcaaagataacttgcataggactttctgtcttttttcatttccctcagcacttggcatcttgtcatctacacaatggaccctcaataaatggcctatatgtgcaaagaaagaatgtgtagcaaatgaaaataccagaccaagaaatgagtgagctgggaagtgtttccaaatacagttagtgcctaaaatagtgtcctttgaaaaaacttttaaaagacttttttttaggccaggcataatgggttatccctgtaattccagggcttttgggagttgaagctggaggattacttgaggccagaagtttgagactagcctaggcaatataatgagaccctgtctctacaaaaaaaaaaa

SEQ ID NO: 2487 - DNA, 8575 bp, Homo Sapiens
  NM_004859
agactggcgaaagtgatgagtctaaaaaagtagtccctccggttcctctgtttccccccatgtggcgtcaggaagcgaggcaccgggcgcactgcgccccgaattcctgcgcccgccgcgcgcggcgctccgtggaggggtacataaggcggagggggtgaggcgactgggcggagttctgtcgccgggatccttccgctgggctcagccgtttccggagtctgcgctgcgcccggttccgccattgcggctctcctggcccctggagcctccgcccccgacccgagctctttcgtctgcctgccagtttcctgcgtccccggagaggatcctgctgagcccagcctcccccctccccttctcctcctctcccttggagagcccgggcagccactgccccgcagccccagtgacaggaggagaccataacccccgacagcgccatggcccagattctgccaattcgttttcaggagcatctccagctccagaacctgggtatcaacccagcaaacattggcttcagtaccctgactatggagtctgacaaattcatctgcattagagaaaaagtaggagagcaggcccaggtggtaatcattgatatgaatgacccaagtaatccaattcgaagaccaatttcagcagacagcgccatcatgaatccagctagcaaagtaattgcactgaaagctgggaaaactcttcagatttttaacattgaaatgaaaagtaaaatgaaggctcataccatgactgatgatgtcaccttttggaaatggatctctttgaatacggttgctcttgttacggataatgcagtttatcactggagtatggaaggagagtctcagccagtgaaaatgtttgatcgccattctagccttgcagggtgccagattatcaattaccgtacagatgcaaaacaaaagtggttacttctgactggtatatctgcacagcaaaatcgtgtggtgggagctatgcagctatattctgtagataggaaagtgtctcagcccattgaaggacatgcagctagctttgcacagtttaagatggaaggaaatgcagaagaatcaacgttattttgttttgcagttcggggccaagctggagggaagttacatattattgaagttggcacaccacctacagggaaccagccctttccaaagaaggcagtggatgtcttctttcctccagaagcacaaaatgattttcctgttgcaatgcagatcagtgaaaagcatgatgtggtgttcttgataaccaagtatggttatatccacctctatgatcttgagactggtacctgcatctacatgaatagaatcagtggagaaacaatttttgttactgcacctcatgaagccacagctggaataattggagtaaacagaaagggacaagttctgtcagtgtgtgtggaagaagaaaacataattccttacatcaccaatgttctacaaaatcctgatttggctctgagaatggctgtacgtaataacttagccggtgctgaagaactctttgcccggaaatttaatgctctttttgcccagggaaattactcggaggcagcaaaggtggctgctaatgcaccaaagggaattcttcgtactccagacactatccgtcggttccagagtgtcccagcccagccaggtcaaacttctcctctacttcagtactttggtatccttttggaccagggacagctcaacaaatacgaatccttagagctttgtaggcctgtacttcagcaagggcgaaaacagcttttggagaaatggttaaaagaagataagctggaatgttctgaagaactgggtgatcttgtgaaatctgtggaccctacattggcacttagtgtgtacctaagggctaacgtcccaaataaagtcattcagtgctttgcagaaacaggtcaagtccaaaagattgttttatatgctaaaaaagttggatacactccagattggatatttctgctgagaaatgtaatgcgaatcagtccagatcagggacagcagtttgcccaaatgttagttcaagatgaagagcctcttgctgacatcacacagattgtagatgtctttatggaatacaatctaattcagcagtgtactgcattcttgcttgatgctctgaagaataatcgcccatctgaaggtcctttacagacgcggttacttgagatgaaccttatgcatgcgcctcaagttgcagatgctattctaggcaatcagatgttcacacattatgaccgggctcatattgctcaactgtgtgaaaaggctggcctactgcagcgtgcattagaacatttcactgatttatatgatataaaacgtgcagtggttcacacccatcttcttaaccctgagtggttagtcaactactttggttccttatcagtagaagactccctagaatgtctcagagccatgctgtctgccaacatccgtcagaatctgcagatttgtgttcaggtggcttctaaatatcatgaacaactgtcaactcagtctctgattgaactttttgaatctttcaagagttttgaaggtctcttttattttctgggatccattgttaactttagccaggacccagatgtgcactttaaatatattcaggcagcttgcaagactgggcaaatcaaagaagtagaaagaatctgtagagaaagcaactgctacgatcctgagcgagtcaagaattttcttaaggaagcaaaactaacagatcagctaccacttatcattgtgtgtgatcgatttgactttgtccatgatttggtgctctatttatatagaaataatcttcaaaagtatatagagatatatgtacagaaggtgaatccaagtcgacttcctgtagttattggaggattacttgatgttgactgttctgaagatgtcataaaaaacttgattcttgttgtaagaggtcaattctctactgatgagcttgttgctgaggttgaaaaaagaaacagattgaaactgcttctgccttggctagaggccagaattcatgagggctgtgaggagcctgctactcacaatgccttagccaaaatctacatagacagtaataacaacccggagagatttcttcgtgaaaatccctactatgacagtcgcgttgttggaaagtattgtgagaagagagatccacatctggcctgtgttgcttatgaacgtggccaatgtgatctggaacttattaatgtttgcaatgagaattccctcttcaaaagtctttctcgctacctggtacgtcgaaaggatccagaattgtggggcagcgtgctgctggaaagcaatccttacaggagacccctaattgaccaggttgtacaaacagctttgtctgagactcaggaccctgaagaagtgtcagtaactgtaaaggctttcatgactgcagaccttcctaatgaactcattgaactgctggagaaaattgtccttgataactctgtattcagtgaacacaggaatctgcaaaacctccttatcctcactgcaattaaggctgaccgtacacgtgttatggagtatattaaccgcctggataattatgatgccccagatattgccaatatcgccatcagcaatgagctgtttgaagaagcatttgccattttccggaaatttgatgtcaatacttcagcagttcaggtcttaattgagcatattggaaacttggatcgggcatatgagtttgctgaacgttgcaatgaacctgcggtctggagtcaacttgcaaaagcccagttgcagaaaggaatggtgaaagaagccattgattcttatatcaaagcagatgatccttcctcctacatggaagttgttcaggctgccaatactagtggaaactgggaagaactggtgaagtacttgcagatggcccgtaagaaggctcgagagtcctatgtggagacagaactgatattcgcactggctaaaacaaaccgccttgcagagttagaagaatttatcaatggaccaaataatgctcatatccaacaagttggtgaccgttgttatgatgaaaaaatgtatgatgctgctaagttgttgtacaataatgtttccaattttggacgtttggcatctaccctggttcacctgggtgaatatcaggcagctgttgatggggctaggaaagctaacagtactcgaacatggaaagaggtctgcttcgcctgtgtagatgggaaagaattccgtcttgctcagatgtgtggacttcatattgttgtacatgcagatgaattagaagaacttatcaactactatcaggatcgtggctattttgaagagctgatcaccatgttggaagcagcactgggacttgagcgagctcacatgggaatgtttactgaattagctattctatactctaaatttaagcctcagaaaatgagggagcacctggagctgttctggtctagagtgaatattcccaaggtgctaagagctgcagaacaagctcatctttgggcagaactggtgtttttgtatgacaagtatgaagaatatgataatgccataattaccatgatgaatcatccaactgatgcctggaaagaagggcaattcaaagatatcattaccaaggttgccaatgtggaactatactacagagcaatacagttctacttagaattcaagcctctgttgttaaatgatttgctgatggtgctgtctccacggttggatcacactcgtgcagtcaattatttcagcaaggttaaacagctaccactggtgaaaccgtatttgcgttcagttcagaaccataacaacaaatctgtgaatgaatcattgaacaatctttttattacagaagaagattatcaggctctgcgaacatcaatagatgcttatgacaactttgacaatatctcgcttgctcagcgtttggaaaaacatgaactcattgagttcaggagaattgctgcttatctcttcaaaggcaacaatcgctggaaacagagtgtagagctgtgcaagaaagacagcctttacaaggatgcaatgcagtatgcttctgaatctaaagatactgaattggctgaagaactcctgcagtggtttttgcaggaagaaaaaagagagtgctttggagcttgtctgtttacctgttacgatcttttaaggccagatgtcgtcctagaaactgcatggaggcacaatatcatggattttgccatgccctatttcatccaggtcatgaaggagtacttgacaaaggtggataaattagatgcttcagaatcactgagaaaagaagaagaacaagctacagagacacaacccattgtttatggtcagccccagttgatgctgacagcaggacccagtgttgccgtccctccccaggcaccttttggttatggttataccgcaccaccgtatggacagccacagcctggctttgggtacagcatgtgagatgaagcgctgatcctgtagtcacctattttcgtactgaaacatcgtctttacccacttctcagtttataatgggggaaaacaggcaacgtgttcttgtaacctttatttcatgaaggacttctttttgtttctaactataaacttggatcacctatgttaaaaccttatttcacattccacatcattttagaatttattttcgaaggggaatagtttcaatgttttattcacttgggctttttttcttccccctctttctttaaagaactgctcaatattcaatctgttgtgaagaacctgatttgcactctgtagtgtttaaagaaacaaagaaactctaatattgaatctcttaaatttagtgtatgtaaacagcttacaaatacgtattgtctaaatgcatttaaatctgttttattcaaagaaaagctaaagcaaaaacactggcatatgaccatgcaagactgtcagtgccaacaaagacaacactaatcagcacatcgtacactggattgcagtgcttcccagattattgaaaaatgttacagacaacttgcctgatttttaaatgagcgtaaaaggccctctaacctatgcaggtttccccattatgcatatagaaaatgctagtatgttttgctcacttcatatgtaacaggtgcccttatgttgtgctgtatcctgtgctttttctgtgggaccattccattcaggagcaaagagcaccatgattccaatcttgtgtgtgtttactaacccttccctgaggtttgtgtatgttggatattgtggtgttttagatcactgagtgtacagaagagagaaattcaaacaaaatattgctgttcttcagttttgtttgtggaatttgaaattactcaaatttaaaataaattactggactgtggaaataacatagaattgaagttttaattaaataccactcaaacgaaaagaacagtagtttttgtagttttatattggatactgaggcattagggaggcatgaaaggaagaggaatgaggattgagacatgtgaagacattgtgcattatatcaatgtgcattcctgtagttcattaacaaggtacatgcaatagtctaaagaaccagagtcactactatagtggcttaacatttaatctgtctccaatattttaaccaagtgacaccgaggtttttatcgaagcatttcacttaaatgaacaaatcatggctgttatattaacttgaaataaaatatatttaaacatgtagttaacatgctctttctcatcatgaattataaaggtgcccaaattatgggtatcttgatttttttcaaaaattggttgtgtgaatccagctcttgcttatggctgagaatgttcctaaagttcatttcactatcccttaatcctcaatagctacacatacccccttgcctagttagtcttgcactgctttacaactctcttaggcaaattacctaacataagctccacagaagagttttttaaaacttaaaatccctgtcccaccaggtgtggtggctcatgcctgtaatcccagcactttgggaggctgaggcaggcggattgcttgaggccaggagttcgagacaagcctgaccaacatggtgactccatctctactaaaaataaaaaatcagccaggtgtgatggtggatgcctataagatcctagctgctactcaggaggcaggaggctgaggcatgagaatcacttgaacctgtgaggcaaaggttgtagtgagccaagatcacgtcactgcactccatcctgggtgacagaatgagactcttgtctcaaaaaacaaaaaaacctatttagtttcatccaggacattaagtgaaagtgtttaatgtgagtgcaggtcagtgaagaatacaatggtgcccctgctttgatttgtgggaggtgccatcagttttccccaccactgcttttgcaccctcagtgcaaatatcaacacagagaaaaaaaaaataataatagtattatgaaaacattgactctgtggagaccctgtgggttctgcagagtatactttgaaaactataagattatgagttctataaaataccaagtacagatgaactagaaaacaagcatatatccacaattaccagaattttcatagtattccttttagtagatatgccatgacagttacttagccaccccatgccatcctgttgggaatgccactacctttgaatttggagccatcagtctatctgaggcaaacctcagaaattacctgagccagaatcatgcacttagcactgagttcaactcagtcttaacgttgcattttgttgcatcacttttgcagccagtaaacattctgtttagaaatagttgctattgtggcatcattcacagttgcaatttttctcctgtgctgtcatatgcctgtgcgaagtgtattaaatgaatcaaatattagaaatttcaaggctgtctttagtgttctgcccacaatactccaccaatgaccttagaccttgagatggtgctataacgctgcttatattgcagttaaccatagagaggtggagccacttaaaatgggcctattaccaaaattctccctggcatcattacagttcttggggatacactgattttagaaattactgtcagtatcctcctaaaagaaggcttaaatagtttctaacaagatgactatcaggaagctatgtggcttggggagttgggaccctctgcctcatattctgggtaactggtataacatagtaattattaggattgtatcaagtgtatctaaagatcaaaagggaaaaaaggcacccttaattgtcaaagttagttctaggaaaaaatactagcagggatgacaaactacgttcactttacagttaccataaattcttacttgggcccacccatttccatctgttaaggtccataaggttactcaagtttcagtggcttcattgttacaagaaaggggggaagtgagaaactttaataggctgtgatttagaaccactgctgattaacctttggccagtatgggtcagggaaggtgaacatgaaacactgcacagtaggttgtatcaatgctataaaac

SEQ ID NO: 2488 - DNA, 2642 bp, Homo Sapiens
  NM_004862
gtttctctccctgcccccgcgacttcgcgcaagatccgggaaggacacccgaggcccctgggagaccctggggaggtgaaaatcagagagcgaagcgggccgtggcccctaggcctgacccctccccgcggggtaaggcgggcaccccgcgagcgcaggggtcctcttactgctgatggcacccagctctgggcccagacgccgctcaccgtccaccgccggtgctgggtaaaatgtcggttccaggaccttaccaggcggccactgggccttcctcagcaccatccgcacctccatcctatgaagagacagtggctgttaacagttattaccccacacctccagctcccatgcctgggccaactacggggcttgtgacggggcctgatgggaagggcatgaatcctccttcgtattatacccagccagcgcccatccccaataacaatccaattaccgtgcagacggtctacgtgcagcaccccatcacctttttggaccgccctatccaaatgtgttgtccttcctgcaacaagatgatcgtgagtcagctgtcctataacgccggtgctctgacctggctgtcctgcgggagcctgtgcctgctggggtgcatagcgggctgctgcttcatccccttctgcgtggatgccctgcaggacgtggaccattactgtcccaactgcagagctctcctgggcacctacaagcgtttgtaggactcagccagacgtggagggagccgggtgccgcaggaagtcctttccacctctcatccagcttcacgcctggtggaggttctgccctggtggtctcacctctccagggggcccaccttcatgtcttcttttggggggaatacgtcgcaaaactaacaaatctccaaaccccagaaattgctgcttggagtcgtgcataggacttgcaaagacattccccttgagtgtcagttccacggtttcctgcctccctgagaccctgagtcctgccatctaactgtgatcattgccctatccgaatatcttcctgtgatctgccatcagtggctcttttttcctgcttccatgggcctttctggtggcagtctcaaactgagaagccacagttgccttatttttgaggctgttctgcccagagctcggctgaaccagcctttagtgcctaccattatcttatccgtctcttcccgtccctgatgacaaagatcttgccttacagactttacaggcttggctttgagattctgtaactgcagacttcattagcacacagattcactttaatttcttaattttttttttaaatacaaggagggggctattaacacccagtacagacatatccacaaggtcgtaaatgcatgctagaaaaatagggctggatcttatcactgccctgtctccccttgtttctctgtgccagatcttcagtgcccctttccatacagggatttttttctcatagagtaattatatgaacagtttttatgacctccttttggtctgaaatacttttgaacagaatttcttttttttaaaaaaaaacagagatggggtcttactatgttgcccaggctggtgtcgaactcctgggctcaagcgatccttctgccttggcctcccgaagtgctgggattgcaggcataagctaccatgctgggcctgaacataatttcaagaggaggatttataaaaccattttctgtaatcaaatgattggtgtcattttcccatttgccaatgtagtctcacttaaaaaaaaaaaaaagaaaaagaaatggataatttcatctactgcctttacttggggttaatgtgattcttaaacaccttcatcatggaactctcagagtggggtccgttttggtttcctggtggtgggttttgaaagataagggaaagcacattttgagcatgtctgggtaccatggtgcggatgcttgggaaccagaactgtttcagaggaatctaaagtctgattttagttttcagagacacagcttgttgtaaaacatgagaagacatgatttctaggactcaagcagcaagccaggattctaggttggctgctgtgtcatctttgaagtcaagacaaagctgggctcgaccttcaagggtcctcgttttgataatacttcagaatagggaactcatgtgaatactactatgtagaaataaaacctagaccttgagcgaacatctgtatattggttgaaaacgatagtggtaaccattgatcccccttcatttgatgtttggaaaattccagtaattatcatttttgcaacgaatatggataccacatagtactttggtgttacctgcttttgaaaaataaagtctttggttcacccggtgaactatttatgagttcttttggtgtgaagaaagggctcatgttgcatttccagccattgctacaaagaacctttatttgttcagtaacggtagaaaatccttcccgattaaaaacttcagacttgctgaatatcctgcaatgtcaagatgaccgatgttgagttgggtggatttgctaacgagtcagatttgaacatgaggctattggaacccaataggcgtcattgatggcggcaagccatagctttcaagttttaataaaatgcacaaaagagaaaaaaaaaa

SEQ ID NO: 2489 - DNA, 7250 bp, Homo Sapiens
  NM_004863
ccttggccgagaccggtcctctgcggagagggccccgccctctgtgaaggcccgcccgggaattggcggcggcgctgcagccatttccggtttcggggaggtgggtggggtgcggagcgggacttggagcagccgccgccgctgccaccgcctacagagcctgccttgcgcctggtgctgccaggaagatgcggccggagcccggaggctgctgctgccgccgcacggtgcgggcgaatggctgcgtggcgaacggggaagtacggaacgggtacgtgaggagcagcgctgcagccgcagccgcagccgccgccggccagatccatcatgttacacaaaatggaggactatataaaagaccgtttaatgaagcttttgaagaaacaccaatgctggttgctgtgctcacgtatgtggggtatggcgtactcaccctctttggatatcttcgagatttcttgaggtattggagaattgaaaagtgtcaccatgcaacagaaagagaagaacaaaaggactttgtgtcattgtatcaagattttgaaaacttttatacaaggaatctgtacatgaggataagagacaactggaatcggccaatctgtagtgtgcctggagccagggtggacatcatggagagacagtctcatgattataactggtccttcaagtatacagggaatataataaagggtgttataaacatgggttcctacaactatcttggatttgcacggaatactggatcatgtcaagaagcagccgccaaagtccttgaggagtatggagctggagtgtgcagtactcggcaggaaattggaaacctggacaagcatgaagaactagaggagcttgtagcaaggttcttaggagtagaagctgctatggcgtatggcatgggatttgcaacgaattcaatgaacattcctgctcttgttggcaaaggttgcctgattctgagtgatgaactgaatcatgcatcactggttctgggagccagactgtcaggagcaaccattagaatcttcaaacacaacaatatgcaaagcctagagaagctattgaaagatgccattgtttatggtcagcctcggacacgaaggccctggaagaaaattctcatccttgtggaaggaatatatagcatggagggatctattgttcgtcttcctgaagtgattgccctcaagaagaaatacaaggcatacttgtatctggatgaggctcacagcattggcgccctgggccccacaggccggggtgtggtggagtactttggcctggatcccgaggatgtggatgttatgatgggaacgttcacaaagagttttggtgcttctggaggatatattggaggcaagaaggagctgatagactacctgcgaacacattctcatagtgcagtgtatgccacgtcattgtcacctcctgtagtggagcagatcatcacctccatgaagtgcatcatggggcaggatggcaccagccttggtaaagagtgtgtacaacagttagctgaaaacaccaggtatttcaggagacgcctgaaagagatgggcttcatcatctatggaaatgaagactctccagtagtgcctttgatgctctacatgcctgccaaaattggcgcctttggacgggagatgctgaagcggaacatcggtgtcgttgtggttggatttcctgccaccccaattattgagtccagagccaggttttgcctgtcagcagctcataccaaagaaatacttgatactgctttaaaggagatagatgaagttggggacctattgcagctgaagtattcccgtcatcggttggtacctctactggacaggccctttgacgagacgacgtatgaagaaacagaagactgagcctttttggtgctccctcagaggaactctccctcacccaggacagcctgtggcctttgtgagccagttccaggaaccacacttctgtggccatctcacgtgaaagacattgcctcagctactgaaggtggccacctccactctaaatgacattttgtaaatagtaaaaaactgcttctaatccttcctttgctaaatctcacctttaaaaacgaaggtgactcactttgctttttcagtccattaaaaaaacattttattttgcaaccattctacttgtgaaatcacgctgaccctagcctgtctctggctaaccacacaggccattcccctctcccagcaccttgcagacttgggcccatcaagagctactgctggccctggctccgcagcctggatacttacctggccctcctccctagggagcaagtgccttccacttacttcccatccaggtctcagaggtctcaaggccaaccttggaatccttatttaaccattcaagtaatcaacggaagttttcaccctttaatcttaagtttagccttttaagaaaaacagtaagcgatgactgctgaaaggctcattgtgtaatctcccaagggtttggtcttattccattttcttctggtcaccagatgatttcttcctttaccatcaaatacttcttcataatggtcacagtctgaggatgtgcgcaaattctggttcttcccaagctctaaccgtaacacgtcccaccccctttttaaagcacttactgttttcagagcacccatatcccaccctggtgagaaggccactctcacatctgagtgttgggtacaaagctgctccgtagagtgatgtgcactcctggtgggtgaggggcaggggcagtggcagtgtgcaaagaattgattactccttgcagagcctgtggcttgcatttcctactgctttctacgtttgaaaattatgacagtctctggctaggtctgggtccagattaggatttaaactgataaaggaaactgttggtaaatcctctgctcagaaagcatttatcatgttcctatttaaggattaggtttattaatttaggcctcttagaagctaacccacttaaatattactcttctgaatgctagttctcttttattcttgatgtcctaagtcaattgaatctggcatctggggctagggtctgcctgtctacatattttttatttttttctgagaaattctgaacacatagatctctttcctaaactgacattttctattttgactgttttcatactataaccaggtaaagggacttctttcagagagctttatactgcctgaccaaagaacaaatctgaaaatcaccattttaaagttattttttcagttgaaccaaagtttaagtgaagaggacttttggcatattatacccaggatcagtttgtctttttgtatccatcaagtattacaggagaaggattgggaacagaatggaaaaacagtgtatgaaagtcatgttacaggccgagtgcggtggctcacacctgtaatcctagcactttgggaggctgaggcaggtggctcacttgaggtcaggaattcaagaccagcctggccaacatggtgaaaccccgtctctactaaaaagacaaaaaattagctgggcgtggtggcgggcacctataatcccacctacttggtaggctgaggcaggagaatcgcttgaacccaggaggcggaggttgcagtgagacgagattgtgccactgcactctagcctgggtgacagagcaaaactgtgtctcaaaaaaaaaagtcatgttacacatttaagtttttgaaattgctccttttatcggtaaagattctcaatccaaattctcctgggtgtgttgtcatcagctgtgatatgtttgtgcacattacgtatagcagaggatgtaagcaatattattgtttgtgaagttttgtttttaatgtcttgagtatgagttatgtttagtcactgtcagcatctgagaactttaataagcccttgagatattccaaagttttattttacttttttaaagaacagaaaaagatgaatgaaagaaccaaggagagatgcagagactatatttagcatgtataggttaaagtaagaaggaggttgtggtaactaaataggagtcctataaaatcaaatacattgtcaaccttttctgcacatctagtttcctaccatagaatcccactggaataccacatagcttttgcactgcagttactatttactaatgtaaacgtagggtttgtaaaagtcacaaacttataagcaatgaacttacctgctagtctttttattttggcttgcatgaagtcactgcaaattcaaatgtcagtaccggcatttaaaatatatctatatcactttgttggtacaaagttatttcaagataagtgtaattttgttacaagtttattttgaagagacaaatctcctgtgatctatgcaggacctctgtactttctaaagaacaaaatgttatgtagacattatacatggttggttgtctcttcttgaaactgtaatgtaaatctagggtccagtcatatcctaggtatcatcatttatccaagtacttggaggaatacaagtatatataaatacagtcattgagaataagtcgatttgaggcatacaagagtagtttcttacacagtttaacacggcctgattcaagactctgataggattcaaacagataccggttaaccatgactaccaaaactgatcatctgagtcgattgatagaggtgtgactagtccttagcactttttctcattcctctttttattcagcattgctgttacctatttcaggtttataagacctctttcagcagatcacatcagaagccaggaaatgcatagctaggagatgtcaaaagcccatatgaggagtggaccaagcagcagtggcggtttctcctcgcatctttttttttttaagctttaacttagcaggggcatggactttatagcactttttcaactttttgctttgctttggataagaaatccttacctttaaaaaaagcttctagtctccataacccccaaagtactgcttatttgtttgaagaatccagccatcgtagtgctttagtcactatcgtaaacattcatgatagggcaaggattttaaaacaggattcttgcttctgtagtcatcaaggtgaacagaagcatcctacacaaccactaagggctctatgtttgtgtcatgcctcttcaaacaccaaggagttgaacatgcttccagtgatttgtctccgtaatgccttcttcctttatttggcctttctttctttctgtaccttcaagttcttgatttttaaaattccaactctagagaaaaccaatatatggtggtgctgggctttgaagatagcatatcagacgccttggttctgtttgtacacttagccttacatttcaggaggaggcttttcattaggggcttaagctagctcctttggcttttaaaaaaaattttttttcaaatttcttcattacctaagggagcctgcatctaaatttctcaactagttcagcctagctgaattttctagtgtgtaatacactttgcttccttcttattggtgaaaaccagggggatgagtggcttccatggagagatttcctgatttctcagggaggaaaaaagtgatgacatttaccactacttttatgtttttcccctttttccaaattgataaggatttctggttcctagtgatccgggattgggcaacagtgcagaactgccagtcatgccgtaggccgtgaagaaagaatgtgagtaactgttgttttgcaaggatttgtagggttatgggcagttgttgtttgaagcattgctatgacctaattcccaaggtatctttcctctcttggtgttctaggtaagccaatgagctttaatctctacttgctataaccgtgtgcttagaaaaagaggtgagagtagtggttttccttcaaactgtccacattcatgaagattatgaattgttaggacagccagggcaagatagaccctgtctctacaaaaatttttttctaaattaaccgggcatggtggtgcctgcctgtagtcccacctgtgtgggagaatcacttgagcctgggaggtcaaggctgcagtgagccatgattgcacccctgcactccagcctgggtgacagagtgagaccctggctcaataagagggggaaaaaaaattgttaggagctgggtgcggatgcagcctgcaatcccagctacttgagaggctgaggccggaggattgcttaaacccaagaatttgagcgtagcctgggcaacacagcaagaccccatctaagaaaaaaatgttttttaaatcagcttagcccaaaggggttgtgaatggggaggtataaaaagcaaagattattttttggctactaagccaagaacttacagggattttttttttcagtcccagaacctacagataccctgctacttgcttcacgtggatgctcagtgcccagcagccatcttaatacattaaaccagtttaaaaaataccttccatgtggagaaaaacatgtctttttctcgcctcaactttatccacatgaaatgtgtgcccatggctgggcgcagtggctcacctgtaatcccaacactttgggaggctgaagcaggcagattgcttgaggccaggagttcgagaacagtctggccaacatggcgaaacctcatctctactaaaattacaaaaattagccgggcatggtggcacatgcctgtaatcccagctacgtcaggaggctgaggcacaggaattgcttgaacccaagaggcagaggatgcaatgagccaagatcacaccactgcactccagccttggcgacagagggagactctgtctcaaaaaaaaaaaaaaaaggtgtgcccaggcccctagccattgccatgtgcccagccagagagccaaattagagggctggcttccctatcacacagaataaatgctagtgctagccaatgatccctttgcttttaatgtatagaaaatactgttgttccttttgtcatttccagtgacatctgttttctaagcagctcttttctagggaggaaaccaaaggggctaggttaagaccctaatagaaatgttttttctaatctctggtgagtctggaagtgtcacattcacagtccacccttgggagtggcttggtggagctggggacaaggttttgtttactacatagtgcacatgataaatggccttaaactgtgattctttctggtaggataagttataataaactgaccctaaagaatgcaaaaaaaaaaaaaaaaaa

SEQ ID NO: 2490 - DNA, 1340 bp, Homo Sapiens
  NM_004865
gcactgtctctatgctccccagcgtctagtctatttattgtcgcggggaagctgcggccgcctcgcacccggaacaacaaagcaaggaagacggagtccgagcctcgggggctcctagcaacgggccggggcgggagttccatggagactggggagcgcgcccgtctcatcctcatccttgtcctccagcttctccttcgcatccgacgcaaccggcagcagcgctgccgccgcgtcctcagccaccgctccctcttcccacggatgtgatcttcgtggtggaaagctaaattttaaaaccaccccaatggatgcagacagtgatgttgcattggacattctaattacaaatgtagtctgtgtttttagaacaagatgtcatttaaacttaaggaagattgctttggaaggagcaaatgtaatttataaacgtgatgttggaaaagtattaatgaagcttagaaaacctagaattacagctacaatttggtcctcaggaaaaattatttgcactggagcaacaagtgaagaagaagctaaatttggtgccagacgcttagcccgtagtctgcagaaactaggttttcaggtaatatttacagattttaaggttgtaaacgttctggcagtgtgtaacatgccatttgaaatccgtttgccagaattcacaaagaacaatagacctcatgccagttacgaacctgaacttcatcctgctgtgtgctatcggataaaatctctaagagctacattacagattttttcaacaggaagtatcacagtaacagggcccaatgtaaaggctgttgctactgctgtggaacagatttacccatttgtgtttgaaagcaggaaagaaattttataattcaccacttaattggttagaatctctaactgagcaccttttaaacctgctgcacattggactcaaaaggaaaactggaccaacaataattgaggaaatagactcttttattcattcacggctacagtgtaagctccagtccctttggattttattccaaaccttgctgtaatataaaaggaagtttacaagacatgatattgctgcttttacaaaaggacattctatttattttcgcagtaattctcatgtccccataagcagagctgtcacagtgtgcactaccttagattgttttattgtcgtcattgttatttttttccattttgagctaatgtgttttatttgtgaatagtcttttacatttttgtatgctgaatatgggcaccaaagaacctgtaaaagttatctttttcaattgaatgtgcacaaataaaagtttggaaaagataaaaaaaaaaaaaaaaaaaaa

SEQ ID NO: 2491 - DNA, 1851 bp, Homo Sapiens
  NM_004867
gtgcaggtgaggcacgtttagcctgagccggccacggactccacttcccctgctcttcccccagtggcaaatccgcgccacctcgcaaacccccaactcaggcacttgggccccttttgggccccctctcgctcctccctttaggcacctccctgggcccgcccacggtctccccccagtttgggactgcgtcataagtatcccagacctcggcttgcagtagtgttagactgaagataaagtaagtgctgtttgggctaacaggatctcctcttgcagtctgcagcccaggacgctgattccagcagcgccttaccgcgcagcccgaagattcactatggtgaaaatcgccttcaatacccctaccgccgtgcaaaaggaggaggcgcggcaagacgtggaggccctcctgagccgcacggtcagaactcagatactgaccggcaaggagctccgagttgccacccaggaaaaagagggctcctctgggagatgtatgcttactctcttaggcctttcattcatcttggcaggacttattgttggtggagcctgcatttacaagtacttcatgcccaagagcaccatttaccgtggagagatgtgcttttttgattctgaggatcctgcaaattcccttcgtggaggagagcctaacttcctgcctgtgactgaggaggctgacattcgtgaggatgacaacattgcaatcattgatgtgcctgtccccagtttctctgatagtgaccctgcagcaattattcatgactttgaaaagggaatgactgcttacctggacttgttgctggggaactgctatctgatgcccctcaatacttctattgttatgcctccaaaaaatctggtagagctctttggcaaactggcgagtggcagatatctgcctcaaacttatgtggttcgagaagacctagttgctgtggaggaaattcgtgatgttagtaaccttggcatctttatttaccaactttgcaataacagaaagtccttccgccttcgtcgcagagacctcttgctgggtttcaacaaacgtgccattgataaatgctggaagattagacacttccccaacgaatttattgttgagaccaagatctgtcaagagtaagaggcaacagatagagtgtccttggtaataagaagtcagagatttacaatatgactttaacattaaggtttatgggatactcaagatatttactcatgcatttactctattgcttatgctttaaaaaaaggaaaaaaaaaaactactaaccactgcaagctcttgtcaaattttagtttaattggcattgcttgttttttgaaactgaaattacatgagtttcattttttctttgaatttatagggtttagatttctgaaagcagcatgaatatatcacctaacatcctgacaataaattccatccgttgttttttttgtttgtttgttttttcttttcctttaagtaagctctttattcatcttatggtggagcaattttaaaatttgaaatattttaaattgtttttgaactttttgtgtaaaatatatcagatctcaacattgttggtttcttttgtttttcattttgtacaactttcttgaatttagaaattacatctttgcagttctgttaggtgctctgtaattaacctgacttatatgtgaacaattttcatgagacagtcatttttaactaatgcagtgattctttctcactactatctgtattgtggaatgcacaaaattgtgtaggtgctgaatgctgtaaggagtttaggttgtatgaattctacaaccctataataaattttactctatacaaaaaaaaaaaaaaaaaaa

SEQ ID NO: 2492 - DNA, 4886 bp, Homo Sapiens
  NM_004873
gcaggcgcgccctggcacccgggccaagacgcccggagcggctgctgcagccagtagcggccccttcaccggctgccccgctcagacctagtcgggaggggtgcgaggcatgcagctgggggcccagctccggtgccgcaccccgtaaagggctgatcttccacctcgccacctcagccacgggacgccaagaccgcatccaattcagacttcttttggtgcttgtgaaactgaacacaacaaaagtatggatatgggaaaccaacatccttctattagtaggcttcaggaaatccaaaaggaagtaaaaagtgtagaacagcaagttatcggcttcagtggtctgtcagatgacaagaattacaagaaactggagaggattctaacaaaacagctttttgaaatagactctgtagatactgaaggaaaaggagatattcagcaagctaggaagcgggcagcacaggagacagaacgtcttctcaaagagttggagcagaatgcaaaccacccacaccggattgaaatacagaacatttttgaggaagcccagtccctcgtgagagagaaaattgtgccattttataatggaggcaactgcgtaactgatgagtttgaagaaggcatccaagatatcattctgaggctgacacatgttaaaactggaggaaaaatctccttgcggaaagcaaggtatcacactttaaccaaaatctgtgcggtgcaagagataatcgaagactgcatgaaaaagcagccttccctgccgctttccgaggatgcacatccttccgttgccaaaatcaacttcgtgatgtgtgaggtgaacaaggcccgaggggtcctgattgcacttctgatgggtgtgaacaacaatgagacctgcaggcacttatcctgtgtgctctcggggctgatcgctgacctggatgctctagatgtgtgcggccggacagaaatcagaaattatcggagggaggtagtagaagatatcaacaaattattgaaatatctggatttggaagaggaagcagacacaactaaagcatttgacctgagacagaatcattccattttaaaaatagaaaaggtcctcaagagaatgagagaaataaaaaatgaacttctccaagcacaaaacccttctgaattgtacctgagctccaaaacagaattgcagggtttaattggacagttggatgaggtaagtcttgaaaaaaacccctgcatccgggaagccaggagaagagcagtgatcgaggtgcaaactctgatcacatatattgacttgaaggaggcccttgagaaaagaaagctgtttgcttgtgaggagcacccatcccataaagccgtctggaacgtccttggaaacttgtctgagatccagggagaagttctttcatttgatggaaatcgaaccgataagaactacatccggctggaagagctgctcaccaagcagctgctagccctggatgctgttgatccgcagggagaagagaagtgtaaggctgccaggaaacaagctgtgaggcttgcgcagaatattctcagctatctcgacctgaaatctgatgaatgggagtactgaaataccagagatctcacttttgatactgttttgcacttcatatgtgcttctatgtatagagagctttcagttcattgatttatacgtgcatatttcagtctcagtatttatgattgaagcaaattctattcagtatctgctgcttttgatgttgcaagacaaatatcattacagcacgttaacttttccattcggatcattatctgtatgatgtggtgtggtttgtttggtttgtccttttttttgcgtttttaatcagaaaacaaaatagaggcagcttttgtagattttaaatgggttgtgcaagcattaaaatgcaggtctttcagaatctagaactaggcataaccttacataatactaggaaaattatgagaaaggggaaatttttggttaaataagagtaaggttcaaacacaagcagtacatgttctgtttcattatgctcgatagaaggcttttttttcacttataaggcctgattggtcctacccagcttaacggggtggggtttttttgtttgttcagacagtctgttcttttgtaaacatttttagttggaaaaacagcatctgcattttccccatcctctacgttttagagaggaatcttgtttttgtgtgcaacataagaaaattatgaaaactaatagccaaaaaacctttgagattgcattaaagagaagggataaaggaccagcaataataccttgtaagttgcttttgtttgtaaaatctgagcttatagttttccttagtgagtaaattcataaggatgggaacatttaaattaagttaatgggcctttaaaaaaaaaaaaaggaaacactcatacctgtagttggaggatgaatactggagacgggttaccaatgtcaggttatactaaaactaaatcagaaagtctgaatgtagcacataatggttctcttctgttgtccaaggctgtaaaatggacagccttgtcacacctccccggtgctgttttacaacgtgagggtagacgctgtcagtaacccagagggaccaggccttcctaggttttctaggcagtcagctgttaaccactcacttagtaaatgtcataactacacctgctccaggaccaatcagtgaaacctgctcggaattaaaggcttcctctgggtgcctgctgaacaactgagctcatgtcatgggcatgtggtggtttctctgttgcctgaaagagccattaaagtcagtcgtgcgtgaagcatctctcttctaaaggatgtgtatttccataaatgctttctgaggatccggtacaaaatgatttcccaaagttctgaagtgccttgagaacatgtgggtccgagtgttataacagactcctcccccgggtcaccttttgcctggtcatcctgttagagtacatctttggaaatccagggtaatattctctttcagagatgctcattgtgtaactctgtgtagggagatagtcactttaaacagctcaaagtagctagctaaaggagtagccttaaatacctaaaagatgacagaagcatagcccttaacaaatcttcagcttgtctctcagtatttcccaatcatgaaaatcccttgctatgtctttcctactagaaatgttctagaatcgctggacggtggggtcagagggcagtcggtatttaggccgtgagcttcccatactactgcaggtccaactcctggcaaccgcgggctcaaggcaggtcattggaatccacgttttggccacagtagttgtaggattgcttttctgtatcataattttagaatgctcttaaaatcttgaggaagagtttttattttttatttatttttgagatggagtctctgttgcccaggctgcagtgcagtggtgccatctcagctcactgcaacctccacctcccaggttcaagcgattctcctgcctcagccacctgagtagctgggagtacaggcatgtggcaccatgcctggctaatttttgtatttttaatagagttgagatttcaccatgatggtcaggctggtctcgaactcctgacctcgtgatccgcccgcctcggccccccaaagtgctgggattaacgggtgtgagccacggcgcccagcccaggaagagtttttaaattagagctctgtttaattataccactgggaaatcatggttacgcttcaggcatattcttccccagagtactacttacattttaaatttcattttgtaaagttaaatgtcagcattccctttaaaagtgtccattgttctttgaaagtagacgtttcagtcattcttttcaaacaagtgtttgtgtaccttttgccaagctgtgggcatcgtgtgtgagtacagggtgctcagctcttccaccgtcattttgaattgttcacatgggtaattggtcatggaaatgatcagattgaccttgattgactgtcaggcatggctttgtttctggtttcaatctgttctcgttccttgtaccggattattctactcctgcaatgaaccctgttgacaccggatttagctcttgtcggccttcgtggggagctgtttgtgttaatatgagctactgcatgtaattcttaaactgggcttgtcacattgtattgtatttttgtgatctgtaatgaaaagaatctgtactgcaagtaaaacctactccccaaaaatgtgtggctttgggtctgcattaaacgctgtagtccatgttcatgccaaaaatggctgggaacgtttgctttatttacattcagtcagcgttgctttcagatcacactttatccacacaggaaagccagtcagcctataatgaagtagttattaaaataaatgtaatgaatatgtctacaaagtatagtttagtggtttattttgctaaaatgcacatatatttgatataatttagtttgagaagttcagctagtttttctcctttgtttgactttgtcaatttctatctggtttttaagggtctgagcttagcttgtgcatgcaaggttttgggtttttttattttttttttgagcacagcttttcaccttttaatttgttgggtatttttctcttaataagagaaatattggccatcgatttttacatataatacaagtgtgtttttccagtacattggttcctgtcccctctctgtgaactgtttgagtattggaacagtatgtcttcaataattcaatgttactttgagatacatgtgttaatatacccttagttattcttgaaataaaaccagtctcttacgcttgcagtggagaaaggcaaaaaaaaaaaaaaaaaa

SEQ ID NO: 2493 - DNA, 3062 bp, Homo Sapiens
  NM_004876
gggatatggcggggcctttgtctctcgctgtcgccggagtcccaggtctgtcttcactgctctgtgtcctctgctcctagaggcccagcctctgtggcgctgttaccagcaggtattggagatccacagctaagatgccaggaccccctagaagcctagaaatgggactgttgacatttagggatgtggccatagaattctctctggaggagtggcaacacctggacattgcacagcagaatttatatagaaatgtgatgttagagaactacagaaacctggccttcctgggtattgctgtctctaagccagacctgatcacctgtctggaacaagggaaagagccctggaatatgaagcgacatgagatggtggatgaacccccaggtatgtgtcctcattttgctcaagacctttggccagagcagggcatggaagattcttttcaaaaagcaatactgagaagatatggaaaatatggacatgagaatttacagttaagaaaaggctgtaaaagtgtggatgagtataaggtgaacaaagaaggttataatggacttaaccagtgtttcacaactgcccagagcaaagtatttcaatgtgataaatatttgaaagtcttctataaatttttaaattcaaacagacctaagataagacatactgaaaagaaatctttcaaatgtaaaaaacgtgtcaaattattttgcatgctttcacataaaacccaacacaaaagcatttatcatagagagaagtcctacaaatgtaaagaatgtggaaaaacctttaattggtcctcaacccttactaatcataggaaaatttatactgaagagaaaccttacaaatgtgaagaatataacaaatctcctaagcaactctcaacccttactacacatgaaataattcatgctggagagaaactctacaaatgtgaagaatgtggcaaatcttttaaccggtcttcaacttttactaaacataaggtaattcatactggagtaaaaccctacaaatgtgaagaatgtggcaaagcatttttctggtcctcaaccctaactaaacataagagaattcatactggagagcaaccctacaaatgggaaaaatttggcaaagcctttaatcggtcctcgcacctcaccacagataagataactcattggagagaaatcttacaagtatgaataatgtgccaaagcctaagaaaaccctcaattcttaatagatataagattattcctactggagagaaactacaaacctgagagaggcgctaatgcttttgacagtacctaaaactttaaagaaaatcattctgctgaaaaatcctagaaatgtgaagaatgtgaaaaagcctttaaatgattgtcacacttgattgtaggtaagataattcatactggagaaaactaccagtgtgaacaacgtggccaagcttcgacaatgctcacaccctattgcacaggaaagcatttatacttgagaagaaatgtacaaatattggcaaagtaaaaaatccattaacacctgctcacatcttactcaaaattgtagagttcatagtaaataaaagcattaaaattctaattactctcagaagatctgtcagaaagtatgtctttaaagtatagaagagcatttattttgaaaaaaacattacacatatgaagaggattgtaatatctttacttgtaccacagatcttattgtacacattttatactagagaaaaaccctcaggcagttgttaaaattttgttgaacatcagggagtttaagaaaaccctgcaagtataatgaatttggaaaaacattttttcaaaaactacaaattataaaacaccaaagtgttcatactaaaatatatttttgcagatacattaaatatgaaagatattcaatccaaaattaagtctatgtaaatatcagggaataattcacagtagaaatatctagggcattcaagctttagacattacactaaatcagagtgctgagtatagaaaataatacaaacagatttgtctaaacatttgtatataactttaaaaatagaatattttttggagggttataattacattcaaagtacttttttttgaaaatacagattttttttaaaagtgaataatgtgttcaactcttaaattcatgctgtttcatcattgctggtgtattcatatgtgaaagcatgtgactaattgttgctgcataaaagatatgagattcttttttattaggcattatttatgaccttttctatgaaaagataaggacattaaaatgtaagatgcgtgaggaaaatttaggtagagaggctctttgtggttaacttataatattgagtgatgcatgaggtaggtgttcagaataatattcctctgcattattatgaatgaaaagcattcttaattttagttaaaattaagttagtcatatgttattttattaattgtacttctatgaaataatatgcagtctatttttaaattataaattatgtgtgaacttagcttttcaattcaacatttttaacatattaaatactattgtgaattcaatgaagtgttcttatgccactaactttaacctattcccttactcaaggatgtaggtaaaagatggtaacaatacactatttggtaagataatgtactgacatctctagcaatcttttttgccagtggctttaaattgccaataagttaaagaatattgttcctatgggttaaatttttattcttattttcacatttaaatttatttttcttaatttttgtggatacataatatgtgtatatatgtatgccatatatggtatattttgatgcaggcatactctatataataatcacattagaggaaatgagatatccattacctctagcatttattctttttattacaagcaattcaattgtacacttttagttatttttaaatttacaatgttattgattacagggtcatttttatggtcataataaaaaattttatacaaacgtgtaaaatctatacatttctgagttctgaataaatatttttaaaaattttaa

SEQ ID NO: 2494 - DNA, 674 bp, Homo Sapiens
  NM_004877
gttggatgaaaccttcctcctactgcacagcccgcccccctacagccccggtccccacgcctagaagacagcggaactaagaaaagaagaggcctgtggacagaacaatcatgtctgactccctggtggtgtgcgaggtagacccagagctaacagaaaagctgaggaaattccgcttccgaaaagagacagacaatgcagccatcataatgaaggtggacaaagaccggcagatggtggtgctggaggaagaatttcagaacatttccccagaggagctcaaaatggagttgccggagagacagcccaggttcgtggtttacagctacaagtacgtgcatgacgatggccgagtgtcctaccctttgtgtttcatcttctccagccctgtgggctgcaagccggaacaacagatgatgtatgcagggagtaaaaacaggctggtgcagacagcagagctcacaaaggtgttcgaaatccgcaccactgatgacctcactgaggcctggctccaagaaaagttgtctttctttcgttgatctctgggctggggactgaattcctgatgtctgagtcctcaaggtgactggggacttggaacccctaggacctgaacaaccaagactttaaataaattttaaaatgcaaaaactcggaaaaaaaaaaaaaaaaaa

SEQ ID NO: 2495 - DNA, 1787 bp, Homo Sapiens
  NM_004878
gctgctcctctgtcgagctgatcacacccacagttgagctgcgctggccagagatgcctgcccacagcctggtgatgagcagcccggccctcccggccttcctgctctgcagcacgctgctggtcatcaagatgtacgtggtggccatcatcacgggccaagtgaggctgcggaagaaggcctttgccaaccccgaggatgccctgagacacggaggcccccagtattgcaggagcgaccccgacgtggaacgctgcctcagggcccaccggaacgacatggagaccatctaccccttccttttcctgggcttcgtctactcctttctgggtcctaacccttttgtcgcctggatgcacttcctggtcttcctcgtgggccgtgtggcacacaccgtggcctacctggggaagctgcgggcacccatccgctccgtgacctacaccctggcccagctcccctgcgcctccatggctctgcagatcctctgggaagcggcccgccacctgtgaccagcagctgatgcctccttggccaccagaccatgggccaagagccgccgtggctatacctggggacttgatgttccttccagattgtggtgggccctgagtcctggtttcctggcagcctgctgcgcgtgtgggtctctgggcacagtgggcctgtgtgtgtgcccgtgtgtgtgtatgtgtgtgtgtatgtttcttagccccttggattcctgcacgaagtggctgatgggaaccatttcaagacagattgtgaagattgatagaaaatccttcagctaaagtaacagagcatcaaaaacatcactccctctccctccctaacagtgaaaagagagaagggagactctatttaagattcccaaacctaatgatcatctgaatcccgggctaagaatgcagacttttcagactgaccccagaaattctggcccagccaatctagaggcaagcctggccatctgtatttttttttttccaagacagagtcttgctctgttgcccaagctggagtgaagtggtacaatctggctcactgcagcctccgcctcccgggttcaagcgattctcccgcctcagcctcctgagtagctgggattacaggcgcgtatcaccatacccagctaatttttgtatttttagtagagacgggttcaccatgttgcccaggagggtctcgaactcctggcctcaagtgatccaccggcctcggcctcccaaagtgctgggatgacaggcatgaatcactgtgctcagccaccatctggagttttaaaaggctcccatgtgagtccctgtgatggccaggccaggggacccctgccagttctctgtggaagcaaggctggggtcttgggttcctgtatggtggaagctgggtgagccaaggacagggctggctcctctgcccccgctgacgcttcccttgccgttggctttggatgtctttgctgcagtcttctctctggctcaggtgtgggtgggaggggcccacaggaagctcagccttctcctcccaaggtttgagtccctccaaagggcagtgggtggaggaccgggagctttgggtgaccagccactcaaaggaactttctggtcccttcagtatcttcaaggtttggaaactgcaaatgtccccttgatggggaatccgtgtgtgtgtgtgtgtgtgtgtgtgtgtgtgtgtgtgtgtgtgtgtgttttctcctagacccgtgacctgagatgtgtgatttttagtcattaaatggaagtgtctgccagctgggcccagca

SEQ ID NO: 2496 - DNA, 2279 bp, Homo Sapiens
  NM_004879
ccccgcctcgtggtgccggctggttcttcgcgctcgcccgacttcccagcggccccgtgcggcccgggcatgcccagtgcgggcgcagcggccccggccctggaagcgccccggcggagctggcctgcggtgggctaggggcagggccggagccgcggcggcggagctgtggatccttcatgatgagagatttggggacacttctctctcctgtgtgtagttgatagtttggtggtgaagagatggctgacagtgtcaaaacctttctccaggaccttgccagaggaatcaaagactccatctggggtatttgtaccatctcaaagctagatgctcgaatccagcaaaagagagaggagcagcgtcgaagaagggcaagtagtgtcttggcacagagaagagcccagagtatagagcggaagcaagagagtgagccacgtattgttagtagaattttccagtgttgtgcttggaatggtggagtgttctggttcagtctcctcttgttttatcgagtatttattcctgtgcttcagtcggtaacagcccgaattatcggtgacccatcactacatggagatgtttggtcgtggctggaattcttcctcacgtcaattttcagtgctctttgggtgctccccttgtttgtgcttagcaaagtggtgaatgccatttggtttcaggatatagctgacctggcatttgaggtatcagggaggaagcctcacccattccctagtgtcagcaaaataattgctgacatgctcttcaaccttttgctgcaggctcttttcctcattcagggaatgtttgtgagtctctttcccatccatcttgtcggtcagctggttagtctcctgcatatgtcccttctctactcactgtactgctttgaatatcgttggttcaataaaggaattgaaatgcaccagcggttgtctaacatagaaaggaattggccttactactttgggtttggtttgcccttggcttttctcacagcaatgcagtcctcatatattatcagtggctgccttttctctatcctctttcctttattcattatcagcgccaatgaagcaaagacccctggcaaagcatatctcttccagttgcgcctcttctccttggtggtcttcttaagcaacagactcttccacaagacagtctacctgcagtcggccctgagcagctctacttctgcagagaagttcccttcaccgcatccgtcgcctgccaaactgaaggctactgcaggtcactgagttgcctgccatccaaaggggatgggcgggattggaagaagctgtggcagctcttttccctgttcacctcccgcctgccagggaaggcaggacccgctctgccaagggccctctgcgtattcccttctctctgaggaattgaaatttttgtctctggtgcacgtaaggcagaatgttccctgacaccagtgtgtggatttttaacatcaccgtgagtctgaaaggaccacaggtttttctgcagctattttctagcatttgccagtccctgtgcctggactgattggaacactttgtttttctccctgtgccatttacccttccacctttccatcctgccttctaccacccttggatgaatggattttgtaattctagctgttgtattttgtgaatttgttaattttgttgtttttctgtgaaacacatacattggatatgggaggtaaaggagtgtcccagttgctcctggtcactccctttatagccattactgtcttgtttcttgtaactcaggttaggttttggtctctcttgctccactgcaaaaaaaaaaaaaaaaaaaaaaaaaaaaaaaaagcctgaagagatgagataggaggaaagacctcacagccagatctgctgggttttgaggagtgattttctttcttccccttgaaggggaaaaagctattttcattggtacatttaaagtcccccaactatggggaggtaccaattctggacaagtgccactacaacaacactaaacctgaacttttcaactccgttggtggtgggaggcagcgggcagaaatttactgttggccactgccaggtctatttcatatttcaaaggaatattgggtgctgcatataggaactgaaggggtcaatgtattaaacctgtgattggttgttttcctgtcattttgagagactaaatgtggggggcagatgtcaaaatacctgtacaattttaaaatgtcacaattaaacatgagctggtttcccaaaaaaaaaaaaaaaaaa

SEQ ID NO: 2497 - DNA, 2158 bp, Homo Sapiens
  NM_004886
cgcggatagaggagcgggcgccgggaccgggaatccccgagctgcgccttctggggacgcggcccgggctacgtcggggccgtccgtggggagcggggtcctggaggctgcgcggggctgaggcggcctcgatttgggaactgcctgaagatgccggcctaagcctggagtccaggcatggacttccccacaatttcccgatccccttcggggcctccagccatggacttggaggggcccagggacattcttgtgccttcggaggacctcacccctgacagccagtgggaccctatgccaggaggccccggcagcctcagtcggatggaacttgatgagtcaagccttcaggagctggtgcagcagtttgaagctctgccaggcgatctggtgggcccatccccaggtggagccccctgtcccctacacattgccacaggccatggcctggcctcccaggagattgctgatgcccacgggctcctgtctgccgaagctggccgggatgacctgctgggcctcttgcactgcgaggaatgcccgccttcccagactggtcctgaagagcctctagagcctgccccccgactgttgcagccccctgaggacccagatgaggattctgactccccagaatgggtggagggggcctctgctgagcaggagggcagcaggagctcaagcagttccccggaaccctggctggagacggtgcctctagtcacacctgaagagccacccgctggtgcccagagccccgagaccctggcttcctaccctgccccccaggaggtgcctggtccctgtgaccatgaagacctcctggacggtgtcatatttggggccaggtacctggggtccacccagctggtgtcggaacggaacccgcccaccagcacgcgcatggcccaggcccgggaggccatggaccgcgtcaaggcccccgatggggagacccagcccatgacggaggtggacctgttcgtctccaccaagaggatcaaggtcttgacagcggactcccaggaggccatgatggaccacgccctgcataccatctcctacacagccgacatcggctgcgtgctggtgctgatggcgcggcggcggctggcacggaggccggcaccccaggaccacggccgccgcctctacaagatgctctgccacgtattctacgcggaggacgcccagctcatcgcccaggccattggccaggccttcgccgccgcctacagccagttcctacgggaaagcggtattgaccccagccaggtgggcgtgcacccgagcccaggcgcctgccacctccataatggggacctggaccacttctccaacagtgacaactgccgggaggtgcacctcgagaagcggcgaggggagggcctgggcgtggccctggtggagtcgggctggggctccctgctgcccacagccgtcatcgccaacctgctgcacggggggcctgctgagcgctcgggggccctcagcatcggggaccgcctgaccgccatcaacgggaccagcctggtggggctgcccctggctgcgtgccaggccgctgtccgcgagacgaagtcgcagacgtcggtgacactcagcatcgtccactgccctcccgtcaccaccgccatcatccaccggccccacgcccgcgagcagctgggcttctgcgtggaggacggcatcatctgcagcctcctccgtggtggcatcgccgagcgtgggggcatccgcgtcggccaccgcatcattgagatcaatgggcagagtgtggtggccacgccacacgcccgcatcatcgagctgctcaccgaggcctatggcgaggtgcatatcaagacgatgccagctgccacatatcgcctccttacaggccaggagcagcccgtgtacctgtgaccacctcatcccttgcctgccactgtgccttcgcctccatggccccggagccccatcctgggcctgccctggctggccaggaccccagcggttcttggtcctgtatgatttcctaatataaaaacagtaaaagcttatgcatttggcaaagtctcggatcagggtctacgggaccgaggaccttgtccttcctggaagccactagaagccggtgctgtgaaaatactctgtttattaaagaccaggcggaggg

SEQ ID NO: 2498 - DNA, 1989 bp, Homo Sapiens
  NM_004887
aatgtgtgcgcgctgtggtatgggtgtgcaagtgtgcgaaggcggcgtgttgtgtgagcgagagggtagcggatgtgtgtgtgcgtgtgcgcgcgtggctccgggtgtgcgccgctgcgatagcgggtcctttcccggggcgggcgacgggcgggctgggaaggtctcctcccctcaccacattgagaaatctcagtgagtcaccgagtggttctgcatattaatgagctcgctcgctgcgagggcaggagcggatttaaaagaggccagggcgggcggagggaggctgtggagagagcgcggagacaagcgcagagcgcagcgcacggccacagacagccctgggcatccaccgacggcgcagccggagccagcagagccggaaggcgcgccccgggcagagaaagccgagcagagctgggtggcgtctccgggccgccgctccgacgggccagcgccctccccatgtccctgctcccacgccgcgcccctccggtcagcatgaggctcctggcggccgcgctgctcctgctgctgctggcgctgtacaccgcgcgtgtggacgggtccaaatgcaagtgctcccggaagggacccaagatccgctacagcgacgtgaagaagctggaaatgaagccaaagtacccgcactgcgaggagaagatggttatcatcaccaccaagagcgtgtccaggtaccgaggtcaggagcactgcctgcaccccaagctgcagagcaccaagcgcttcatcaagtggtacaacgcctggaacgagaagcgcagggtctacgaagaatagggtgaaaaacctcagaagggaaaactccaaaccagttgggagacttgtgcaaaggactttgcagattaaaaaaaaaaaaaaaaaaaaaaaaaaaaaaaaaaaaaaaaaaagcctttctttctcacaggcataagacacaaattatatattgttatgaagcactttttaccaacggtcagtttttacattttatagctgcgtgcgaaaggcttccagatgggagacccatctctcttgtgctccagacttcatcacaggctgctttttatcaaaaaggggaaaactcatgcctttcctttttaaaaaatgcttttttgtatttgtccatacgtcactatacatctgagctttataagcgcccgggaggaacaatgagcttggtggacacatttcattgcagtgttgctccattcctagcttgggaagcttccgcttagaggtcctggcgcctcggcacagctgccacgggctctcctgggcttatggccggtcacagcctcagtgtgactccacagtggcccctgtagccgggcaagcaggagcaggtctctctgcatctgttctctgaggaactcaagtttggttgccagaaaaatgtgcttcattcccccctggttaatttttacacaccctaggaaacatttccaagatcctgtgatggcgagacaaatgatccttaaagaaggtgtggggtctttcccaacctgaggatttctgaaaggttcacaggttcaatatttaatgcttcagaagcatgtgaggttcccaacactgtcagcaaaaaccttaggagaaaacttaaaaatatatgaatacatgcgcaatacacagctacagacacacattctgttgacaagggaaaaccttcaaagcatgtttctttccctcaccacaacagaacatgcagtactaaagcaatatatttgtgattccccatgtaattcttcaatgttaaacagtgcagtcctctttcgaaagctaagatgaccatgcgccctttcctctgtacatatacccttaagaacgccccctccacacactgccccccagtatatgccgcattgtactgctgtgttatatgctatgtacatgtcagaaaccattagcattgcatgcaggtttcatattctttctaagatggaaagtaataaaatatatttgaaatgtaccaaaaaaaaaaaaaaaaaa

SEQ ID NO: 2499 - DNA, 528 bp, Homo Sapiens
  NM_004889
gtgcattccctacccagcagccctcgcgcggtccggcacagcggacaccaggactccaaaatggcgtcagttggtgagtgtccggccccagtaccagtgaaggacaagaaacttctggaggtcaaactgggggagctgccaagctggatcttgatgcgggacttcagtcctagtggcattttcggagcgtttcaaagaggttactaccggtactacaacaagtacatcaatgtgaagaaggggagcatctcggggattaccatggtgctggcatgctacgtgctctttagctactccttttcctacaagcatctcaagcacgagcggctccgcaaataccactgaagaggacacactctgcacccccccaccccacgaccttggcccgagcccctccgtgaggaacacaatctcaatcgttgctgaatcctttcatatcctaataggaattaacctccaaataaaacatgactggtacgtgtgctgattgcctgcctgtctgccgtagccaaaaaaaaaaaaaaaaaa

SEQ ID NO: 2500 - DNA, 528 bp, Homo Sapiens
  NM_004891
gcagttgttgttggttgggggccttttggccggtgacggagactgcccaggtgtggtcaccatgttcctctccgcggtcttctttgccaagagcaagtcaaaaaacattctggtgagaatggtgagcgaagctgggacaggtttctgcttcaacaccaagagaaaccgactgcgggaaaaactgactcttttgcattatgatccagttgtgaaacaaagagtcctcttcgtggaaaagaaaaaaatacgctccctttaaacggtggattgaaaatgactttgatttataaagagaagactgagggcggggatactgattcagaaatcctgtagcgtgtaataaaagaagaggaaatggcatggaatcactgcctcctgtgatttgaaggccattgtgaaggaaaacaatgcagtgaaagaaagttcttcatattaggacagatatcattgcatcacatttatttatctttctgggtatttttatagcccttaataaaaaatattaaaatagcctgtgcaaaaaaaaaa

SEQ ID NO: 2501 - DNA, 1821 bp, Homo Sapiens
  NM_004892
cacctcagcgggaagcggagacgcaagcagctggatctccggtaactgagacatagggtataactgttgtcgcggcggaggaagtgaggacggcgccaagggccttccgggccagtgttggatccctgtagtttgtgaagatggtgttgctaacaatgatcgcccgagtggcggacgggctcccgctggccgcctcgatgcaggaggacgaacagtctggccgggaccttcaacagtatcagagtcaggctaagcaactctttcgaaagttgaatgaacagtcccctaccagatgtaccttggaagcaggagccatgacttttcactacattattgagcagggggtgtgtgatttggttttatgtgaagctgccttccctaagacgttggcttttgcctacctagaagatttgcactcagaatttgatgaacagcatggaaagaaggtgcccactgtgtcccgaccctattcctttattgaatttgatactttcattcagaaaaccaagaagctctacattgacagttgtgctcgaagaaacctaggctccatcaacactgaattgcaagatgtgcagaggatcatggtggccaatatcgaagaagtgttacaacgaggagaagcactctcagcattggattcaaaggctaacaatttgtccagtctgtccaagaaataccgccaggatgcgaagtacttgaacatgcattccacttatgccaaacttgcagcagtagctgtatttttcatcatgttaatagtgtatgtccgattctggtggctgtgaaataatgaatacagtcactggtaagggagaacctagaacccagtaggtgtatattttcaggaaactgagctcacagagatgtgtattagaatccaagtggaacttctgcctctaaagaccttgcaagaaaagagatgtcctgaaaatgaaaggttgcacctcatttaatgaagcttaaccctatgtagaaagtctctttcgggggcagaggctttctctgggtgccaagccatatatattagggaatagtagattgttatttcgttttttccctcccagtgcattttaaaaacagcactggctggggcattctcattctctgatggagccatcaatgagatttaacttagtcaacctgtgctagcaacattctgaaattccttcaaagaaggcagtcctttgggaaggtgtttttttttttgtttttttgtttttttgttttttttgactctaatcaacattccttttgttggtgacatttgtgattttcagtaatctgagtttttgatggccttttaaacaagactccagtatgtgaaagttaattgctgtgctccacagatcttgtctattggcccctgtagaaagttaacctttgttgttttccttttataatttgcttattgcacaattgctttagggtaagtgaattatattaagatgccttgaaattatagcactccttgattaagaagctaaaatgtttctctcatttactccttaaacaaaagacttaaattagtttgggtcattattacttttattttgcagcatttggtttgttattagtgtaagagcaagtataggatatggagaggcccctggcttcatgagaacaaaggcaggcccaggttataattacagctttctcctgccccttctttactttctctaccacagttttctccgctgtttgttttcctcttgccacaatttgctaacacttaaaaaattttcctgcacccagtagtttcatatcctgtagacatcctcttaggacattctcaaatttcaaaataaaaaatattcatct

SEQ ID NO: 2502 - DNA, 673 bp, Homo Sapiens
  NM_004894
cttcccggcatcccctgcgcgcgcctgcgcgctcggtgacctttccgagttggctgcagatttgtggtgcgttctgagccgtctgtcctgcgccaagatgcttcaaagtattattaaaaacatatggatccccatgaagccctactacaccaaagtttaccaggagatttggataggaatggggctgatgggcttcatcgtttataaaatccgggctgctgataaaagaagtaaggctttgaaagcttcagcgcctgctcctggtcatcactaaccagatttacttggagtacatgtgaaagaaaacgtcagtctgcctgtaaatttcagcaagccgtgttagatggggagcgtggaacgtcactgtacacttgtataagtaccgtttacttcatggcatgaataaatggatctgtgagatgcactgctacctggtactgctttcagtgtgttccccctcagcccctccggcgtgtcaggcatactctgagtagataatttgtcatgcagcgcatgcaatcagaatctcactgagccacccatcattgtgaaataattacctcagttgtacaggacttggtgatcaggatccaggcactcacttgtattctactgctcaataaacgtttattaaacttgatcctgctacttaaaaaaaaaaaaaaaaaaaaaa

SEQ ID NO: 2503 - DNA, 1536 bp, Homo Sapiens
  NM_004900
acagagcttcaaaaaaagagcgggacagggacaagcgtatctaagaggctgaacatgaatccacagatcagaaatccgatggagcggatgtatcgagacacattctacgacaactttgaaaacgaacccatcctctatggtcggagctacacttggctgtgctatgaagtgaaaataaagaggggccgctcaaatctcctttgggacacaggggtctttcgaggccaggtgtatttcaagcctcagtaccacgcagaaatgtgcttcctctcttggttctgtggcaaccagctgcctgcttacaagtgtttccagatcacctggtttgtatcctggaccccctgcccggactgtgtggcgaagctggccgaattcctgtctgagcaccccaatgtcaccctgaccatctctgccgcccgcctctactactactgggaaagagattaccgaagggcgctctgcaggctgagtcaggcaggagcccgcgtgacgatcatggactatgaagaatttgcatactgctgggaaaactttgtgtacaatgaaggtcagcaattcatgccttggtacaaattcgatgaaaattatgcattcctgcaccgcacgctaaaggagattctcagatacctgatggatccagacacattcactttcaactttaataatgaccctttggtccttcgacggcgccagacctacttgtgctatgaggtggagcgcctggacaatggcacctgggtcctgatggaccagcacatgggctttctatgcaacgaggctaagaatcttctctgtggcttttacggccgccatgcggagctgcgcttcttggacctggttccttctttgcagttggacccggcccagatctacagggtcacttggttcatctcctggagcccctgcttctcctggggctgtgccggggaagtgcgtgcgttccttcaggagaacacacacgtgagactgcgcatcttcgctgcccgcatctatgattacgaccccctatataaggaggcgctgcaaatgctgcgggatgctggggcccaagtctccatcatgacctacgatgagtttgagtactgctgggacacctttgtgtaccgccagggatgtcccttccagccctgggatggactagaggagcacagccaagccctgagtgggaggctgcgggccattctccagaatcagggaaactgaaggatgggcctcagtctctaaggaaggcagagacctgggttgagcagcagaataaaagatcttcttccaagaaatgcaaacagaccgttcaccaccatctccagctgctcacagacaccagcaaagcaatgtgctcctgatcaagtagattttttaaaaatcagagtcaattaattttaattgaaaatttctcttatgttccaagtgtacaagagtaagattatgctcaatattcccagaatagttttcaatgtattaatgaagtgattaattggctccatatttagactaataaaacattaagaatcttccataattgtttccacaaacact

SEQ ID NO: 2504 - DNA, 1715 bp, Homo Sapiens
  NM_004905
gaaccaaccggttgcttgctgtcccagcggcgccccctcatcaccgtcgccatgcccggaggtctgcttctcggggacgtggctcccaactttgaggccaataccaccgtcggccgcatccgtttccacgactttctgggagactcatggggcattctcttctcccaccctcgggactttaccccagtgtgcaccacagagcttggcagagctgcaaagctggcaccagaatttgccaagaggaatgttaagttgattgccctttcaatagacagtgttgaggaccatcttgcctggagcaaggatatcaatgcttacaattgtgaagagcccacagaaaagttaccttttcccatcatcgatgataggaatcgggagcttgccatcctgttgggcatgctggatccagcagagaaggatgaaaagggcatgcctgtgacagctcgtgtggtgtttgtttttggtcctgataagaagctgaagctgtctatcctctacccagctaccactggcaggaactttgatgagattctcagggtagtcatctctctccagctgacagcagaaaaaagggttgccaccccagttgattggaaggatggggatagtgtgatggtccttccaaccatccctgaagaagaagccaaaaaacttttcccgaaaggagtcttcaccaaagagctcccatctggcaagaaatacctccgctacacaccccagccttaagtctcttggagaagctggtgctgtgagccagaggatgtcagctgccaattgtgttttcctgcagcaattccataaacacatcctggtgtcatcacagccaaggtttttaggttgctataccaatggcttattaaatgaaaatggcactaaaagtttcttgagattctttatactctctgccttcagcaatcaattccattcatacatcagcactctgctggttctgtttgaaatatgttctgtatttaaaactcaaatcttgttggatctctgcagggcttgtgaccaatgaagtcatatttgttgatggttgacaaagcttgcttcactccatcagagaatgactatcaatttttttttaactgtcctatcacgtcctctcctgtcacccattttgaagagtggcagaacttgaagttcaacttcctctgtaaatatccaagtataaagcccaggaacttctagaataacccagatgcgctttaattttttttaatatgttttgatcacagaacttctagaataacccagatgctctttcatattcttttaatacatcttgatcacagctgggggaaaaaaagctttttaattctataccttcctagtagataagtgaagagcagggaaagagacctttaaatattttgctataaaaaaatttgtgataagtttctatcaaaatggggagattgcagaaaaggcttcccttggctcccaaggaggtgtagcaggtgtgagcaatattagtgccatgtgcctttcacacagggtttgcatttatcagtctgttttccgatgatgtgtacatgaaagagtacaccatgtgaagagaagagagaatgattgaaaatgttttagtatagaactcttcttgcagtgggttgctattttctagattttactttttagggaacaaaataaaatcctttgttaaaactgggaaaaaaaaaaaaaaaaaaaaaaaaaaaaaaaaaaaaaaaaaaaaa

SEQ ID NO: 2505 - DNA, 2767 bp, Homo Sapiens
  NM_004913
gcggccgcgtcccttcctgcggtccgctgctcgggcggctccagcaccagcgccggctgcgttccgggcctccggtcgcccgtccagcccctcggctaccgccgccgcctcccccgctcggcgccatggccgctgcggccggggacggcacggtgaagccgctgcagagcgccatgaagcttgccaacggggccatcgagctggacaccggcaaccggccccgggaggcatacacggaatacctgaggagcatccactatatctcccaggtgttactagaagaagtggaaaccactaaagaagctggggaaactgtgccccccgacacctccaagatgctgaagctagcacagcagtgtctggagagggcccagtcgacggccgccaagcttgggaaaacacgcctgaagccaaccatgcctgcagctgctcccattccccagcctgccggccgacaccgccgtgtatactccgatgaaggaggaaagctctctccttttctgccacccgagatcttccagaagcttcagggggcagagtcacaaagctgtaagaaagagctgacgccactggaggaggcctccctgcagaatcagaagctgaaggctgcgtatgaggcccgaatggcgcggctagaccccagccaggccatgcagaagacatccctgaccctctctctacagcggcagatgatggagaacctagtgattgccaaagcccgggaggagacactccagagaaagatggaggagcgccggctgcggctccaggaggccgccaacaggaggttttgcagccaagtcgccctgaccccggaggaacgggagcagcgggccctttacgccgccatcctggagtacgaacaggaccatgactggccgaagcactggaaggccaagctcaagaggaatccgggggacctgtcactcgtgaccagcctggtctcacacctgctcagcctccccgaccacccgatcgcgcagctcctgaggcggctgcagtgctccgtgtacagcgccctgtatcccgccgtgagcagagcagccgcgccagccccaggctgctgccccccgacccccaaccccggaagccgacggctgcggccctcgcagagcctccattgcatgctgtccccgcccgagcccagcgcagccccgcggccccaggacagtccccccacgcccccactccaacccggccccgtggggtctccctcacccctgggggacaccgcatctggattgccagacaaggacagctcgttcgaggacctggagcagttcctggggacgtctgagcggcagggccggggccgtggggtacagccggagccccagctgcagcagctgaagaccgcggtggaggagatccacaatgccgtagacaggctgctctcgctgacccttctggccttcgaaggcctaaacacagctgcctccaaggaccgctgcctggcctgcattgaggaaccctttttctccccgctgtggcctctgctgctggccctgtacaggagcgtgcaccgagcccgggaggctgccctgagcaggagcatggagctctacaggaatgcaccccccaccgccattggcatccccaccaagctcctcccccagaaccctgaggccaagggggccactggctacccctactgcgcggcggcccaggagctcggactgctggtcctggagagctgcccccagaagaagctggagtgcatagtgcggaccctgcggatcatctgtgtctgtgcggaagactactgccccaccccagaggccacaccccaggccgggcccccgcccatcgctgcagctgccattggtgccgatgacctgctgcccatcctgtccttcgtggtgctgaggagcggcctccctcagctggtgtcggagtgcgcggccctggaggagttcatccacgaggggtacctgatcggagaggagggctactgcctcacatcactgcagagtgccctgagctacgtggagctgctgccccggggaggcctggccaagtagtacagctagagcccagggtccctgcagggcctggcctcgcctcccagggctgtctctcctacacctggagccatgggatctactgaggaccatcctggagcctcacgctgctctgcacatggtgggggcttgtccactgtggtgtgctctccagctcttcaccttcctcacctcacatctgaccctggagcttggggttggcacctctgccccgacagaatggggctgaatcagctccaggaggaaccaggccctgctctcctgtgtaggcctcagagaggccaagaagggaagctttgggcttcggtgggtgcaggctcagcgatgaacatctggctggggcagctcctggggagcatcagggaagagggggccatgagccggccagcagtggagacggcagtccagtttctctcccctctgacccctagaaggggagttgtagccccatgaactagtttcttgtctgggtcaggaacaagggccggctggggcctggggtgcagctggtgtcagggtatgctgtttgctgatgggcagggacacccctgcagggtctcgggctctgagcccaggacattccctgccccttactcaccttggctgtgggctgtgaacattccgggaccctgggcatcttatctaggtccgtgcagcccaagggtcagccctcttgactgtcacatgctgcccccacccagcctaaaataaagagctcactgctgtgcaaaaaaaaaaaaaaaaaa

SEQ ID NO: 2506 - DNA, 1172 bp, Homo Sapiens
  NM_004918
tggaaagctacacgtgtgagcctagaggcgggtcccggttgcagacttgccatggcctccgaagcttctgtgcgtctaggggtgccccctggccgtctgtggatccagaggcctggcatctacgaagatgaggaggggagaacctgggtgactgtggtcgtgcggttcaatccctcgcgtagggaatgggccagggcctcccagggcagcagatatgaacccagcatcacagtgcacttgtggcagatggcagtgcatacccgggagctactctcctccggccagatgcccttctcccagctgcccgccgtgtggcagctctaccccgggaggaagtaccgagcagcggattccagtttctgggaaatagcagaccatggccagattgactctatggagcagctggtcctaacatatcagccggagaggaaagactgacactgggagtggctggccctgctggccctgcctcttctggcctggtgtctcctcatgccccctcagtgaggatcttcatgtacctgctcttctgtttgcacacccagcatagcctccttgcaggcagaaggcagtagggcccctgcacactcagtttctctcgttttccttagttatcagtcctgtcctgtcccactcaggtctgtacttagggcagctggcctggatgggcttcactggggccctgtctgtgtgctgagccagtttcccctgctggctgcaagctgtgggttctttctcctctgtgcccctcatgctgatcttctagatgccactcccaaatccccttcatacccaccaggatgtgtgcccagccaggcctccagcacccccagtgcagctcgtgattggaaactcaccatcggcaggcagtggttcggtttaagagatggcattagagggagcccagtctggatgtggacttggatgccctgtgggtatcagttctgctgacactttggcccgaaatagatccagtgctgagcaagcaatgtacaccagagcctcagtgagcccatctgcacagtggggagcatggagggatgggtttggcctgtgcttctgcttattcagtccttcagctcacggaagggatgctagtccgtgaaggtgacctcacagtactggttaattaaactttattgctcactgtccacttttgtgctgaaaaaaaa

SEQ ID NO: 2507 - DNA, 2119 bp, Homo Sapiens
  NM_004927
ccctttacgctcgcaccggcgaacctgcctgggcaggcagctcgcgcaggacggggcgggaccagacagttgcgcgcacagaaggctggcgtagcaggtaaagatggcagctaccatgttccgggctacgctgcggggatggagaaccggtgtccagcggggctgcgggctacggctgttgagccagacccagggccctccagattaccccaggtttgtggagtctgtggatgaatatcagtttgtggagcgcctgttaccggctaccaggatcccagatcccccaaagcatgaacattatcctacccctagtggctggcagcctcccagagaccccccacccaacctgccttactttgtacgacgctctcggatgcacaacatccccgtctacaaggacatcacgcatggcaaccggcagatgactgtgatccggaaagtggaaggggacatctgggccctgcagaaagacgtggaagattttctgagcccgctgctggggaagacacctgtcacccaggtcaatgaggtgacaggtaccctacggatcaagggctactttgaccaggagcttaaagcctggctcttggagaaaggcttctgaggcccagccgagcagcctgcttgtcagcatgccctgtggatcaagtctagggggcctcaggaggagggaggtgggtgttggagcccctgagacaggggatacagaaactagggctaaaggactttggggtcaggccttgcttgcataaaggagaaaacaactctatgtacatgctgggggagagtgcctaatgtgggagaccaaatagggatcaccaggctaatggggggcgtcagcagctttctctccctcctatcttggcctgttcttttttgttttttgagacggagtctcactctgttgcccagggtggagtgcagtggcatgatcttggctcactgcaacttccacctctgggatcaagggattctcctgcctcagcctcttgagtagctgggattacaggcgcccaccaccacagcctgctaatttttgtatttttagtagagatggggtttcaccatgttggccaggctggtctcaaactcctgactcgaagtgatccgcccaccttggcctcccaaagcgttgggattataggcatgagccatgtgcctggtccaccttggcctgttttgtttttctttccttgggctcagcaattcaaattctagttgttatttggtggaagcagtagcccaaccccagtttaggggaaggtagcacagggcagagccactgggcactttgtttccttggccctccgaagctcactgttgcaaatacccccaagcctttgctctaggccagatcttgtttggtgcaggtgatggagaacacagatgactcgggcatgggtcttggagatcttctgttcaaagtacagtgctggcactggggcacagagtgcccacgttagccccgggctctgatagagaggtaggaggcacgttcttggtcactgttccattgcagaccagacttgctggcctgaccacaagggagtggctgggaactcacagccagcatagggacatccccctgcagccttctgacctgcaatcaaggctggggaggggtttgcaggcaggaatatgctgacctttcaccctgccatcccatcccaaccccagctcactagccttcatatatgccttatacttggagtcacaggggccaaaggcctgagaccccaccctgcccccaaactggctaagacagctttcagttcctgactccccaacttggtctctgccctgaagcagggcactgaactctgggctgcttctctgtgtgtaaaatgggcacatcttcctaatctgttaatggtcagtggtgtccccaaggatagtgctggcttccatggaaaccctcactcctggagattccattccattttcaagtgtacagccacagcaaggagcccgacactgatttgatcgattctgtgacacaaaccccaccaattgttaatgcaagtttttatttggctgtatatacaatttaagctattaaaatttgtacaatatttacaaattaaataatcatctgaaactgaaaaaaaaaaaaaaaaaa

SEQ ID NO: 2508 - DNA, 2254 bp, Homo Sapiens
  NM_004928
atgagcaggagcagagccaacgtgtcagcggcgcccaagcggccccagcgggctcgcgtcgccccgctctcctcaccgagccgccaatcggctcaggatccgcccctgacgacgcgggccccgcccctggagacacgcgccgcgcagtcgtcacccgcccgggatcaggaggccgggggcgcccgccggtcgggcctgggcggccgccatgaagctgacgcggaagatggttctgacccgggccaaggcctcggagctgcacagcgtgcgcaagctcaactgctggggcagccgcctcacagatatctccatttgccaggagatgcccagcctggaggtgatcacgctcagtgtcaacagcatctccaccctggagcctgtgagccggtgccagcgcctgagtgagctgtacctgcggaggaaccgcatccccagcctggctgagctcttctacctgaaggggctgccgcgtctgcgggtgctgtggctggccgagaacccgtgctgcggcaccagcccccaccgctaccgcatgaccgtgctgcgcaccctgccgcgcctacagaagctggacaaccaggctgtgacggaggaggagctgtcccgtgcactgagtgagggagaggagatcactgcggccccagagagagagggcacaggccacggcggccccaagctatgctgcacactgagctccctcagctccgctgctgagactggccgggacccgctggacagcgaggaggaggcaaccagcggcgcccaggatgaacgtggcctgaagccgccttcccggggccagtttccttccctctcagccagggatgcctcgagcagccacaggggcaggaacgtcctgactgccatcctgctgctgctgcgggagctggatgcagaggggctggaggccgtgcagcagactgtgggcagccggctgcaggccctgcgtggggaagaggtgcaggagcacgccgagtgaccgcaggacctgaacgccgctccagcctccacggggaccccagcgtcttccccagcccccgggagctggagggtggctgccatggccgcagccccggccccacacaaaagcctccccggtttgccacatcggccgagggcaggagtgggtgttaggtactggctaaccggggcggtggagatgcctgtctacaccagtcctgtccccaggactccccttctgtggtctggaggttctaggctggcctgggctcttaaagggaggattttgcaggctgtcctccctaataaaagattttcccaaggttgatctggaggtgacgtttcccaaggcatggttgtgacagtcttcctgaaagcaagggccgtttctccacagaatgaggaggtcttcacggatggctttgccgattccagcccttggtccttggatagatttctgttgggcaagggagacttcgagaatgctggcacccatagcgacatctgccctgagctgctcagcaggcaggcagcagcctcccgcacccatgggagagagttttgttttcttggccgggctgggcaggtgcgccttcctttctctctcctgtgaagaactgcaggagggccctcagctgtgaggttgtggatgaacaggcctgttcgccctggggtccgggcctggcacaggaagcagctagactaggggagtccttggagcatctgagaggggttttctttcctctgggaagagtcgcaagtcttatgaggatgccacaatctgggcagtgacccgtggccctggggaccttcctagtgccccccaaaaccaaggaagcattcacgtgagatggggagtcagccttccagctggtgtgtaggaaagccaggtccctgggcccttgtcccatgtggggttgagatccagatctccatgagatattcccatcctccgccgagcggtgatgcgtgaccgtgtgtgcaggccgctgttctcccaagctcggggccatgccgtgccaccgtcaccagagccagctgcagcactggggcagccactgtcgccggacttggggaagcccagggtgaagacagtcactcatccgtgcaagctctccagaagggatgcaagctctccagaaggggtgtgatctctgagcagtggggagtggagtcaccactcgggacatagagggtggacagttcaggcctgtgtctgcctccttgggactgtggagtgggtgccctcagtaaagcgctttgttggaatggtaaaaaaaaaaaaaaaaaaaaa

SEQ ID NO: 2509 - DNA, 1728 bp, Homo Sapiens
  NM_004930
gcccggcgcggggggaggggggtgctgacccggatgttcactcctgggcacccggggaagtggaagcgccgggccctgctgcgggggggagagccactgacgccgggaccgggaccgccgccgccgccgccaccatgagtgatcagcagctggactgtgccttggacctaatgaggcgcctgcctccccagcaaatcgagaaaaacctcagcgacctgatcgacctggtccccagtctatgtgaggatctcctgtcttctgttgaccagccactgaaaattgccagagacaaggtggtgggaaaggattaccttttgtgtgactacaacagagatggggactcctataggtcaccatggagtaacaagtatgaccctcccttggaggatggggccatgccgtcagctcggctgagaaagctggaggtggaagccaacaatgcctttgaccagtatcgagacctgtattttgaaggtggcgtctcatctgtctacctctgggatctggatcatggctttgctggagtgatcctcataaagaaggctggagatggatcaaagaagatcaaaggctgctgggattccatccacgtggtagaagtgcaggagaaatccagcggtcgcaccgcccattacaagttgacctccacggtgatgctgtggctgcagaccaacaaatctggctctggcaccatgaacctcggaggcagccttaccagacagatggagaaggatgaaactgtgagtgactgctccccacacatagccaacatcgggcgcctggtagaggacatggaaaataaaatcagaagtacgctgaacgagatctactttggaaaaacaaaggatatcgtcaatgggctgaggtctgtgcagacttttgcagacaaatcaaaacaagaagctctgaagaatgacctggtggaggctttgaagagaaagcagcaatgctaaacctctgtttcatgctaaccagacacgccgtgcactcgttagattcctttcttagaaaactcgttttctgctcccttccctcgtcccttccctccccgacaggtcacataacagctgcatcattgaccgcacagcgccatctctccctgagaataaagccgatagccaccctcctccggctccgagcctgcttctgccacacctcgctctcagttctctccacatttccatagagaccgtgtggtttttgttcacccgggccccccgtcttcctccctgtccccccatttataggcataaaatccactgtctgccagcctcccttccctcccacctttttggtacattggtgtaaaaaatgtaaaacaaaaaaattttatgaactaactgtggtgtgtgaaagagagaagaaaaactggaaatcttattccgtgtgtgtttgggagttgcttggggttgggggtcgtggggacaggggacagctctgggagcagaggtggccctcggtgccgtcctgcgcagactctcccgtcccacggaggccgcggggtgggggctggggggggtgccgccgaccgttccgctcttccggccaggtgcttttctgtcaatttctatggaatgcaaaaggaggtttttgttttattttgtttttttgtaaagcttaagaaaaaaatctacatcttatacttgagcctccatacttaaaaaaagaaaagaaaagaaatcaataaaaagaaactggggcgcagttagcaaaaaaaaaaaaaaaaaa

SEQ ID NO: 2510 - DNA, 1433 bp, Homo Sapiens
  NM_004931
accccagccgcgactgtctccgccgagcccccggggccaggtgtcccgggcgcgccacgatgcggccgcggctgtggctcctcttggccgcgcagctgacagttctccatggcaactcagtcctccagcagacccctgcatacataaaggtgcaaaccaacaagatggtgatgctgtcctgcgaggctaaaatctccctcagtaacatgcgcatctactggctgagacagcgccaggcaccgagcagtgacagtcaccacgagttcctggccctctgggattccgcaaaagggactatccacggtgaagaggtggaacaggagaagatagctgtgtttcgggatgcaagccggttcattctcaatctcacaagcgtgaagccggaagacagtggcatctacttctgcatgatcgtcgggagccccgagctgaccttcgggaagggaactcagctgagtgtggttgatttccttcccaccactgcccagcccaccaagaagtccaccctcaagaagagagtgtgccggttacccaggccagagacccagaagggcccactttgtagccccatcacccttggcctgctggtggctggcgtcctggttctgctggtttccctgggagtggccatccacctgtgctgccggcggaggagagcccggcttcgtttcatgaaacaattttacaaatgagcagagaatacggttttggtgtcctgctacaaaaagacatcggtcagtaacgagcacgatgtggaaaaatgagagaagggacacattcaaccctggagagttcaatggctgctgaagctgcctgcttttcactgctgcaaggcctttctgtgtgtgatgtgcatgggagcaacttgttcgtgggtcatcgggaatactagggagaaggtttcattgcccccagggcacttcacagagtgtgctggaggactgagtaagaaatgctgcccatgccaccgcttccggctcctgtgctttccctgaactgggacctttagtggtggccatttagccaccatctttgcaggttgctttgccctggtagggcagtaacattgggtcctgggtctttcatggggtgatgctgggctggctccctcttggtcttcccaggctggggctgaccttcctcgcagagaggccaggtgcaggttgggaatgaggcttgctgagaggggctgtccagttcccagaaggcatatcagtctctgagggcttcctttggggccgggaacttgcgggtttgaggataggagttcacttcatcttctcagctcccatttctactcttaagtttctcagctcccatttctactctcccatggcttaatgcttctttcattttctgtttgttttatacaaatgtcttagttgtacaaataaagtcccaggttaaagataacaaacggctcctgtgacata

SEQ ID NO: 2511 - DNA, 2706 bp, Homo Sapiens
  NM_004939
ctctgtagctgtgaccctgataccgcgtggtgtgctccgaacacatggtgcccagaacgaaggcggcgtccagaagccctaggtcccagaggtccgctcagcggcaggcgcataaggcggggccggcgcgggcctttccttccatcggaaccgttctcccggggctgagtccctgcccggactccgaacgccgaagaccaggggccggaagcgcgcgccgccactgccacgccgtgtcagtcgggagggagggagcgagcaggcgaagccgcggaggacggggtgaagatggcggccttctccgagatgggtgtaatgcctgagattgcacaagctgtggaagagatggattggctcctcccaactgatatccaggctgaatctatcccattgatcttaggaggaggtgatgtacttatggctgcagaaacaggaagtggcaaaactggtgcttttagtattccagttatccagatagtttatgaaactctgaaagaccaacaggaaggcaaaaaaggaaaaacaacaattaaaactggtgcttcagtgctgaacaaatggcagatgaacccatatgacagaggatctgcttttgcaattgggtcagatggtctttgttgtcaaagcagagaagtaaaggaatggcatgggtgtagagctactaaaggattaatgaaagggaaacactactatgaagtatcctgtcatgaccaagggttatgcagggtcgggtggtctaccatgcaggcctctttggacctaggtactgacaagtttggatttggctttggtggaacaggaaagaaatcccataacaaacaatttgataattatggagaggaattcactatgcatgataccattggatgttacctggatatagataagggacatgtcaagttctccaaaaatggaaaagatcttggtctggcatttgaaataccaccacatatgaaaaaccaagccctctttcctgcctgtgttttgaagaatgctgaactgaaatttaacttcggtgaagaggaatttaagtttccaccaaaagatggctttgttgctctttccaaggcaccggatggttacattgtcaaatcacagcactcaggtaatgcacaggtgacacaaacaaagtttctccccaatgctccgaaagctctcattgttgaaccttcccgggagttagctgaacaaactttgaacaacatcaagcagtttaagaaatacattgataatcctaaattaagggagcttctgataattggaggtgttgcagcccgggatcagctctctgttttggaaaatggagtagatatagttgtaggtactccgggaagactagatgacttggtgtcaactggaaagctgaacttatctcaagttagattcctggtcctggatgaagctgatgggcttctttctcaaggttattctgattttataaataggatgcacaatcagattcctcaggttacctctgatggaaaaagacttcaggtgattgtttgctctgccactttgcattctttcgatgtaaagaaactgtccgagaagataatgcattttcctacatgggttgacttaaaaggagaagactctgttccagatactgtacaccatgttgttgtcccagtaaatcccaaaactgacagactctgggaaaggcttggaaagagccacattagaactgatgatgtacatgcaaaagataacacaagacctggtgctaatagtccagagatgtggtctgaagctattaaaatcctgaaaggggagtatgctgtccgggcaatcaaggaacataagatggatcaagcaattatcttctgtagaaccaaaattgactgtgataacttggagcagtactttatacaacaaggaggaggacctgataaaaaaggacaccagttctcatgtgtttgtcttcatggtgacagaaagcctcatgagagaaagcaaaacttggaaagatttaagaaaggagatgtaagattcttgatttgcacagatgtagctgctagaggaattgatatccacggtgttccttatgttataaatgtcactctgcccgatgaaaagcaaaactacgtacatcgaattggcagagtaggaagagctgaaaggatgggtctggcaatttccctggtggcaacagaaaaagaaaaggtttggtaccatgtatgtagcagccgtggaaaagggtgttataacacaagactcaaggaagatggaggctgtaccatatggtacaacgagatgcagttactatctgagatagaagaacacctgaactgtaccatttctcaggttgagccggatataaaggtaccagtggatgaatttgatgggaaagttacctacggtcagaaaagggctgctggtggtggaagctataaaggccatgtggatattttggcacctactgttcaagagttggctgcccttgaaaaggaggcgcagacatctttcctgcatcttggctaccttcctaaccagctgttcagaaccttctgatttttacatttactgaataagatttgagtaatgaaagtctgtagtcttaaaactctaaaacagttgtactgcttccaagcagcagtatttatagtaacgtaagctattaatgctaactcttgcatgtcaagaaacattagtcttaggaattcttcaaaaaatggcatcccaatgaaaataaatttgatgactata

SEQ ID NO: 2512 - DNA, 1463 bp, Homo Sapiens
  NM_004944
cagcctatgacacttttgctcctcctgaaatctccatatcttgcctttctcaaattccaaggtagcctttgcgcaacatatcactctccactgactcttgtcccatcagggcccatagtggatggctgtatgggggccatgtgactgaactcctgatcctcgtttcagcccactcatgtgacatgcatggagctcttcagcagggacttactgaccaggacaagagcttgagactttgaggggatctgattgtcactgcacaatcaaggacagtattcccaagagtggatgttgctcaagatagtccaaggaattctatgaagaaaaggactccacagacaataaattttggacaccctgtttcaacacagtgcatcttagagactggtgtttgcaagtatatggagcaggaaacttcatcccgaagatggagaccccggggctgtcagcaggcgttagagtcttgaagccagagcagcgccaggatgtcacgggagctggccccactgctgcttctcctcctctccatccacagcgccctggccatgaggatctgctccttcaacgtcaggtcctttggggaaagcaagcaggaagacaagaatgccatggatgtcattgtgaaggtcatcaaacgctgtgacatcatactcgtgatggaaatcaaggacagcaacaacaggatctgccccatactgatggagaagctgaacagaaattcaaggagaggcataacgtacaactatgtgattagctctcggcttggaagaaacacatataaagaacaatatgcctttctctacaaggaaaagctggtgtctgtgaagaggagttatcactaccatgactatcaggatggagacgcagatgtgttttccagggagccctttgtggtctggttccaatctccccacactgctgtcaaagacttcgtgattatccccctgcacaccaccccagagacatccgttaaggagatcgatgagttggttgaggtctacacggacgtgaaacaccgctggaaggcggagaatttcattttcatgggtgacttcaatgccggctgcagctacgtccccaagaaggcctggaagaacatccgcttgaggactgaccccaggtttgtttggctgatcggggaccaagaggacaccacggtgaagaagagcaccaactgtgcatatgacaggattgtgcttagaggacaagaaatcgtcagttctgttgttcccaagtcaaacagtgtttttgacttccagaaagcttacaagctgactgaagaggaggccctggatgtcagcgaccactttccagttgaatttaaactacagtcttcaagggccttcaccaacagcaaaaaatctgtcactctaaggaagaaaacaaagagcaaacgctcctagacccaagggtctcatcttattaaccatttcttgcctctaaataaaatgtctctaacagat

SEQ ID NO: 2513 - DNA, 3672 bp, Homo Sapiens
  NM_004945
gaggtcgctcgggtcgggtgtcgcctgagaaccggatgaggcggcgaccgtgaggccgagccgggagcgggcgtcttgccgaggcccgggcgggcggggagcaacggctacagacgccgcggggccaggtcgttgagggtcggcggcgggcgaggagcgcagggcgctcgggccgggggccgccggcgccatgggcaaccgcgggatggaagagctgatcccgctggtcaacaaactgcaggacgccttcagctccatcggccagagctgccacctggacctgccgcagatcgctgtagtgggcggccagagcgccggcaagagctcggtgctggagaacttcgtgggccgggacttccttccccgcggttcaggaatcgtcacccggcggcctctcattctgcagctcatcttctcaaaaacagaacatgccgagtttttgcactgcaagtccaaaaagtttacagactttgatgaagtccggcaggagattgaagcagagaccgacagggtcacggggaccaacaaaggcatctccccagtgcccatcaaccttcgagtctactcgccacacgtgttgaacttgaccctcatcgacctcccgggtatcaccaaggtgcctgtgggcgaccagcctccagacatcgagtaccagatcaaggacatgatcctgcagttcatcagccgggagagcagcctcattctggctgtcacgcccgccaacatggacctggccaactccgacgccctcaagctggccaaggaagtcgatccccaaggcctacggaccatcggtgtcatcaccaagcttgacctgatggacgagggcaccgacgccagggacgtcttggagaacaagttgctcccgttgagaagaggctacattggcgtggtgaaccgcagccagaaggatattgagggcaagaaggacatccgtgcagcactggcagctgagaggaagttcttcctctcccacccggcctaccggcacatggccgaccgcatgggcacgccacatctgcagaagacgctgaatcagcaactgaccaaccacatccgggagtcgctgccggccctacgtagcaaactacagagccagctgctgtccctggagaaggaggtggaggagtacaagaactttcggcccgacgaccccacccgcaaaaccaaagccctgctgcagatggtccagcagtttggggtggattttgagaagaggatcgagggctcaggagatcaggtggacactctggagctctccgggggcgcccgaatcaatcgcatcttccacgagcggttcccatttgagctggtgaagatggagtttgacgagaaggacttacgacgggagatcagctatgccattaagaacatccatggagtcaggaccgggcttttcaccccggacttggcattcgaggccattgtgaaaaagcaggtcgtcaagctgaaagagccctgtctgaaatgtgtcgacctggttatccaggagctaatcaatacagttaggcagtgtaccagtaagctcagttcctacccccggttgcgagaggagacagagcgaatcgtcaccacttacatccgggaacgggaggggagaacgaaggaccagattcttctgctgatcgacattgagcagtcctacatcaacacgaaccatgaggacttcatcgggtttgccaatgcccagcagaggagcacgcagctgaacaagaagagagccatccccaatcaggtgatccgcaggggctggctgaccatcaacaacatcagcctgatgaaaggcggctccaaggagtactggtttgtgctgactgccgagtcactgtcctggtacaaggatgaggaggagaaagagaagaagtacatgctgcctctggacaacctcaagatccgtgatgtggagaagggcttcatgtccaacaagcacgtcttcgccatcttcaacacggagcagagaaacgtctacaaggacctgcggcagatcgagctggcctgtgactcccaggaagacgtggacagctggaaggcctcgttcctccgagctggcgtctaccccgagaaggaccaggcagaaaacgaggatggggcccaggagaacaccttctccatggacccccaactggagcggcaggtggagaccattcgcaacctggtggactcatacgtggccatcatcaacaagtccatccgcgacctcatgccaaagaccatcatgcacctcatgatcaacaatacgaaggccttcatccaccacgagctgctggcctacctatactcctcggcagaccagagcagcctcatggaggagtcggctgaccaggcacagcggcgggacgacatgctgcgcatgtaccatgccctcaaggaggcgctcaacatcatcggtgacatcagcaccagcactgtgtccacgcctgtacccccgcctgtcgatgacacctggctccagagcgccagcagccacagccccactccacagcgccgaccggtgtccagcatacacccccctggccggcccccagcagtgaggggccccactccagggccccccctgattcctgttcccgtgggggcagcagcctccttctcggcgcccccaatcccatcccggcctggaccccagagcgtgtttgccaacagtgacctcttcccagccccgcctcagatcccatctcggccagttcggatccccccagggattcccccaggagtgcccagcagaagaccccctgctgcgcccagccggcccaccattatccgcccagccgagccatccctgctcgactaggcctcgaggggggcgtgctctcgggggggcctcacgcacccgcggcgcaggagcttcagtggtctggggccctccgccgcccctatgctgggaccaggctcccagtgggcagccctggcctcttccttaacgctggccccggtccagggccggcccctgtgcctggctggacaccgcactgcgcaaaggggccctggagctccaggcagggggcgctggggtgttgcactttgggggatggagtctcagggtggcagaggggggaccagaacccttgacaccatcctgaatgaggggtccagcctgggggggactctaccaaggtcttcttgggctgggaaagcccatgtagggcaggccttctataagtgcgggcaccaagggcgcctacatccccaggccttgctggggtgcaggggtatatcaacttcccattagcaggagctccccagcggcaagcctggcccagtgggctcggtagtgcccagctggcaggcctgaggtgtacatagtccttcccggccatattaaccacacagcctgagcctggcccagcctcggctgccagaggtgcctttgctaggcccggagccgttggcccgggccggccttgccctattcctctcctcctcctcctcctgggtcccccagggtggctgggcttgggctatgtgggtggtggtggcggggggtcttgggggcctctcagctcccgcccatgcctccctgatgggtgggcccagggcggcctctctctgaggagacctcacccactcctcgctcagtttgaccactgtaagtgcctgcactctgtattctattaataaactaaaataaagggaagacgctgctggtggctgctgaaaaaaaaaaaaaaaaaa

SEQ ID NO: 2514 - DNA, 4271 bp, Homo Sapiens
  NM_004948
acttgtaggaaagcctctttgcatttagacgtaattgaactggaaggaaggagactggccagggaatagggggaaagaaattctcccgttgctcctcctactgtttatcacttgcctccggactgtcttccaaaccaagctcagctgcatcaaggtggcagcagaataccctgtgcaagtgccagcgtcttcttagccgctctgtgcatcccaggctgccctgttatctggccaccgtccctggccattgggactgcttctgatggctctggcctctgctgccccagggagcatcttctgtaagcagctccttttctctctcctggttttaacattactttgcgatgcttgtcagaaagtttatcttcgagttccttctcatcttcaggctgaaacacttgtaggcaaagtgaatctggaggagtgtctcaagtcggccagcctaatccggtccagtgaccctgccttcagaattctagaagatggctcaatttacacaacacatgacctcattttgtcttctgaaaggaaaagtttttccattttcctttcagatggtcagagacgggaacaacaagagataaaagttgtactgtcagcaagagaaaacaagtctcctaagaagagacataccaaagacacagccctcaagcgcagcaagagacgatgggctcctattccagcttcattgatggagaactcgttgggtccatttccacaacacgttcagcagatccaatctgatgctgcacagaattacaccatcttttattccataagtgggccaggcgtggacaaagaacccttcaatttgttttacatagagaaagacactggggatatcttttgtacaaggagcattgaccgtgagaaatatgaacagtttgcgttatatggctatgcaacaactgcagatggctatgcaccagaatatccactccctttgatcatcaaaattgaagatgataatgataacgccccatattttgaacacagagtgactatctttactgtgcctgaaaattgccgatccggaacttcagtgggaaaagtgaccgccacagaccttgacgaacctgacactctccatactcgtctgaaatataaaatcttacaacaaatcccagatcatccaaagcatttctccatacacccagataccggtgtcatcaccacaactacaccttttctggatagagaaaaatgtgatacttaccagttaataatggaagtgcgagacatgggtggtcagcctttcggtttatttaatacaggaacaattactatttcacttgaggatgaaaatgacaatccaccatctttcacagaaacttcttatgttacagaagtagaagaaaacagaattgacgtggagattttacgaatgaaggtacaggatcaggatttgccaaacactcctcactcaaaggctgtatacaaaatcctacaaggaaatgaaaatggaaacttcataattagcacagatccaaatacaaatgaaggagtgctgtgtgttgtcaagccattgaactatgaagtcaatcgccaagttattttgcaagttggtgtcattaacgaggcacaattctctaaagcagcgagctcacaaactcctacaatgtgcactacaactgtcaccgttaaaattatagacagtgatgagggccctgaatgccaccctccagtgaaagttattcagagtcaagatggcttcccagctggccaagaactccttggatacaaagcactggacccggaaatatccagtggtgaaggcttaaggtatcagaagttaggggatgaagataactggtttgaaattaatcaacacactggcgacttgagaactctaaaagtactagatagagaatccaaatttgtaaaaaacaaccaatacaatatttcagttgttgcagtggatgcagttggccgatcttgcactggaacattagtagttcatttggatgattacaacgatcacgcacctcaaattgacaaagaagtgaccatttgtcagaataatgaggattttgctgttctgaaacctgtagatccagatggacctgaaaatggaccaccttttcaattctttctggataattctgccagtaaaaactggaacatagaagaaaaggatggtaaaactgccattcttcgtcaacggcaaaatcttgattataactattattctgtgcctattcaaataaaagacaggcatggtttagttgcaacacatatgttaacagtgagagtatgtgactgttcaactccatctgagtgtagaatgaaggataaaagtacaagagacgttagaccaaatgtaatacttggaagatgggctattcttgctatggtgttgggttctgtattgttattatgtattctgtttacatgtttctgtgtcactgctaagagaacagtcaagaaatgttttccagaagacatagcccagcaaaatttaattgtatcaaatactgaaggacctggagaagaagtaacggaagcaaatattagactccccatgcagacatccaacatttgtgacacaagcatgtctgttggtactgttggtggccagggaatcaaaacacagcaaagttttgagatggtcaaaggaggctacactttggattccaacaaaggaggtggacatcagaccttggagtccgtcaagggagtggggcagggagatactggcagatatgcgtacacggactggcagagtttcacccaacctcggcttggcgaagaatccattagaggacacactctgattaaaaattaaacagtaaaagaaggtgtatttgtgtggacaagatgaggagcataaacattgtgaagactacgtttgttcgtataactatgaaggcaaaggttctctggccggctcagtaggttgctgcagcgatcggcaggaagaagagggactggagtttctagatcacctggaacccaaatttaggacattagcaaagacatgcatcaagaaataaatgtgccttttaatagtgtaatatccacagatgcataagtaggaatttattacttgcagaatgttagcagcatctgctaatgtttttgtttatggaggtaaactttgtcatgtataggtaagggtactataaatatgagattcccctacattctccttgtctggtataacttccatgttctctagaaatcaaggttttgtttgttaattctcttttatatgcatgtatatattgcccttttcacgactgtactgtacaccttcttgcaccttttatttgcaaactgatgttactttttgtgctgtggaagagcatttgggaaagctgggtattatagaggccaatgaaagatgaatttgcattgtagatgtacgaattaaatatgttcttcaaaatcttggggagaattatgttcttagaacatagttggtgccagataattgcattctctccacctgagtggtttaaaaaggacttttaagtattcttcagtgcaatcttcagttttgtgattaagttcatttctcttttacacttttgtactcctcagagcagtgctcccagcattgttttctttcaggatccttcagagctcagtccctggacctctgcccatgtggatttgttgttaggtcactccaacttctagggttcttggaaagataaggaccagaacaagctcatagcaaattgaggggcagagattttatgaagattacatgagaagatttccatgaaagaattgcagccctgaggtccatgggttgacttatgctcacaaatatgtttcgtttgctcaacatggtttactactaacattttaaaaatataaatactttagcaaaaacattcactcttgagtttgacataggcctgccttatctgtggttgccacctgccatctccaagcatttggacaactagccctgatgcattaggctgcaactctgatatacagagactagcaccttgaatatgccagaaattgaattaccatctgtattagaacttaagactcagcctaaatttacagttactttaagaaaatgggcagtcagaattagggactagaatgtatatgagaaacccccactctactaaaaatataagaaattagccggacatggtggcgaatgactgtaatcccagctactcaggaggctgaggcaggagaatcgcttgaatccaggaggcggaggttgcagtgagccgagattgccactgcactccagcctgggcaacaagagcgaaactccgtctcaaaaaaaaaaaaaaaaa

SEQ ID NO: 2515 - DNA, 5257 bp, Homo Sapiens
  NM_004949
gtgcagtcagggcttctgctgggcagggccggctgttaatctcgcctggcggagcggacaccggggcgtggtgggggagatgggccttataggtggcgtccgctggtgagaaacaccttgcgcaggtaaaagggtggcggcgagagggagttcccacccgtggctttcttagagaaatgaagtcttaagtcttaaatagacaacaaggaggggccgatcggtgtcttttggacgcgtctggagcccctccctccgccaaaggaaaagccccttggatgagaggcaggcgcttcagagaagctaagaaaagcacctctccgcgcgccccacctcctccgcctcgcgctcctcctgagcagcgggcccagactgcgctccggccgcggccctcgccccgcggagccctcctaccccggcccgacgctcggcccgcgacctgccccgagccctctccatggaggcagcccgcccctccggctcctggaacggagccctctgccggctgctcctgctgaccctcgcgatcttaatatttgccagtgatgcctgcaaaaatgtgacattacatgttccctccaaactagatgccgagaaacttgttggtagagttaacctgaaagagtgctttacagctgcaaatctaattcattcaagtgatcctgacttccaaattttggaggatggttcagtctatacaacaaatactattctattgtcctcggagaagagaagttttaccatattactttccaacactgagaaccaagaaaagaagaaaatatttgtctttttggagcatcaaacaaaggtcctaaagaaaagacatactaaagaaaaagttctaaggcgcgccaagagaagatgggctccaattccttgttcgatgctagaaaactccttgggtccttttccacttttccttcaacaggttcaatctgacacggcccaaaactataccatatactattccataagaggtcctggagttgaccaagaacctcggaatttattttatgtggagagagacactggaaacttgtattgtactcgtcctgtagatcgtgagcagtatgaatcttttgagataattgcctttgcaacaactccagatgggtatactccagaacttccactgcccctaataatcaaaatagaggatgaaaatgataactacccaatttttacagaagaaacttatacttttacaatttttgaaaattgcagagtgggcactactgtgggacaagtgtgtgctactgacaaagatgagcctgacacgatgcacacacgcctgaagtactccatcattgggcaggtgccaccatcacccaccctattttctatgcatccaactacaggcgtgatcaccacaacatcatctcagctagacagagagttaattgacaagtaccagttgaaaataaaagtacaagacatggatggtcagtattttggtctacagacaacttcaacttgtatcattaacattgatgatgtaaatgaccacttgccaacatttactcgtacttcttatgtgacatcagtggaagaaaatacagttgatgtggaaatcttacgagttactgttgaggataaggacttagtgaatactgctaactggagagctaattataccattttaaagggcaatgaaaatggcaattttaaaattgtaacagatgccaaaaccaatgaaggagttctttgtgtagttaagcctttgaattatgaagaaaagcaacagatgatcttgcaaattggtgtagttaatgaagctccattttccagagaggctagtccaagatcagccatgagcacagcaacagttactgttaatgtagaagatcaggatgagggccctgagtgtaaccctccaatacagactgttcgcatgaaagaaaatgcagaagtgggaacaacaagcaatggatataaagcatatgacccagaaacaagaagtagcagtggcataaggtataagaaattaactgatccaacagggtgggtcaccattgatgaaaatacaggatcaatcaaagttttcagaagcctggatagagaggcagagaccatcaaaaatggcatatataatattacagtccttgcatcagaccaaggagggagaacatgtacggggacactgggcattatacttcaagacgtgaatgataacagcccattcatacctaaaaagacagtgatcatctgcaaacccaccatgtcatctgcggagattgttgcggttgatcctgatgagcctatccatggcccaccctttgactttagtctggagagttctacttcagaagtacagagaatgtggagactgaaagcaattaatgatacagcagcacgtctttcctatcagaatgatcctccatttggctcatatgtagtacctataacagtgagagatagacttggcatgtctagtgtcacttcattggatgttacactgtgtgactgcattaccgaaaatgactgcacacatcgtgtagatccaaggattggcggtggaggagtacaacttggaaagtgggccatccttgcaatattgttgggcatagcattgctcttttgcatcctgtttacgctggtctgtggggcttctgggacgtctaaacaaccaaaagtaattcctgatgatttagcccagcagaacctaattgtatcaaacacagaagctcctggagatgacaaagtgtattctgcgaatggcttcacaacccaaactgtgggcgcttctgctcagggagtttgtggcaccgtgggatcaggaatcaaaaacggaggtcaggagaccatcgaaatggtgaaaggaggacaccagacctcggaatcctgccggggggctggccaccatcacaccctggactcctgcaggggaggacacacggaggtggacaactgcagatacacttactcggagtggcacagttttactcagccccgtcttggtgaagaatccattagaggacacactctgattaaaaattaaacaatgaaagaaagtgtatctgtgtaatcaagatgaaaatcacaagcatgcccaagactatgtcctgacatataactatgaaggaagaggatcggtggctgggtctgtaggttgttgcagtgaacgacaagaagaagatgggcttgaatttttggataatttggagcccaaatttaggacactagcagaagcatgcatgaagagatgagtgtgttctaataagtctctgaaagccagtggctttatgacttttaaaaaaaattacaaaccaagaattttttaaagcagaagatgctatttgtgggggtttttctctcattatttggatggaatctctttggtcaaatgcacatttacagagagacactataaacaagtacacaaatttttcaatttttacatatttttaaattacttatcttctatccaaggaggtctacagagaaattaaagtctgccttatttgttacatttgggtataatgacaacagccaatttatagtgcaataaaatgtaattaattcaagtccttattatagactatttgaagcacaacctaatggaaaattgtagagaccttgctttaacattatctccagttaattaagtgttcatgtggtgcttggaaactgttgttttcctgaacatctaaagtgtgtagactgcattcttgctattattttattcttgtaatgtgaccttttcactgtgcaaagggagatttctagccaggcattgactattacaatttcattttggtggagtttagttttaggttttattgtatataaaatcctgcactgaatctgtgtctcctctgttacctacttttgccagtgaaatttaagttttaaaatactttcagaatgtatttttactactgcaagtttttggtctttaaaatgtcaagtagcatctctctctttctctctgtctctttctgtttctctctccagttttttttttttttttaatttccatatgggctaaagaatccaaatattttaaaaatctgtctctcttttcttctctcataaagtgaattattccttttttttgttttatgtaagtgtatatattcttagtttttcttgaaatcattgtaatgttaactttgttgtttcaaatatcttggtgattgcttcattatctcttcaacaaaaaaaacctttaattttgccattgaaactgtagaactatgccatgcttttattagaagcagtgctctgtgttaacaacaagaatggtgtaattagaattgggatgtggatatttactgtatgacaacacatttacagttctgtaatgcaaggatgcagtttaaaaatgtgaagtagtgatggtttttgaaataagctttaaaatatagggatcttgaaggctccctggggtaactattttataacttagataaaatggctagtcatatctgtgtgtttgtaaagttatttttttaatattttaagattacaattttaacaaatgtagaaatgagccaaactatttaaattttaaaacagtaaaacaaaatgaaacttaatagctcacaaaattccagtccatgtttcatgacttattttagtcaatgaattttctatttatactaaacatatggacattttaaatgtgtttctaatatttttgattatctataatgtgcctgtcttcaattcacaagattgggttataacaattatttgccagattaacactagggaattatttgataaccagcttatcttatcagtagttttattgctgatcaggcaaaaatagttttccaaagttatttttaataaagtatatacaaaattcttatatattactagtcatgataaagtaaattaagcagtttttaaaacttagtgtgagtttgttcatcacaggtctgatatgagtttaagggatttcgcactccctgaatcagagaagtaagaccccttccttagattcctgttatacattttttaaaatgtagagtttgttttggagacattttcagtgcattgttattgccatatttatataatatgactattctaaaggctgtgaggccatggggtattggttaagttgcttgcttttgctttgtccattttcatcattttaaaatgggggataataacagaacttgtttcctagggccattgtaagtcacttgaataaaaaatagttttgaagcatgagagtcatacagagcggtccacctaaaaggcactcctgataataataaatgattttaaacaaaaaaaaaaaaaa

SEQ ID NO: 2516 - DNA, 1801 bp, Homo Sapiens
  NM_004951
atgctcagtcacagggtgacagagaaaaaaaaagtcaccaccataaaaggaggtctgcacagcctctcttaaaacaacatgccacagttaaaacttacttcagtttggacaactactcacagctactacacagagacccgaacgagtcactgatatacacctggaccaccaccaatggatatacaaatggcaaacaattttactccgccctctgcaactcctcagggaaatgactgtgacctctatgcacatcacagcacggccaggatagtaatgcctctgcattacagcctcgtcttcatcattgggctcgtgggaaacttactagccttggtcgtcattgttcaaaacaggaaaaaaatcaactctaccaccctctattcaacaaatttggtgatttctgatatactttttaccaccgctttgcctacacgaatagcctactatgcaatgggctttgactggagaatcggagatgccttgtgtaggataactgcgctagtgttttacatcaacacatatgcaggtgtgaactttatgacctgcctgagtattgaccgcttcattgctgtggtgcaccctctacgctacaacaagataaaaaggattgaacatgcaaaaggcgtgtgcatatttgtctggattctagtatttgctcagacactcccactcctcatcaaccctatgtcaaagcaggaggctgaaaggattacatgcatggagtatccaaactttgaagaaactaaatctcttccctggattctgcttggggcatgtttcataggatatgtacttccacttataatcattctcatctgctattctcagatctgctgcaaactcttcagaactgccaaacaaaacccactcactgagaaatctggtgtaaacaaaaaggctctcaacacaattattcttattattgttgtgtttgttctctgtttcacaccttaccatgttgcaattattcaacatatgattaagaagcttcgtttctctaatttcctggaatgtagccaaagacattcgttccagatttctctgcactttacagtatgcctgatgaacttcaattgctgcatggacccttttatctacttctttgcatgtaaagggtataagagaaaggttatgaggatgctgaaacggcaagtcagtgtatcgatttctagtgctgtgaagtcagcccctgaagaaaattcacgtgaaatgacagaaacgcagatgatgatacattccaagtcttcaaatggaaagtgaaatggattgtattttggtttatagtgacgtaaactgtatgacaaactttgcaggacttcccttataaagcaaaataattgttcagcttccaattagtattcttttatatttctttcattgggcactttcccatctccaactcggaagtaagcccaagagaacaacataaagcaaacaacataaagcacaataaaaatgcaaataaatatttcatttttatttgtaaacgaatacaccaaaaggaggcgctcttaataactcccaatgtaaaaagttttgttttaataaaaaatttaattattatttcttgccaacaaatggctagaaaggactgaatagattatatattgccagatgttaatactgtaacatactttttaaataacatatttcttaaatccaaatttctctcaatgttagatttaattccctcaataacaccaatgttttgttttgtttcgttctgggtcataaaactttgttaaggaactcttttggaataaagagcaggatgctgcaaagttaaaaaaaaaaaaaaaaa

SEQ ID NO: 2517 - DNA, 8733 bp, Homo Sapiens
  NM_004958
gctcccggcttagaggacagcggggaaggcgggcggtggggcagggggcctgaagcggcggtaccggtgctggcggcggcagctgaggccttggccgaagccgcgcgaacctcagggcaagatgcttggaaccggacctgccgccgccaccaccgctgccaccacatctagcaatgtgagcgtcctgcagcagtttgccagtggcctaaagagccggaatgaggaaaccagggccaaagccgccaaggagctccagcactatgtcaccatggaactccgagagatgagtcaagaggagtctactcgcttctatgaccaactgaaccatcacatttttgaattggtttccagctcagatgccaatgagaggaaaggtggcatcttggccatagctagcctcataggagtggaaggtgggaatgccacccgaattggcagatttgccaactatcttcggaacctcctcccctccaatgacccagttgtcatggaaatggcatccaaggccattggccgtcttgccatggcaggggacacttttaccgctgagtacgtggaatttgaggtgaagcgagccctggaatggctgggtgctgaccgcaatgagggccggagacatgcagctgtcctggttctccgtgagctggccatcagcgtccctaccttcttcttccagcaagtgcaacccttctttgacaacatttttgtggccgtgtgggaccccaaacaggccatccgtgagggagctgtagccgcccttcgtgcctgtctgattctcacaacccagcgtgagccgaaggagatgcagaagcctcagtggtacaggcacacatttgaagaagcagagaagggatttgatgagaccttggccaaagagaagggcatgaatcgggatgatcggatccatggagccttgttgatccttaacgagctggtccgaatcagcagcatggagggagagcgtctgagagaagaaatggaagaaatcacacagcagcagctggtacacgacaagtactgcaaagatctcatgggcttcggaacaaaacctcgtcacattacccccttcaccagtttccaggctgtacagccccagcagtcaaatgccttggtggggctgctggggtacagctctcaccaaggcctcatgggatttgggacctcccccagtccagctaagtccaccctggtggagagccggtgttgcagagacttgatggaggagaaatttgatcaggtgtgccagtgggtgctgaaatgcaggaatagcaagaactcgctgatccaaatgacaatccttaatttgttgccccgcttggctgcattccgaccttctgccttcacagatacccagtatctccaagataccatgaaccatgtcctaagctgtgtcaagaaggagaaggaacgtacagcggccttccaagccctggggctactttctgtggctgtgaggtctgagtttaaggtctatttgcctcgcgtgctggacatcatccgagcggccctgcccccaaaggacttcgcccataagaggcagaaggcaatgcaggtggatgccacagtcttcacttgcatcagcatgctggctcgagcaatggggccaggcatccagcaggatatcaaggagctgctggagcccatgctggcagtgggactaagccctgccctcactgcagtgctctacgacctgagccgtcagattccacagctaaagaaggacattcaagatgggctactgaaaatgctgtccctggtccttatgcacaaaccccttcgccacccaggcatgcccaagggcctggcccatcagctggcctctcctggcctcacgaccctccctgaggccagcgatgtgggcagcatcactcttgccctccgaacgcttggcagctttgaatttgaaggccactctctgacccaatttgttcgccactgtgcggatcatttcctgaacagtgagcacaaggagatccgcatggaggctgcccgcacctgctcccgcctgctcacaccctccatccacctcatcagtggccatgctcatgtggttagccagaccgcagtgcaagtggtggcagatgtgcttagcaaactgctcgtagttgggataacagatcctgaccctgacattcgctactgtgtcttggcgtccctggacgagcgctttgatgcacacctggcccaggcggagaacttgcaggccttgtttgtggctctgaatgaccaggtgtttgagatccgggagctggccatctgcactgtgggccgactcagtagcatgaaccctgcctttgtcatgcctttcctgcgcaagatgctcatccagattttgacagagttggagcacagtgggattggaagaatcaaagagcagagtgcccgcatgctggggcacctggtctccaatgccccccgactcatccgcccctacatggagcctattctgaaggcattaattttgaaactgaaagatccagaccctgatccaaacccaggtgtgatcaataatgtcctggcaacaataggagaattggcacaggttagtggcctggaaatgaggaaatgggttgatgaactttttattatcatcatggacatgctccaggattcctctttgttggccaaaaggcaggtggctctgtggaccctgggacagttggtggccagcactggctatgtagtagagccctacaggaagtaccctactttgcttgaggtgctactgaattttctgaagactgagcagaaccagggtacacgcagagaggccatccgtgtgttagggcttttaggggctttggatccttacaagcacaaagtgaacattggcatgatagaccagtcccgggatgcctctgctgtcagcctgtcagaatccaagtcaagtcaggattcctctgactatagcactagtgaaatgctggtcaacatgggaaacttgcctctggatgagttctacccagctgtgtccatggtggccctgatgcggatcttccgagaccagtcactctctcatcatcacaccatggttgtccaggccatcaccttcatcttcaagtccctgggactcaaatgtgtgcagttcctgccccaggtcatgcccacgttccttaacgtcattcgagtctgtgatggggccatccgggaatttttgttccagcagctgggaatgttggtgtcctttgtgaagagccacatcagaccttatatggatgaaatagtcaccctcatgagagaattctgggtcatgaacacctcaattcagagcacgatcattcttctcattgagcaaattgtggtagctcttgggggtgaatttaagctctacctgccccagctgatcccacacatgctgcgtgtcttcatgcatgacaacagcccaggccgcattgtctctatcaagttactggctgcaatccagctgtttggcgccaacctggatgactacctgcatttactgctgcctcctattgttaagttgtttgatgcccctgaagctccactgccatctcgaaaggcagcgctagagactgtggaccgcctgacggagtccctggatttcactgactatgcctcccggatcattcaccctattgttcgaacactggaccagagcccagaactgcgctccacagccatggacacgctgtcttcacttgtttttcagctggggaagaagtaccaaattttcattccaatggtgaataaagttctggtgcgacaccgaatcaatcatcagcgctatgatgtgctcatctgcagaattgtcaagggatacacacttgctgatgaagaggaggatcctttgatttaccagcatcggatgcttaggagtggccaaggggatgcattggctagtggaccagtggaaacaggacccatgaagaaactgcacgtcagcaccatcaacctccaaaaggcctggggcgctgccaggagggtctccaaagatgactggctggaatggctgagacggctgagcctggagctgctgaaggactcatcatcgccctccctgcgctcctgctgggccctggcacaggcctacaacccgatggccagggatctcttcaatgctgcatttgtgtcctgctggtctgaactgaatgaagatcaacaggatgagctcatcagaagcatcgagttggccctcacctcacaagacatcgctgaagtcacacagaccctcttaaacttggctgaattcatggaacacagtgacaagggccccctgccactgagagatgacaatggcattgttctgctgggtgagagagctgccaagtgccgagcatatgccaaagcactacactacaaagaactggagttccagaaaggccccacccctgccattctagaatctctcatcagcattaataataagctacagcagccggaggcagcggccggagtgttagaatatgccatgaaacactttggagagctggagatccaggctacctggtatgagaaactgcacgagtgggaggatgcccttgtggcctatgacaagaaaatggacaccaacaaggacgacccagagctgatgctgggccgcatgcgctgcctcgaggccttgggggaatggggtcaactccaccagcagtgctgtgaaaagtggaccctggttaatgatgagacccaagccaagatggcccggatggctgctgcagctgcatggggtttaggtcagtgggacagcatggaagaatacacctgtatgatccctcgggacacccatgatggggcattttatagagctgtgctggcactgcatcaggacctcttctccttggcacaacagtgcattgacaaggccagggacctgctggatgctgaattaactgcgatggcaggagagagttacagtcgggcatatggggccatggtttcttgccacatgctgtccgagctggaggaggttatccagtacaaacttgtccccgagcgacgagagatcatccgccagatctggtgggagagactgcagggctgccagcgtatcgtagaggactggcagaaaatccttatggtgcggtcccttgtggtcagccctcatgaagacatgagaacctggctcaagtatgcaagcctgtgcggcaagagtggcaggctggctcttgctcataaaactttagtgttgctcctgggagttgatccgtctcggcaacttgaccatcctctgccaacagttcaccctcaggtgacctatgcctacatgaaaaacatgtggaagagtgcccgcaagatcgatgccttccagcacatgcagcattttgtccagaccatgcagcaacaggcccagcatgccatcgctactgaggaccagcagcataagcaggaactgcacaagctcatggcccgatgcttcctgaaacttggagagtggcagctgaatctacagggcatcaatgagagcacaatccccaaagtgctgcagtactacagcgccgccacagagcacgaccgcagctggtacaaggcctggcatgcgtgggcagtgatgaacttcgaagctgtgctacactacaaacatcagaaccaagcccgcgatgagaagaagaaactgcgtcatgccagcggggccaacatcaccaacgccaccactgccgccaccacggccgccactgccaccaccactgccagcaccgagggcagcaacagtgagagcgaggccgagagcaccgagaacagccccaccccatcgccgctgcagaagaaggtcactgaggatctgtccaaaaccctcctgatgtacacggtgcctgccgtccagggcttcttccgttccatctccttgtcacgaggcaacaacctccaggatacactcagagttctcaccttatggtttgattatggtcactggccagatgtcaatgaggccttagtggagggggtgaaagccatccagattgatacctggctacaggttatacctcagctcattgcaagaattgatacgcccagacccttggtgggacgtctcattcaccagcttctcacagacattggtcggtaccacccccaggccctcatctacccactgacagtggcttctaagtctaccacgacagcccggcacaatgcagccaacaagattctgaagaacatgtgtgagcacagcaacaccctggtccagcaggccatgatggtgagcgaggagctgatccgagtggccatcctctggcatgagatgtggcatgaaggcctggaagaggcatctcgtttgtactttggggaaaggaacgtgaaaggcatgtttgaggtgctggagcccttgcatgctatgatggaacggggcccccagactctgaaggaaacatcctttaatcaggcctatggtcgagatttaatggaggcccaagagtggtgcaggaagtacatgaaatcagggaatgtcaaggacctcacccaagcctgggacctctattatcatgtgttccgacgaatctcaaagcagctgcctcagctcacatccttagagctgcaatatgtttccccaaaacttctgatgtgccgggaccttgaattggctgtgccaggaacatatgaccccaaccagccaatcattcgcattcagtccatagcaccgtctttgcaagtcatcacatccaagcagaggccccggaaattgacacttatgggcagcaacggacatgagtttgttttccttctaaaaggccatgaagatctgcgccaggatgagcgtgtgatgcagctcttcggcctggttaacacccttctggccaatgacccaacatctcttcggaaaaacctcagcatccagagatacgctgtcatccctttatcgaccaactcgggcctcattggctgggttccccactgtgacacactgcacgccctcatccgggactacagggagaagaagaagatccttctcaacatcgagcatcgcatcatgttgcggatggctccggactatgaccacttgactctgatgcagaaggtggaggtgtttgagcatgccgtcaataatacagctggggacgacctggccaagctgctgtggctgaaaagccccagctccgaggtgtggtttgaccgaagaaccaattatacccgttctttagcggtcatgtcaatggttgggtatattttaggcctgggagatagacacccatccaacctgatgctggaccgtctgagtgggaagatcctgcacattgactttggggactgctttgaggttgctatgacccgagagaagtttccagagaagattccatttagactaacaagaatgttgaccaatgctatggaggttacaggcctggatggcaactacagaatcacatgccacacagtgatggaggtgctgcgagagcacaaggacagtgtcatggccgtgctggaagcctttgtctatgaccccttgctgaactggaggctgatggacacaaataccaaaggcaacaagcgatcccgaacgaggacggattcctactctgctggccagtcagtcgaaattttggacggtgtggaacttggagagccagcccataagaaaacggggaccacagtgccagaatctattcattctttcattggagacggtttggtgaaaccagaggccctaaataagaaagctatccagattattaacagggttcgagataagctcactggtcgggacttctctcatgatgacactttggatgttccaacgcaagttgagctgctcatcaaacaagcgacatcccatgaaaacctctgccagtgctatattggctggtgccctttctggtaactggaggcccagatgtgcccatcacgttttttctgaggcttttgtactttagtaaatgcttccactaaactgaaaccatggtgagaaagtttgactttgttaaatattttgaaatgtaaatgaaaagaactactgtatattaaaagttggtttgaaccaactttctagctgctgttgaagaatatattgtcagaaacacaaggcttgatttggttcccaggacagtgaaacatagtaataccacgtaaatcaagccattcattttggggaacagaagatccataactttagaaatacgggttttgacttaactcacaagagaactcatcataagtacttgctgatggaagaatgacctagttgctcctctcaacatgggtacagcaaactcagcacagccaagaagcctcaggtcgtggagaacatggattaggatcctagactgtaaagacacagaagatgctgacctcacccctgccacctatcccaagacctcactggtctgtggacagcagcagaaatgtttgcaagataggccaaaatgagtacaaaaggtctgtcttccatcagacccagtgatgctgcgactcacacgcttcaattcaagacctgaccgctagtagggaggtttattcagatcgctggcagcctcggctgagcagatgcacagaggggatcactgtgcagtgggaccaccctcactggccttctgcagcagggttctgggatgttttcagtggtcaaaatactctgtttagagcaagggctcagaaaacagaaatactgtcatggaggtgctgaacacagggaaggtctggtacatattggaaattatgagcagaacaaatactcaactaaatgcacaaagtataaagtgtagccatgtctagacaccatgttgtatcagaataatttttgtgccaataaatgacatcagaattttaaacatatgtaaaaaaaaa

SEQ ID NO: 2518 - DNA, 5119 bp, Homo Sapiens
  NM_004960
acttaagcttcgacgcaggaggcggggctgctcagtcctccaggcgtcggtactcagcggtgttggaacttcgttgcttgcttgcctgtgcgcgcgtgcgcggacatggcctcaaacgattatacccaacaagcaacccaaagctatggggcctaccccacccagcccgggcagggctattcccagcagagcagtcagccctacggacagcagagttacagtggttatagccagtccacggacacttcaggctatggccagagcagctattcttcttatggccagagccagaacacaggctatggaactcagtcaactccccagggatatggctcgactggcggctatggcagtagccagagctcccaatcgtcttacgggcagcagtcctcctaccctggctatggccagcagccagctcccagcagcacctcgggaagttacggtagcagttctcagagcagcagctatgggcagccccagagtgggagctacagccagcagcctagctatggtggacagcagcaaagctatggacagcagcaaagctataatccccctcagggctatggacagcagaaccagtacaacagcagcagtggtggtggaggtggaggtggaggtggaggtaactatggccaagatcaatcctccatgagtagtggtggtggcagtggtggcggttatggcaatcaagaccagagtggtggaggtggcagcggtggctatggacagcaggaccgtggaggccgcggcaggggtggcagtggtggcggcggcggcggcggcggtggtggttacaaccgcagcagtggtggctatgaacccagaggtcgtggaggtggccgtggaggcagaggtggcatgggcggaagtgaccgtggtggcttcaataaatttggtggccctcgggaccaaggatcacgtcatgactccgaacaggataattcagacaacaacaccatctttgtgcaaggcctgggtgagaatgttacaattgagtctgtggctgattacttcaagcagattggtattattaagacaaacaagaaaacgggacagcccatgattaatttgtacacagacagggaaactggcaagctgaagggagaggcaacggtctcttttgatgacccaccttcagctaaagcagctattgactggtttgatggtaaagaattctccggaaatcctatcaaggtctcatttgctactcgccgggcagactttaatcggggtggtggcaatggtcgtggaggccgagggcgaggaggacccatgggccgtggaggctatggaggtggtggcagtggtggtggtggccgaggaggatttcccagtggaggtggtggcggtggaggacagcagcgagctggtgactggaagtgtcctaatcccacctgtgagaatatgaacttctcttggaggaatgaatgcaaccagtgtaaggcccctaaaccagatggcccaggagggggaccaggtggctctcacatggggggtaactacggggatgatcgtcgtggtggcagaggaggctatgatcgaggcggctaccggggccgcggcggggaccgtggaggcttccgagggggccggggtggtggggacagaggtggctttggccctggcaagatggattccaggggtgagcacagacaggatcgcagggagaggccgtattaattagcctggctccccaggttctggaacagctttttgtcctgtacccagtgttaccctcgttattttgtaaccttccaattcctgatcacccaagggtttttttgtgtcggactatgtaattgtaactatacctctggttcccattaaaagtgaccattttagttaaattttgttcctcttcccccttttcactttcctggaagatcgatgtcccgatcaggaaggtagagagttttcctgttcagattaccctgcccagcaggaactggaatacagtgttcggggagaaggccaaatgatatccttgagagcagagattaaacttttctgtcatggggaaagttggtgtataaatgagaaatgaagaacatgggatgtcatgagtgttggcctaaatttgcccagctatggggaatttttcctttaccacatttatttgcatactggtcttagtttatttgcagcagtttatccctttttaagaactctttgatcttttggcccttttaatggtgaggctcaaacaaactacatttaaatggggcagtattcagatttgaccatggtggagagcgcttagccactctgggtctttcacaggaaggagagtaactgagtgctgcaggagtttgtggagtggagtcaggatctaggaggtgagtgactcccttcctagctgccctggtgaacagcgcttgggtagatacctgctataaggagactggtctggctgggttactttcacatcctgcctgtactcagagggcttgaggtcattgacattatgagattttaggcttgatccctttttgattggagggtggaaggccctcctaagggaatgataagtgataagagggggaaggggttgcagccaatgagttaaaaccttagagcagtgctcctcagcctcttaccatgtggttgtaaacttgcacgtacctgccaaccagttatttagcatgctttttattttagttacacagagcgtaacattaacccaagagcagaaaggttttatttacagggttttcgaacttggtttgtaagacagctgccatcacaagcatagcttacaaatgtgctggggacccctaattgggaagtgctttcctctcaaatttttattttttatttttagagacagagtcttgctctgtcatccaggctggagtgcagtggcgtgatctcggctcactgtagcctctgcctcctgagtttaagcgattctcctgcctcaggagaatcccagcttctgagtagctgagactacaggcgtgggccaccatgcccacctagtttttgcatttttagtggaggtgtggtttcactgtgttggccaggctggtctcttaactcctgacctcaggtgatccacctgccttggcctcccaaagtgctggaattacaggcatgagccgctgcatctggccatcctctcaaattttcaagtgttccacaagtatgttctctactgaagagttgctgcatccttgaatcttgggtgatttgaggcacagaaactatgactttattttttgagatggagttttgctcttgttgcccaggctggagtgcaatggcacgtttttcggcttaccgcaactgccgcctcctgggttcaagcgatagctgggattacaggcatgcgccaccatgcccagctaatttatttgtatttttagtagagacggggtttctccatgttggtcaggctggtctcgaactcccgacctcaggtgatgtgcacacctcagcctcccaataaaccatgacttttaagaggaatagcaggtttacttcccctgccagcattggggtgctctctaagcaacagtaggcggagagtggtctggcgtattaaaaacaaaggatcgtcaagtgggccttcccaggcattgctttgacttagtacatgtagaggatgtggcagttctctccgtccctgccactgctggtttctttgttaaatgtttagttgaaatggcctgatacgatatttgagtagttcactgttggtgctttgcctagcaggattctaatcttgctttggttgtggtcccctgatgccctcctgttaggagtggaggaggtcgaagctccttgtaagatatgattactgggaccattagtgtcaagttcctgtgtccttcaaatggcatatgtgattggccttgaccttaaaaggaaatagggtcccaggtgactgtttagtgggtaggtccagtttggggggatcttccaggagaatggatagagacacctagcagcagagagaacattggtgcctctcaagccaacctcccacctcagcctcccaagtagctgggactacaggtgcttcctcgctaccacacctgggtaattttttttttaattacttttttttttttaagaaacagggtttcactgggttgcccaggctggtcttgaactggcctcaagtgacctgcctgcctcagcctcccaaagtgctgggatcacaggtgtgacccactgcgtttggccagaatactctattcttactgaatgattgaaatctgtcttgaagcattaggtgtcccatttttgtgagttggaattgggacaggctaagtaggaagtgaggagggtggggagagctgtgctgtaggtctgtttgtcccttccttgatgtagccttcagttagccctttcagcttttttccccatcttgtgccgggccttcctgggtttcagtacttggatgtagggctgcagttatgtcagtggtgggtagattgaccaggaattaaggtctagggtccagcccatgtgagacttgactcactgatctacctttaggcatgtcttccttccagtctcatcctttttaaattttttttttttttttgagacggtctcactctcacccaggctggattgcagtggtgtgatctcgaccaactgcaacctctgcctcccacccgcaagctatctgcccacctcagcctctggagtagctgggacgggactacaggcacctgccaccatgactggctaatttttttttgtattttttgtggagatggggtcttgccatgttgctcaggctggtctggtctcaaaactgctctgggctcaagtgattgtcccactttggcctcccagagtgctgggattaaggtgtgagatactgtgtccggctatgaaaattttatttttaattaacttgtatatatttatggggtacaatgtcctatttctgtacatgtacacattgtggaatcaaatcaggctaatatatccatcacttcatatcattagcatgaatgagaacatacaaagccactcttagaaaattttgaaatttatgttatttcagcccttttatgctggaggttgcaaatgttttgtgaataatcagaccaaaaataaaaacaaaaaatgattgacttcagtcattcagtaagaa

SEQ ID NO: 2519 - DNA, 2091 bp, Homo Sapiens
  NM_004964
gagcggagccgcgggcgggagggcggacggaccgactgacggtagggacgggaggcgagcaagatggcgcagacgcagggcacccggaggaaagtctgttactactacgacggggatgttggaaattactattatggacaaggccacccaatgaagcctcaccgaatccgcatgactcataatttgctgctcaactatggtctctaccgaaaaatggaaatctatcgccctcacaaagccaatgctgaggagatgaccaagtaccacagcgatgactacattaaattcttgcgctccatccgtccagataacatgtcggagtacagcaagcagatgcagagattcaacgttggtgaggactgtccagtattcgatggcctgtttgagttctgtcagttgtctactggtggttctgtggcaagtgctgtgaaacttaataagcagcagacggacatcgctgtgaattgggctgggggcctgcaccatgcaaagaagtccgaggcatctggcttctgttacgtcaatgatatcgtcttggccatcctggaactgctaaagtatcaccagagggtgctgtacattgacattgatattcaccatggtgacggcgtggaagaggccttctacaccacggaccgggtcatgactgtgtcctttcataagtatggagagtacttcccaggaactggggacctacgggatatcggggctggcaaaggcaagtattatgctgttaactacccgctccgagacgggattgatgacgagtcctatgaggccattttcaagccggtcatgtccaaagtaatggagatgttccagcctagtgcggtggtcttacagtgtggctcagactccctatctggggatcggttaggttgcttcaatctaactatcaaaggacacgccaagtgtgtggaatttgtcaagagctttaacctgcctatgctgatgctgggaggcggtggttacaccattcgtaacgttgcccggtgctggacatatgagacagctgtggccctggatacggagatccctaatgagcttccatacaatgactactttgaatactttggaccagatttcaagctccacatcagtccttccaatatgactaaccagaacacgaatgagtacctggagaagatcaaacagcgactgtttgagaaccttagaatgctgccgcacgcacctggggtccaaatgcaggcgattcctgaggacgccatccctgaggagagtggcgatgaggacgaagacgaccctgacaagcgcatctcgatctgctcctctgacaaacgaattgcctgtgaggaagagttctccgattctgaagaggagggagaggggggccgcaagaactcttccaacttcaaaaaagccaagagagtcaaaacagaggatgaaaaagagaaagacccagaggagaagaaagaagtcaccgaagaggagaaaaccaaggaggagaagccagaagccaaaggggtcaaggaggaggtcaagttggcctgaatggacctctccagctctggcttcctgctgagtccctcacgtttcttccccaacccctcagattttatattttctatttctctgtgtatttatataaaaatttattaaatataaatatccccagggacagaaaccaaggccccgagctcagggcagctgtgctgggtgagctcttccaggagccaccttgccacccattcttcccgttcttaactttgaaccataaagggtgccaggtctgggtgaaagggatacttttatgcaaccataagacaaactcctgaaatgccaagtgcctgcttagtagctttggaaaggtgcccttattgaacattctagaaggggtggctgggtcttcaaggatctcctgtttttttcaggctcctaaagtaacatcagccatttttagattggttctgttttcgtaccttcccactggcctcaagtgagccaagaaacactgcctgccctctgtctgtcttctcctaattctgcaggtggaggttgctagtctagtttcctttttgagatactattttcatttttgtgagcctctttgtaataaaatggtacatttct

SEQ ID NO: 2520 - DNA, 1313 bp, Homo Sapiens
  NM_004965
ggggaggaggaggcgggctcccaatccggttccatccggttctcccaccgcccccgctgtgggtctcagcagctcgggcggcgggaggagtggcagcggcaaggcagcccagtttcgcgaaggctgtcggcgcgccgcggcccgcaggcacccggcacgcgccttccccgcaggcacccggcacgcgccttccccgccgccacgatgcccaagaggaaggtcagctccgccgaaggcgccgccaaggaagagcccaagaggagatcggcgcggttgtcagctaaacctcctgcaaaagtggaagcgaagccgaaaaaggcagcagcgaaggataaatcttcagacaaaaaagtgcaaacaaaagggaaaaggggagcaaagggaaaacaggccgaagtggctaaccaagaaactaaagaagacttacctgcggaaaacggggaaacgaagactgaggagagtccagcctctgatgaagcaggagagaaagaagccaagtctgattaataaccatataccatgtcttatcagtggtccctgtctcccttcttgtacaatccagaggaatatttttatcaactattttgtaaatgcaagttttttagtagctctagaaacatttttaagaaggagggaatcccacctcatcccattttttaagtgtaaatgcttttttttaagaggtgaaatcatttgctggttgtttattttttggtacaaccagaaaatagtgtgggatattgaattatgggaggctctgactgtctcgggtgtcagcttaacattccacagatggggggttagtttttatatcctataatacaaagcatattaaatggcaatatggagtcagtcctgcatttaatgtcttgaacattttaaattacttctattaccatgttgttttttagtagaattgtttcctaaagaaaaccactctttgatcatggctctctctgccagaattgtgtgcactctgtaacatctttgtggtagtcctgttttcctaataactttgttactgtgctgtgaaagattacagatttgaacatgtagtgtacgtgctgttgagttgtgaactggtgggccgtatgtaacagctgaccaacgtgaagatactggtacttgatagcctcttaaggaaaatttgcttccaaattttaagctggaaagtcactggaataactttaaaaaagaattacaatacatggctttttagaatttcgttacgtatgttaagatttgtgtacaaattgaaatgtctgtactgatcctcaaccaataaaatctcagttatgaaaataaaaaaaaaa

SEQ ID NO: 2521 - DNA, 2396 bp, Homo Sapiens
  NM_004968
actctgggcggcggatccgagcgggggataccccaggagatgggggtcgaggagagaccccggggagtagagagagagaaactcactccccgagtccccgaccctccccaagcaaggttataatataacttatcctctcatgcttttttcctgccccttctccccaaatcatcaacaatagaagaagaagaaaacatgtcaggacacaaatgcagttatccctgggacttacaggatcgatatgctcaagataagtcagttgtaaataagatgcaacagaaatattgggagacgaagcaggcctttattaaagccacagggaagaaggaagatgaacatgttgttgcctctgacgcggacctggatgccaagctagagctgtttcattcaattcagagaacctgtctggacttatcgaaagcaattgtactctatcaaaagaggatatgtttcttgtctcaagaagaaaacgaactgggaaaatttcttcgatcccaaggtttccaagataaaaccagagcaggaaagatgatgcaagcgacaggaaaggccctctgcttttcttcccagcaaaggttggccttacgaaatcctttgtgtcgatttcaccaagaagtggagacttttcggcatcgggccatctcagatacttggctgacggtgaaccgcatggaacagtgcaggacggaatatagaggagcactattatggatgaaggacgtgtctcaggagcttgatccagacctctacaagcaaatggagaagttcaggaaggtacaaacacaagtgcgccttgcaaaaaaaaactttgacaaattgaagatggatgtttgtcaaaaagtggatcttcttggagcgagcagatgcaatctcttgtctcacatgctagcaacataccagaccactctgcttcatttttgggagaaaacttctcacactatggcagccatccatgagagtttcaaaggttatcaaccatatgaatttactactttaaagagcttacaagaccctatgaaaaaattagttgagaaagaagagaagaagaaaatcaaccagcaggaaagtacagatgcagccgtgcaggagccgagccaattaatttcattagaggaagaaaaccagcgcaaggaatcctctagttttaagactgaagatggaaaaagtattttatctgccttagacaaaggctctacacatactgcatgctcaggacccatagatgaactattagacatgaaatctgaggaaggtgcttgcctgggaccagtggcagggaccccggaacctgaaggtgctgacaaagatgacctgctgctgttgagtgagatcttcaatgcttcctccttggaagagggcgagttcagcaaagagtgggccgctgtgtttggagacggccaagtgaaggagccagtgcccactatggccctgggagagccagaccccaaggcccagacaggctcaggtttccttccttcgcagcttttagaccaaaatatgaaagacttacaggcctcgctacaagaacctgctaaggctgcctcagacctgactgcctggttcagcctcttcgctgacctcgacccactctcaaatcctgatgctgttgggaaaaccgataaagaacacgaattgctcaatgcatgaatctgtacccttcgggagggcactcacatgccgcccccagcagctcccctgggggctagcagaagtataaagtgatcagtatgctgttttaataattatgtgccattttaataaaatgaaagggtcaacggccctgtttatattggtataattatttactcttatttggtataaagggttttcgtgtatctctatgtggatctaaataatacaggattgtctagaagcggtttccaggccaccgctctcctgcctacatcccatcatggctgctgcggtgtcactgggctaccgtgagatccaagttgaaatcagaagcctactttgatggtaggtttgaatgacgtgtcctacagcctcagaggcagcaggaggctagcaaagcttaaatgcctccttctctgcccccagcctctgtcccccttggaggagggctgtaggaagattccctcttcctgccaagccaccttccagtgagctctggatgaagctctggccaaccaaagacactgtccccacagcaggtgcctggtgggccacgtgttctcacactggtggaggagctgggcttctgtccaaggcacaaaccttactatggaaagcagccatatttgcagataccactgtctccttttgtcctcttcgtggctggaattcaaaagcatgtatttctgaagcctcttgtgacattgttttttttttttttttaattaaacagaaaagatatttgacatgcaaaaaaaaaaaaa

SEQ ID NO: 2522 - DNA, 5285 bp, Homo Sapiens
  NM_004972
ctgcaggaaggagagaggaagaggagcagaagggggcagcagcggacgccgctaacggcctccctcggcgctgacaggctgggccggcgcccggctcgcttgggtgttcgcgtcgccacttcggcttctcggccggtcgggcccctcggcccgggcttgcggcgcgcgtcggggctgagggctgctgcggcgcagggagaggcctggtcctcgctgccgagggatgtgagtgggagctgagcccacactggagggcccccgagggcccagcctggaggtcgttcagagccgtgcccgtcccggggcttcgcagaccttgacccgccgggtaggagccgcccctgcgggctcgagggcgcgctctggtcgcccgatctgtgtagccggtttcagaagcaggcaacaggaacaagatgtgaactgtttctcttctgcagaaaaagaggctcttcctcctcctcccgcgacggcaaatgttctgaaaaagactctgcatgggaatggcctgccttacgatgacagaaatggagggaacatccacctcttctatatatcagaatggtgatatttctggaaatgccaattctatgaagcaaatagatccagttcttcaggtgtatctttaccattcccttgggaaatctgaggcagattatctgacctttccatctggggagtatgttgcagaagaaatctgtattgctgcttctaaagcttgtggtatcacacctgtgtatcataatatgtttgctttaatgagtgaaacagaaaggatctggtatccacccaaccatgtcttccatatagatgagtcaaccaggcataatgtactctacagaataagattttactttcctcgttggtattgcagtggcagcaacagagcctatcggcatggaatatctcgaggtgctgaagctcctcttcttgatgactttgtcatgtcttacctctttgctcagtggcggcatgattttgtgcacggatggataaaagtacctgtgactcatgaaacacaggaagaatgtcttgggatggcagtgttagatatgatgagaatagccaaagaaaacgatcaaaccccactggccatctataactctatcagctacaagacattcttaccaaaatgtattcgagcaaagatccaagactatcatattttgacaaggaagcgaataaggtacagatttcgcagatttattcagcaattcagccaatgcaaagccactgccagaaacttgaaacttaagtatcttataaatctggaaactctgcagtctgccttctacacagagaaatttgaagtaaaagaacctggaagtggtccttcaggtgaggagatttttgcaaccattataataactggaaacggtggaattcagtggtcaagagggaaacataaagaaagtgagacactgacagaacaggatttacagttatattgcgattttcctaatattattgatgtcagtattaagcaagcaaaccaagagggttcaaatgaaagccgagttgtaactatccataagcaagatggtaaaaatctggaaattgaacttagctcattaagggaagctttgtctttcgtgtcattaattgatggatattatagattaactgcagatgcacatcattacctctgtaaagaagtagcacctccagccgtgcttgaaaatatacaaagcaactgtcatggcccaatttcgatggattttgccattagtaaactgaagaaagcaggtaatcagactggactgtatgtacttcgatgcagtcctaaggactttaataaatattttttgacttttgctgtcgagcgagaaaatgtcattgaatataaacactgtttgattacaaaaaatgagaatgaagagtacaacctcagtgggacaaagaagaacttcagcagtcttaaagatcttttgaattgttaccagatggaaactgttcgctcagacaatataattttccagtttactaaatgctgtcccccaaagccaaaagataaatcaaaccttctagtcttcagaacgaatggtgtttctgatgtaccaacctcaccaacattacagaggcctactcatatgaaccaaatggtgtttcacaaaatcagaaatgaagatttgatatttaatgaaagccttggccaaggcacttttacaaagatttttaaaggcgtacgaagagaagtaggagactacggtcaactgcatgaaacagaagttcttttaaaagttctggataaagcacacagaaactattcagagtctttctttgaagcagcaagtatgatgagcaagctttctcacaagcatttggttttaaattatggagtatgtgtctgtggagacgagaatattctggttcaggagtttgtaaaatttggatcactagatacatatctgaaaaagaataaaaattgtataaatatattatggaaacttgaagttgctaaacagttggcatgggccatgcattttctagaagaaaacacccttattcatgggaatgtatgtgccaaaaatattctgcttatcagagaagaagacaggaagacaggaaatcctcctttcatcaaacttagtgatcctggcattagtattacagttttgccaaaggacattcttcaggagagaataccatgggtaccacctgaatgcattgaaaatcctaaaaatttaaatttggcaacagacaaatggagttttggtaccactttgtgggaaatctgcagtggaggagataaacctctaagtgctctggattctcaaagaaagctacaattttatgaagataggcatcagcttcctgcaccaaagtgggcagaattagcaaaccttataaataattgtatggattatgaaccagatttcaggccttctttcagagccatcatacgagatcttaacagtttgtttactccagattatgaactattaacagaaaatgacatgttaccaaatatgaggataggtgccctggggttttctggtgcctttgaagaccgggatcctacacagtttgaagagagacatttgaaatttctacagcaacttggcaagggtaattttgggagtgtggagatgtgccggtatgaccctctacaggacaacactggggaggtggtcgctgtaaaaaagcttcagcatagtactgaagagcacctaagagactttgaaagggaaattgaaatcctgaaatccctacagcatgacaacattgtaaagtacaagggagtgtgctacagtgctggtcggcgtaatctaaaattaattatggaatatttaccatatggaagtttacgagactatcttcaaaaacataaagaacggatagatcacataaaacttctgcagtacacatctcagatatgcaagggtatggagtatcttggtacaaaaaggtatatccacagggatctggcaacgagaaatatattggtggagaacgagaacagagttaaaattggagattttgggttaaccaaagtcttgccacaagacaaagaatactataaagtaaaagaacctggtgaaagtcccatattctggtatgctccagaatcactgacagagagcaagttttctgtggcctcagatgtttggagctttggagtggttctgtatgaacttttcacatacattgagaagagtaaaagtccaccagcggaatttatgcgtatgattggcaatgacaaacaaggacagatgatcgtgttccatttgatagaacttttgaagaataatggaagattaccaagaccagatggatgcccagatgagatctatatgatcatgacagaatgctggaacaataatgtaaatcaacgcccctcctttagggatctagctcttcgagtggatcaaataagggataacatggctggatgaaagaaatgaccttcattctgagaccaaagtagatttacagaacaaagttttatatttcacattgctgtggactattattacatatatcattattatataaatcatgatgctagccagcaaagatgtgaaaatatctgctcaaaactttcaaagtttagtaagtttttcttcatgaggccaccagtaaaagacattaatgagaattccttagcaaggattttgtaagaagtttcttaaacattgtcagttaacatcactcttgtctggcaaaagaaaaaaaatagactttttcaactcagctttttgagacctgaaaaaattattatgtaaattttgcaatgttaaagatgcacagaatatgtatgtatagtttttaccacagtggatgtataataccttggcatcttgtgtgatgttttacacacatgagggctggtgttcattaatactgttttctaatttttccatagttaatctataattaattacttcactatacaaacaaattaagatgttcagataattgaataagtacctttgtgtccttgttcatttatatcgctggccagcattataagcaggtgtatacttttagcttgtagttccatgtactgtaaatatttttcacataaagggaacaaatgtctagttttatttgtataggaaatttccctgaccctaaataatacattttgaaatgaaacaagcttacaaagatataatctattttattatggtttcccttgtatctatttgtggtgaatgtgttttttaaatggaactatctccaaatttttctaagactactatgaacagttttcttttaaaattttgagattaagaatgccaggaatattgtcatcctttgagctgctgactgccaataacattcttcgatctctgggatttatgctcatgaactaaatttaagcttaagccataaaatagattagattgttttttaaaaatggatagctcattaagaagtgcagcaggttaagaattttttcctaaagactgtatatttgaggggtttcagaattttgcattgcagtcatagaagagatttatttcctttttagaggggaaatgaggtaaataagtaaaaaagtatgcttgttaattttattcaagaatgccagtagaaaattcataacgtgtatctttaagaaaaatgagcatacatcttaaatcttttcaattaagtataaggggttgttcgttgttgtcatttgttatagtgctactccactttagacaccatagctaaaataaaatatggtgggttttgtgtgtgtgtgtgtgtgtgtgtgtgtgtgtgtgtgtgtgttatttatacaaaacttaaaatacttgctgttttgattaaaaagaaaatagtttcttacttta

SEQ ID NO: 2523 - DNA, 5756 bp, Homo Sapiens
  NM_004973
gttttactaaagtgaatttttttttgtttgcttcgttcgtctttggctctttttttttccttcccaatttcggatttatttcaaggcgaatctggctttgggggaagaggaagaaaagtcggattacaagatcaaccaccaccaacaacaataaaaaccaccaggatatttttttgcaaatttctgacggctttaaattcatgaagcaattgtccccttttgcaatcagcatttggatctcagaatgagcaaggaaagacccaagaggaatatcattcagaagaaatacgatgacagtgatgggattccgtggtcagaagaacgggtggtacgtaaagtcctttatttgtctctgaaggagttcaagaattcccagaagaggcagcatgcggaaggcattgctgggagcctgaaaactgtgaatgggctccttggtaatgaccagtctaagggattaggaccagcatcagaacagtcagagaatgaaaaggacgatgcatcccaagtgtcctccactagcaacgatgttagttcttcagattttgaagaagggccgtcgaggaaaaggcccaggctgcaagcacaaaggaagtttgctcagtctcagccgaatagtcccagcacaactccagtaaagatagtggagccattgctaccccctccagctactcagatatcagacctctctaaaaggaagcctaagacagaagattttcttacctttctctgccttcgaggttctcctgcgctgcccaacagcatggtgtattttggaagctctcaggatgaggaggaagtcgaggaggaagatgatgagacagaagacgtcaaaacagccaccaacaatgcttcatcttcatgccagtcgacccccaggaaaggaaaaacccacaaacatgttcacaacgggcatgttttcaatggttccagcaggtcaacacgggagaaggaacctgttcaaaaacacaaaagcaaagaggccactcccgcaaaggagaagcacagcgatcaccgggctgacagccgccgggagcaggcttcagctaaccaccccgcagcggccccctccacgggttcctcggccaaggggcttgctgccacccatcaccacccccctctgcatcggtcggctcaggacttacggaaacaggtttctaaggtaaacggagtcactcgaatgtcatctctgggtgcaggtgtaaccagtgccaaaaagatgcgcgaggtcagaccttcaccatccaaaactgtgaagtacactgccacggtgacgaagggggctgtcacatacaccaaagccaagagagaactggtcaaggacaccaaacccaatcaccacaagcccagttccgctgtcaaccacacaatctcagggaaaactgaaagtagcaatgcaaaaacccgcaaacaggtgctatccctcgggggggcgtccaagtccactgggcccgccgtcaatggcctcaaggtcagtggcaggttgaacccaaagtcatgcactaaggaggtgggggggcggcagctgcgggagggcctgcagctgcgggaggggctgcggaactccaagaggagactggaagaggcacaccaggcggagaagccgcagtcgccccccaagaagatgaaaggggcggctggccccgccgaaggccctggcaagaaggccccggccgagagaggtctgctgaacggacacgtgaagaaggaagtgccggagcgcagtctggagaggaatcggccgaagcgggccacggccgggaagagcacgccaggcagacaagcacatggcaaggcggacagcgcctcctgtgaaaatcgttctacctcgcaaccggagtccgtgcacaagccgcaggactcgggcaaggccgagaagggcggcggcaaggccgggtgggcggccatggacgagatccccgtcctcaggccctccgccaaggagttccacgatccgctcatctacatcgagtcggtccgcgctcaggtggagaagttcgggatgtgcagggtgatcccccctccggactggcggcccgagtgcaagctcaacgatgagatgcggtttgtcacgcagattcagcacatccacaagctgggccggcgctggggccccaacgtgcagcggctggcctgcatcaagaagcacctcaaatctcagggcatcaccatggacgagctcccgctcatagggggctgtgagctcgacctggcctgctttttccggctgattaatgagatgggcggcatgcagcaagtgactgacctcaaaaaatggaacaaactagcagacatgctgcgcatccccagaactgcccaggaccggctggccaagctgcaggaggcctactgccagtacctactctcctacgactccctgtccccagaggagcaccggcggctggagaaggaggtgctgatggagaaggagatcctggagaagcgcaaggggccgctggaaggccacacagagaacgaccaccacaagttccaccctctgccccgcttcgagcccaagaatgggctcatccacggcgtggcccccaggaacggcttccgcagcaagctcaaggaggtgggccaggcccagttgaagactggccggcggcgactcttcgctcaggaaaaagaagtggtcaaggaagaggaggaggacaaaggcgtcctcaatgacttccacaagtgcatctataagggaaggtctgtttctctaacaactttttatcgaacagcgaggaatatcatgagcatgtgtttcagcaaggagcctgccccagccgaaatcgagcaagagtactggaggctagtggaagagaaggactgccacgtggcagtgcactgcggcaaggtggacaccaacactcacggcagtggattcccagtaggaaaatcagaacccttttcgaggcatggatggaacctcaccgtcctccccaataacacagggtccatcctgcgtcacctcggtgctgtgcctggagtgactattccctggctaaatattggcatggtcttttctacctcatgctggtctcgagaccaaaatcaccttccatacattgactacttacacactggtgctgactgcatttggtattgcattcctgctgaggaggagaacaagctggaagatgtggtccacaccctgctgcaagccaatggcaccccagggctgcagatgctggaaagcaacgtcatgatctccccggaggtgctgtgcaaagaggggatcaaggtgcacaggaccgtgcagcagagtggccagtttgtcgtctgcttcccgggatcctttgtgtccaaagtgtgctgtgggtacagcgtgtctgaaaccgtgcactttgctaccacccagtggacaagtatgggctttgagaccgccaaggaaatgaagcgtcgccatatagctaagccattctccatggagaagttactctaccagattgcacaagcagaagcaaaaaaagaaaacggtcccactctcagtaccatctcagccctcctggatgagctcagggatacagagctgcggcagcgcaggcagctgttcgaggctggcctccactcctccgcacgctatggcagccacgatggcagcagcacggtggcggacgggaagaaaaagcctcgaaagtggctgcagttggagacgtcagagaggaggtgtcagatctgccagcacctgtgctacctgtccatggtggtacaagagaacgaaaacgtcgtgttctgtctggagtgtgctctgcgccacgtggagaaacagaagtcctgccgagggctgaagttgatgtaccgctacgatgaggaacagattatcagtctggtcaatcagatctgcggcaaagtgtctggtaaaaacggcagcattgagaactgtctcagtaaacccacaccaaaaagaggtccccgcaagagagcgacagtggacgtgcccccctcccgtctgtcagcctccagttcatccaaaagtgcttcgagctcatcatgaagatgccaacgcccgtggtcgatttatatatatttttttgtaattattatattctagtttggagtacttgctgtaggattcaagctgtctttgcactagctctaaagaagattttcttctggttttagagaactaattttgttttagcattaaactgttgaacttttttttgtacttagaaaacctagatactgcagtcagattttggaaactgccgtatagtcactgttttaaaaaccccggaggggctgtattaatttgtattgccccatggctgacaaaagcctttttttttggttttgatttttttttttttgtaactgttggggggaaaaaggctttttaacccatttttgaagagggtgaagtttggagaacaaatttaaaaaccatcagtcatgtgagcagattttttagaagggataggagacacacgcgcacacacacacacacacgaaacttgaaatggctttgctttggctgtcgtcttctgccgtgtgccagatgagcttgtgatctgggaagccggggcacccccgttttgtttctctgggcggttgtggcagctgaaggcggacgttgtttcctaaccataggtggaacgaggagacgggagcgagtgggctctccaccagcacatcactatgcatctgttccaggaaagaagaaaagcgagcgaggaagacggaaaagactgcctgccttggaggggtcacatgagggagacctgtgcctgatttcattaggaaatccattctgttattttttggtgctgttggctactttatcaaaaaacccttcaatagcatccttaagatttaaaaaaaaaaaaaaaaaaaaggaaaaaaaagtgatggaagccgtaagtgcttctttgtcatcgacgtgcaatctttctaacattccatctccatctcaccgcttcttgtttgacaccttcacaagtcagcattaatctttcttttaaaacttgtttcatttatgatcatgtagagagccactaggaggcctgcagttatttttgaatgtgaaaatgcatttgcgttcatcttgtctattttttctcttcatgttgtaacaaaaaggaaaaaagaaaaaaaaatcccatcccttttgtacatatgcctgtaaattgttttaaatacttgagcctttttctcggtggggggtggggaggggggtgagaagacaagatgaagaaaagccttacatttcagtttcttcatcggttggattggatgcttacagggtttttcttgtaacatttataagtgctgcttacatcactgaacaacaacaaaaaaataataatggagtagctgttgcccttctccggttgtgtgtacagtatgtgtggaataaaaaagggaaactgttttcacaagctgttctttgtttcataattggattcatcaatcccgtagctacccatattgcactgagcttgccagtggtgactgccaggaacgtcctatgatccactttgttggttgttgttgcagaagactgaactgttttggaatatttaacaattacagaaacagtcaagtgttttccaatgtggttgtccggtttctatggccttgctgtgtactttccctctttttgacagtaaacttctgcctatggcttacagtttgacatttaatttattagcgctgctctgcacccctcccttgggagggagacttcatgtggtttattgcgagttttttgtttacttttcaggtttgtactacaaggtttaataataaaaacaaagttttttgga

SEQ ID NO: 2524 - DNA, 4359 bp, Homo Sapiens
  NM_004987
tagttcaagacaacagagacaaagctaagatgaggaagttctgtacagtttaggaaatagaggctttcaaagataattcgcagtgatgtgaaactggcctcccaagccctgataacaacatggccaacgccctggccagcgccacttgcgagcgctgcaagggcggctttgcgcccgctgagaagatcgtgaacagtaatggggagctgtaccatgagcagtgtttcgtgtgcgctcagtgcttccagcagttcccagaaggactcttctatgagtttgaaggaagaaagtactgtgaacatgactttcagatgctctttgccccttgctgtcatcagtgtggtgaattcatcattggccgagttatcaaagccatgaataacagctggcatccggagtgcttccgctgtgacctctgccaggaagttctggcagatatcgggtttgtcaagaatgctgggagacacctgtgtcgcccctgtcataatcgtgagaaagccagaggccttgggaaatacatctgccagaaatgccatgctatcatcgatgagcagcctctgatattcaagaacgacccctaccatccagaccatttcaactgcgccaactgcgggaaggagctgactgccgatgcacgggagctgaaaggggagctatactgcctcccatgccatgataaaatgggggtccccatctgtggtgcttgccgacggcccatcgaagggcgcgtggtgaacgctatgggcaagcagtggcatgtggagcattttgtttgtgccaagtgtgagaaaccctttcttggacatcgccattatgagaggaaaggcctggcatattgtgaaactcactataaccagctatttggtgatgtttgcttccactgcaatcgtgttatagaaggtgatgtggtctctgctcttaataaggcctggtgcgtgaactgctttgcctgttctacctgcaacactaaattaacactcaagaataagtttgtggagtttgacatgaagccagtctgtaagaagtgctatgagaaatttccattggagctgaagaaaagacttaagaaactagctgagaccttaggaaggaaataagttcctttattttttcttttctatgcaagataagagattaccaacattacttgtcttgatctacccatatttaaagctatatctcaaagcagttgagagaagaggacctatatgaatggttttatgtcatttttttaattaaaaaagaaaaattcatataatcgtgtttaaaacacaaatgaagtcagtatttgcctttgttaacccttatccatttgttgacatgtagactgtttacaaaaaaaaaacacatggttaaatgttaaattttaattaaggcccccaaaaattaaatataactttttaaaatgaaaggagtcaccttttacatgactcaggtgaaaaaacagtataaacattaatttactttgtgttcaaaagaaaattccaactgctgttggggaaggacacagaaaagaaaaataaccacccaagaaaaacaaaaacaagaaaaacaaatcttatacaatcttagtatatttatcaaactagtagctagaaagtgaatatgcacattactaagacaaaaaacaagtgtaattcagaactacttgattttttttagttaaatgcaataattattatgcttagttttataacctgctctccttgtgaattcttccttcaaatgattacttaacgcagtagtaatagctagctgtaggatgtcctttaaatttttgtgcaaaaaaaaatttataccaggtatttggaaatatactttacaatattggaaaatgaagtatttttaatgtattacagcaattatgtttctaagcttaatgttaagcatgtagtcttagaataggacatgaaattaaattgtatgtagcttggaatatattgcttcagaaaactgaatgtgtatgtcggtcatattgcctttataaccatgctaatatctatgctttatacatactcaaacttgccttgccttaaaaacatacatactacatacttaaatcaggaattctagccatctcacagaataccaactaaaactaagtgcattgagatctgagattggtaaacccagattcatttaccacagctgtaattaagtttttagaaactattctctttttggggaaatccattgaagttaatttctgttatcttattagaagaaaatgatgttgatatgtgtttcagattttccatttgaaatcttataattaatttgatttatttactgtaagtaggaggtataaatgacactcttaaattggaaggaggggtgttttagtgtctgttttaggtcaaaattagtgattctatttttatcaaaagttttatcctgaagtttcaggaccactcttccttaataaacttgttaatggaaagcgagctttatgaacatttaaaaatgttgctgctgctttgttgcttaaaaagaaagttgccaagagagacttcttagggaaaatatttgggttttttttccaaaaattgctgaaatattgttttgccatttttaaaaagtctcaggttattaccactctgccattaaatatttgtatgcctgcatttttaaaaattctgtgcatgtactttatggagtacattctatttttgttttcagataccctacaaccaattttttttagtaatcttttagaattgaaattatcataaatgatcgagaataatcatcacatagtttaagattgtatatgttgagtagtttaaaacaatctttgcattttacagtaagaatcaaagtcccttcagtgtgcctttgtcagctaatatgtgaccagcaatgacaaccttgggagtatttattaaatattatgctatgaatataggcaacacagaacagggtttgcagtatagcgtcttgatgctaaattctcatatacctctacacgagaaatatggaggagaaaaacaagcatttacatatattcttcgtcactttgaagatgcatggcctgaactcgactgcttgtgtttgtttacatatcaggcatacccaggcatctcctgcagccagaggttccattgctgtctttgctcagtcctcttttaaaatatgaattagtggacaggcacggtgcctcacacctgtaatcccagcactttgggaggtcgaggcaggtggatcacgaggtcaggagatcaagaccatcctggctaccactgaaaccccatctctactacaaaaaaattagccgggcgtggtggcgggcacctgcagtcccagctactcgggaggctgaggcaggagaatggtgggaacccgggaggcagagcttgcagtgagccaagatcacgccactgcactccagcctgggcaacagagcaagactctgtctcaaaaaaaataaataaataaattatgaatgagtattttctagaaattcaacttgctaagcctgtaatacttaagggtagtttatctagatacagtactttcttccctgataagtagtatcattggagcccttaggtataggagaagaggaagaagtttaaaaagtgtaagtgggccgggcgtggtggctcatgcctgtaatcccagcactttgggaggccgaggggggcggatcacgaggtcaggagatccagactatcctggctaacaaggtgaaaccccgtctctactaaaaatacaaaaaaaaacattagccaggcgtggtggcgggcgcttgtagtcccagctactcgggaggctgaggtaggagaatggcttgaacccaggaggcggagcttgcagtgagccgagattgcaccactgcactccagcctgggcgacagagcaagactccgtctcaaaaaaaaaaaaaaagtgtaagtggattaaaagagaaacttggtctagttcataatatttttaatagggctttccctggctgctggaaaacttaggccagtaagcatctctttgtttaaagtcctacaagacaatttgaaataattcattgttcatgccaaaattctaagtactgtttttcttagcaagtgtaacataatcaggaacaatgggtacaagtaaaacattctttggatgatattcaaagccttattagcactgcacctgaataataggtcattttgcctcactcatttgccaaagtagccatttctaagttaaggaagtttttagataggctcatagccttgtatttcgttttagattgtaagctcaatggcagggatactatattggtaattatgttttcatatagcaaccaccacagtatattcttggtgcttaataaatgtttataattgttaacaataaaaaaaaaaaaaaaaa

SEQ ID NO: 2525 - DNA, 10241 bp, Homo Sapiens
  NM_004992
ccggcgtcggcggcgcgcgcgctccctcctctcggagagagggctgtggtaaaagccgtccggaaaatggccgccgccgccgccgccgcgccgagcggaggaggaggaggaggcgaggaggagagactgctccataaaaatacagactcaccagttcctgctttgatgtgacatgtgactccccagaatacaccttgcttctgtagaccagctccaacaggattccatggtagctgggatgttagggctcagggaagaaaagtcagaagaccaggacctccagggcctcaaggacaaacccctcaagtttaaaaaggtgaagaaagataagaaagaagagaaagagggcaagcatgagcccgtgcagccatcagcccaccactctgctgagcccgcagaggcaggcaaagcagagacatcagaagggtcaggctccgccccggctgtgccggaagcttctgcctcccccaaacagcggcgctccatcatccgtgaccggggacccatgtatgatgaccccaccctgcctgaaggctggacacggaagcttaagcaaaggaaatctggccgctctgctgggaagtatgatgtgtatttgatcaatccccagggaaaagcctttcgctctaaagtggagttgattgcgtacttcgaaaaggtaggcgacacatccctggaccctaatgattttgacttcacggtaactgggagagggagcccctcccggcgagagcagaaaccacctaagaagcccaaatctcccaaagctccaggaactggcagaggccggggacgccccaaagggagcggcaccacgagacccaaggcggccacgtcagagggtgtgcaggtgaaaagggtcctggagaaaagtcctgggaagctccttgtcaagatgccttttcaaacttcgccagggggcaaggctgaggggggtggggccaccacatccacccaggtcatggtgatcaaacgccccggcaggaagcgaaaagctgaggccgaccctcaggccattcccaagaaacggggccgaaagccggggagtgtggtggcagccgctgccgccgaggccaaaaagaaagccgtgaaggagtcttctatccgatctgtgcaggagaccgtactccccatcaagaagcgcaagacccgggagacggtcagcatcgaggtcaaggaagtggtgaagcccctgctggtgtccaccctcggtgagaagagcgggaaaggactgaagacctgtaagagccctgggcggaaaagcaaggagagcagccccaaggggcgcagcagcagcgcctcctcaccccccaagaaggagcaccaccaccatcaccaccactcagagtccccaaaggcccccgtgccactgctcccacccctgcccccacctccacctgagcccgagagctccgaggaccccaccagcccccctgagccccaggacttgagcagcagcgtctgcaaagaggagaagatgcccagaggaggctcactggagagcgacggctgccccaaggagccagctaagactcagcccgcggttgccaccgccgccacggccgcagaaaagtacaaacaccgaggggagggagagcgcaaagacattgtttcatcctccatgccaaggccaaacagagaggagcctgtggacagccggacgcccgtgaccgagagagttagctgactttacacggagcggattgcaaagcaaaccaacaagaataaaggcagctgttgtctcttctccttatgggtagggctctgacaaagcttcccgattaactgaaataaaaaatatttttttttctttcagtaaacttagagtttcgtggcttcagggtgggagtagttggagcattggggatgtttttcttaccgacaagcacagtcaggttgaagacctaaccagggccagaagtagctttgcacttttctaaactaggctccttcaacaaggcttgctgcagatactactgaccagacaagctgttgaccaggcacctcccctcccgcccaaacctttcccccatgtggtcgttagagacagagcgacagagcagttgagaggacactcccgttttcggtgccatcagtgccccgtctacagctcccccagctccccccacctcccccactcccaaccacgttgggacagggaggtgtgaggcaggagagacagttggattctttagagaagatggatatgaccagtggctatggcctgtgcgatcccacccgtggtggctcaagtctggccccacaccagccccaatccaaaactggcaaggacgcttcacaggacaggaaagtggcacctgtctgctccagctctggcatggctaggaggggggagtcccttgaactactgggtgtagactggcctgaaccacaggagaggatggcccagggtgaggtggcatggtccattctcaagggacgtcctccaacgggtggcgctagaggccatggaggcagtaggacaaggtgcaggcaggctggcctggggtcaggccgggcagagcacagcggggtgagagggattcctaatcactcagagcagtctgtgacttagtggacaggggagggggcaaagggggaggagaagaaaatgttcttccagttactttccaattctcctttagggacagcttagaattatttgcactattgagtcttcatgttcccacttcaaaacaaacagatgctctgagagcaaactggcttgaattggtgacatttagtccctcaagccaccagatgtgacagtgttgagaactacctggatttgtatatatacctgcgcttgttttaaagtgggctcagcacatagggttcccacgaagctccgaaactctaagtgtttgctgcaattttataaggacttcctgattggtttctcttctccccttccatttctgccttttgttcatttcatcctttcacttctttcccttcctccgtcctcctccttcctagttcatcccttctcttccaggcagccgcggtgcccaaccacacttgtcggctccagtccccagaactctgcctgccctttgtcctcctgctgccagtaccagccccaccctgttttgagccctgaggaggccttgggctctgctgagtccgacctggcctgtctgtgaagagcaagagagcagcaaggtcttgctctcctaggtagccccctcttccctggtaagaaaaagcaaaaggcatttcccaccctgaacaacgagccttttcacccttctactctagagaagtggactggaggagctgggcccgatttggtagttgaggaaagcacagaggcctcctgtggcctgccagtcatcgagtggcccaacaggggctccatgccagccgaccttgacctcactcagaagtccagagtctagcgtagtgcagcagggcagtagcggtaccaatgcagaactcccaagacccgagctgggaccagtacctgggtccccagcccttcctctgctcccccttttccctcggagttcttcttgaatggcaatgttttgcttttgctcgatgcagacagggggccagaacaccacacatttcactgtctgtctggtccatagctgtggtgtaggggcttagaggcatgggcttgctgtgggtttttaattgatcagttttcatgtgggatcccatctttttaacctctgttcaggaagtccttatctagctgcatatcttcatcatattggtatatccttttctgtgtttacagagatgtctcttatatctaaatctgtccaactgagaagtaccttatcaaagtagcaaatgagacagcagtcttatgcttccagaaacacccacaggcatgtcccatgtgagctgctgccatgaactgtcaagtgtgtgttgtcttgtgtatttcagttattgtccctggcttccttactatggtgtaatcatgaaggagtgaaacatcatagaaactgtctagcacttccttgccagtctttagtgatcaggaaccatagttgacagttccaatcagtagcttaagaaaaaaccgtgtttgtctcttctggaatggttagaagtgagggagtttgccccgttctgtttgtagagtctcatagttggactttctagcatatatgtgtccatttccttatgctgtaaaagcaagtcctgcaaccaaactcccatcagcccaatccctgatccctgatcccttccacctgctctgctgatgacccccccagcttcacttctgactcttccccaggaagggaaggggggtcagaagagagggtgagtcctccagaactcttcctccaaggacagaaggctcctgcccccatagtggcctcgaactcctggcactaccaaaggacacttatccacgagagcgcagcatccgaccaggttgtcactgagaagatgtttattttggtcagttgggtttttatgtattatacttagtcaaatgtaatgtggcttctggaatcattgtccagagctgcttccccgtcacctgggcgtcatctggtcctggtaagaggagtgcgtggcccaccaggcccccctgtcacccatgacagttcattcagggccgatggggcagtcgtggttgggaacacagcatttcaagcgtcactttatttcattcgggccccacctgcagctccctcaaagaggcagttgcccagcctctttcccttccagtttattccagagctgccagtggggcctgaggctccttagggttttctctctatttccccctttcttcctcattccctcgtctttcccaaaggcatcacgagtcagtcgcctttcagcaggcagccttggcggtttatcgccctggcaggcaggggccctgcagctctcatgctgcccctgccttggggtcaggttgacaggaggttggagggaaagccttaagctgcaggattctcaccagctgtgtccggcccagttttggggtgtgacctcaatttcaattttgtctgtacttgaacattatgaagatgggggcctctttcagtgaatttgtgaacagcagaattgaccgacagctttccagtacccatggggctaggtcattaaggccacatccacagtctcccccacccttgttccagttgttagttactacctcctctcctgacaatactgtatgtcgtcgagctccccccaggtctacccctcccggccctgcctgctggtgggcttgtcatagccagtgggattgccggtcttgacagctcagtgagctggagatacttggtcacagccaggcgctagcacagctcccttctgttgatgctgtattcccatatcaaaagacacaggggacacccagaaacgccacatcccccaatccatcagtgccaaactagccaacggccccagcttctcagctcgctggatggcggaagctgctactcgtgagcgccagtgcgggtgcagacaatcttctgttgggtggcatcattccaggcccgaagcatgaacagtgcacctgggacagggagcagccccaaattgtcacctgcttctctgcccagcttttcattgctgtgacagtgatggcgaaagagggtaataaccagacacaaactgccaagttgggtggagaaaggagtttctttagctgacagaatctctgaattttaaatcacttagtaagcggctcaagcccaggagggagcagagggatacgagcggagtcccctgcgcgggaccatctggaattggtttagcccaagtggagcctgacagccagaactctgtgtcccccgtctaaccacagctccttttccagagcattccagtcaggctctctgggctgactgggccaggggaggttacaggtaccagttctttaagaagatctttgggcatatacatttttagcctgtgtcattgccccaaatggattcctgtttcaagttcacacctgcagattctaggacctgtgtcctagacttcagggagtcagctgtttctagagttcctaccatggagtgggtctggaggacctgcccggtgggggggcagagccctgctccctccgggtcttcctactcttctctctgctctgacgggatttgttgattctctccattttggtgtctttctcttttagatattgtatcaatctttagaaaaggcatagtctacttgttataaatcgttaggatactgcctcccccagggtctaaaattacatattagaggggaaaagctgaacactgaagtcagttctcaacaatttagaaggaaaacctagaaaacatttggcagaaaattacatttcgatgtttttgaatgaatacgagcaagcttttacaacagtgctgatctaaaaatacttagcacttggcctgagatgcctggtgagcattacaggcaaggggaatctggaggtagccgacctgaggacatggcttctgaacctgtcttttgggagtggtatggaaggtggagcgttcaccagtgacctggaaggcccagcaccaccctccttcccactcttctcatcttgacagagcctgccccagcgctgacgtgtcaggaaaacacccagggaactaggaaggcacttctgcctgaggggcagcctgccttgcccactcctgctctgctcgcctcggatcagctgagccttctgagctggcctctcactgcctccccaaggccccctgcctgccctgtcaggaggcagaaggaagcaggtgtgagggcagtgcaaggagggagcacaacccccagctcccgctccgggctccgacttgtgcacaggcagagcccagaccctggaggaaatcctacctttgaattcaagaacatttggggaatttggaaatctctttgcccccaaacccccattctgtcctacctttaatcaggtcctgctcagcagtgagagcagatgaggtgaaaaggccaagaggtttggctcctgcccactgatagcccctctccccgcagtgtttgtgtgtcaagtggcaaagctgttcttcctggtgaccctgattatatccagtaacacatagactgtgcgcataggcctgctttgtctcctctatcctgggcttttgttttgctttttagttttgcttttagtttttctgtcccttttatttaacgcaccgactagacacacaaagcagttgaatttttatatatatatctgtatattgcacaattataaactcattttgcttgtggctccacacacacaaaaaaagacctgttaaaattatacctgttgcttaattacaatatttctgataaccatagcataggacaagggaaaataaaaaaagaaaaaaaagaaaaaaaaacgacaaatctgtctgctggtcacttcttctgtccaagcagattcgtggtcttttcctcgcttctttcaagggctttcctgtgccaggtgaaggaggctccaggcagcacccaggttttgcactcttgtttctcccgtgcttgtgaaagaggtcccaaggttctgggtgcaggagcgctcccttgacctgctgaagtccggaacgtagtcggcacagcctggtcgccttccacctctgggagctggagtccactggggtggcctgactcccccagtccccttcccgtgacctggtcagggtgagcccatgtggagtcagcctcgcaggcctccctgccagtagggtccgagtgtgtttcatccttcccactctgtcgagcctgggggctggagcggagacgggaggcctggcctgtctcggaacctgtgagctgcaccaggtagaacgccagggaccccagaatcatgtgcgtcagtccaaggggtcccctccaggagtagtgaagactccagaaatgtccctttcttctcccccatcctacgagtaattgcatttgcttttgtaattcttaatgagcaatatctgctagagagtttagctgtaacagttctttttgatcatctttttttaataattagaaacaccaaaaaaatccagaaacttgttcttccaaagcagagagcattataatcaccagggccaaaagcttccctccctgctgtcattgcttcttctgaggcctgaatccaaaagaaaaacagccataggccctttcagtggccgggctacccgtgagcccttcggaggaccagggctggggcagcctctgggcccacatccggggccagctccggcgtgtgttcagtgttagcagtgggtcatgatgctctttcccacccagcctgggataggggcagaggaggcgaggaggccgttgccgctgatgtttggccgtgaacaggtgggtgtctgcgtgcgtccacgtgcgtgttttctgactgacatgaaatcgacgcccgagttagcctcacccggtgacctctagccctgcccggatggagcggggcccacccggttcagtgtttctggggagctggacagtggagtgcaaaaggcttgcagaacttgaagcctgctccttcccttgctaccacggcctcctttccgtttgatttgtcactgcttcaatcaataacagccgctccagagtcagtagtcaatgaatatatgaccaaatatcaccaggactgttactcaatgtgtgccgagcccttgcccatgctgggctcccgtgtatctggacactgtaacgtgtgctgtgtttgctccccttccccttccttctttgccctttacttgtctttctggggtttttctgtttgggtttggtttggtttttatttctccttttgtgttccaaacatgaggttctctctactggtcctcttaactgtggtgttgaggcttatatttgtgtaatttttggtgggtgaaaggaattttgctaagtaaatctcttctgtgtttgaactgaagtctgtattgtaactatgtttaaagtaattgttccagagacaaatatttctagacactttttctttacaaacaaaagcattcggagggagggggatggtgactgagatgagaggggagagctgaacagatgacccctgcccagatcagccagaagccacccaaagcagtggagcccaggagtcccactccaagccagcaagccgaatagctgatgtgttgccactttccaagtcactgcaaaaccaggttttgttccgcccagtggattcttgttttgcttcccctccccccgagattattaccaccatcccgtgcttttaaggaaaggcaagattgatgtttccttgaggggagccaggaggggatgtgtgtgtgcagagctgaagagctggggagaatggggctgggcccacccaagcaggaggctgggacgctctgctgtgggcacaggtcaggctaatgttggcagatgcagctcttcctggacaggccaggtggtgggcattctctctccaaggtgtgccccgtgggcattactgtttaagacacttccgtcacatcccaccccatcctccagggctcaacactgtgacatctctattccccaccctccccttcccagggcaataaaatgaccatggagggggcttgcactctcttggctgtcacccgatcgccagcaaaacttagatgtgagaaaaccccttcccattccatggcgaaaacatctccttagaaaagccattaccctcattaggcatggttttgggctcccaaaacacctgacagcccctccctcctctgagaggcggagagtgctgactgtagtgaccattgcatgccgggtgcagcatctggaagagctaggcagggtgtctgccccctcctgagttgaagtcatgctcccctgtgccagcccagaggccgagagctatggacagcattgccagtaacacaggccaccctgtgcagaagggagctggctccagcctggaaacctgtctgaggttgggagaggtgcacttggggcacagggagaggccgggacacacttagctggagatgtctctaaaagccctgtatcgtattcaccttcagtttttgtgttttgggacaattactttagaaaataagtaggtcgttttaaaaacaaaaattattgattgcttttttgtagtgttcagaaaaaaggttctttgtgtatagccaaatgactgaaagcactgatatatttaaaaacaaaaggcaatttattaaggaaatttgtaccatttcagtaaacctgtctgaatgtacctgtatacgtttcaaaaacaccccccccccactgaatccctgtaacctatttattatataaagagtttgccttataaattt

SEQ ID NO: 2526 - DNA, 2387 bp, Homo Sapiens
  NM_004994
agacacctctgccctcaccatgagcctctggcagcccctggtcctggtgctcctggtgctgggctgctgctttgctgcccccagacagcgccagtccacccttgtgctcttccctggagacctgagaaccaatctcaccgacaggcagctggcagaggaatacctgtaccgctatggttacactcgggtggcagagatgcgtggagagtcgaaatctctggggcctgcgctgctgcttctccagaagcaactgtccctgcccgagaccggtgagctggatagcgccacgctgaaggccatgcgaaccccacggtgcggggtcccagacctgggcagattccaaacctttgagggcgacctcaagtggcaccaccacaacatcacctattggatccaaaactactcggaagacttgccgcgggcggtgattgacgacgcctttgcccgcgccttcgcactgtggagcgcggtgacgccgctcaccttcactcgcgtgtacagccgggacgcagacatcgtcatccagtttggtgtcgcggagcacggagacgggtatcccttcgacgggaaggacgggctcctggcacacgcctttcctcctggccccggcattcagggagacgcccatttcgacgatgacgagttgtggtccctgggcaagggcgtcgtggttccaactcggtttggaaacgcagatggcgcggcctgccacttccccttcatcttcgagggccgctcctactctgcctgcaccaccgacggtcgctccgacggcttgccctggtgcagtaccacggccaactacgacaccgacgaccggtttggcttctgccccagcgagagactctacacccaggacggcaatgctgatgggaaaccctgccagtttccattcatcttccaaggccaatcctactccgcctgcaccacggacggtcgctccgacggctaccgctggtgcgccaccaccgccaactacgaccgggacaagctcttcggcttctgcccgacccgagctgactcgacggtgatggggggcaactcggcgggggagctgtgcgtcttccccttcactttcctgggtaaggagtactcgacctgtaccagcgagggccgcggagatgggcgcctctggtgcgctaccacctcgaactttgacagcgacaagaagtggggcttctgcccggaccaaggatacagtttgttcctcgtggcggcgcatgagttcggccacgcgctgggcttagatcattcctcagtgccggaggcgctcatgtaccctatgtaccgcttcactgaggggccccccttgcataaggacgacgtgaatggcatccggcacctctatggtcctcgccctgaacctgagccacggcctccaaccaccaccacaccgcagcccacggctcccccgacggtctgccccaccggaccccccactgtccacccctcagagcgccccacagctggccccacaggtcccccctcagctggccccacaggtccccccactgctggcccttctacggccactactgtgcctttgagtccggtggacgatgcctgcaacgtgaacatcttcgacgccatcgcggagattgggaaccagctgtatttgttcaaggatgggaagtactggcgattctctgagggcagggggagccggccgcagggccccttccttatcgccgacaagtggcccgcgctgccccgcaagctggactcggtctttgaggagcggctctccaagaagcttttcttcttctctgggcgccaggtgtgggtgtacacaggcgcgtcggtgctgggcccgaggcgtctggacaagctgggcctgggagccgacgtggcccaggtgaccggggccctccggagtggcagggggaagatgctgctgttcagcgggcggcgcctctggaggttcgacgtgaaggcgcagatggtggatccccggagcgccagcgaggtggaccggatgttccccggggtgcctttggacacgcacgacgtcttccagtaccgagagaaagcctatttctgccaggaccgcttctactggcgcgtgagttcccggagtgagttgaaccaggtggaccaagtgggctacgtgacctatgacatcctgcagtgccctgaggactagggctcccgtcctgctttggcagtgccatgtaaatccccactgggaccaaccctggggaaggagccagtttgccggatacaaactggtattctgttctggaggaaagggaggagtggaggtgggctgggccctctcttctcacctttgttttttgttggagtgtttctaataaacttggattctctaacctttaaaaaaaaaaaaaaaaaaaaaaaaaaaaaaaaaaaaaaaaaaaaaaaaaaaa

SEQ ID NO: 2527 - DNA, 1806 bp, Homo Sapiens
  NM_004997
caggccccccaacggctgacccctgcacactccaccctggccccccagccagtccagcaatgatggaaaaaaacacctccgagggccctgcctgcagtccagaggagaccgcatctgaatctgccaaggtgcccacagcagagcctcccggagaagtggcagtatcagagtccaccagagaagagcaggtgcccaagccgcaggcccctgccccacaggcccctacagcctccacagccactaagcctgcacccccaagtgaagatgtccccagtgccccactgctgctgaccctggatgatgtgagcagcagctctgtgactgtgagctgggagcccccagagaggctggggaggctgggcctccagggctatgtgctggagctctgcagagagggagcctcggagtgggtgcctgtgagtgcccggcccatgatggtgacccagcagactgtgcggaacctggctctgggagacaagttcctcctgcgcgtgtctgcagtgagttctgcaggggctggcccgccggccatgctggaccagcccatccacatccgagagaacattgaggcccccaagatccgtgtcccccgccacctccgtcagacctacatccgccaggtgggagagacggtcaacctgcaaatccccttccaggggaagcctaagcctcaggccacatggacccacaacggccatgccctggacagccagcgggtgagcatgcgcaccggggaccaggactccatcctcttcattcgctcggcccagcgctccgactctggccgctacgagctcactgtgcgcgtggaagacctggaggccaaggcagtcattgacatcctggtgattgagaaacctggaccccccagcagcatcaggctcctggacgtctggggctgcaatgctgctcttcagtggacgccaccccaggacacaggcaacacagagctcctgggctacatggtgcagaaggcagacaaaaagacagggcaatggttcacagtgctggagcgctaccacccaaccacctgcaccatctctgacctcatcatcggcaactcgtactccttccgggtcttctcagaaaacctgtgtggactcagcacctcggccaccgtcaccaaggagctcgcccacatccagaaggcagatattgctgccaaacctaaagggtttattgagcgagacttctcagaagccccctcattcacccagcccctggctgaccacacctccacccctggctacagcacccagttgttctgcagtgtccgagcttcacccaagcccaagatcatctggatgaaaaacaagatggagatccagggcaaccccaaataccgcgccctctctgagcaaggcgtctgcaccctagagatccggaaacccagcccctttgattctggggtctacacctgcaaggccataaatgtgctgggggaggcatctgtggactgccggctggaggtcaaagcctcagccgcacactgaagtcacgggaggaggctgtgatgaggagccaggtgctgcaggcctgaggggccaggtccaccaggcctacagtcaaactccagagatgcccaagacccccgcttccatagcgacggctgatggaaccgcccctggtacctgctggcctcccttccccagaggctggtgtccagaactcaggaatgggcctggtaggccccaggccagactaactgggctcaaggggtgctggaaggcgcagagattggagtgccctgcggagttgcactctgggtgggaagcactcaaataaagatgcgtggtgttaacagtg

SEQ ID NO: 2528 - DNA, 1601 bp, Homo Sapiens
  NM_005008
ggagttacgtagaagacagggcgtcctggtgtacgggctggccctggacgtcacttccgctggcggcagtggcgtcacttcctgctcttgggggcggggcatccgtgtccttgcggtgctgggcagcagaccgtccaaaccgacacgcgtggtatcctcgcggtgtccggcaagagactaccaagacagacgctatgactgaggctgatgtgaatccaaaggcctatccccttgccgatgcccacctcaccaagaagctactggacctcgttcagcagtcatgtaactataagcagcttcggaaaggagccaatgaggccaccaaaaccctcaacaggggcatctctgagttcatcgtgatggctgcagacgccgagccactggagatcattctgcacctgccgctgctgtgtgaagacaagaatgtgccctacgtgtttgtgcgctccaagcaggccctggggagagcctgtggggtctccaggcctgtcatcgcctgttctgtcaccatcaaagaaggctcgcagctgaaacagcagatccaatccattcagcagtccattgaaaggctcttagtctaaacctgtggcctctgccacgtgctccctgccagcttcccccctgaggttgtgtatcatattatctgtgttagcatgtagtattttcagctactctctattgttataaaatgtagtactaaatctggtttctggatttttgtgttgtttttgttctgttttacagggttgctatcccccttcctttcctccctccctctgccatccttcatccttttatcctccctttttggaacaagtgttcagagcagacagaagcagggtggtggcaccgttgaaaggcagaaagagccaggagaaagctgatggagccaggacagagatctggttccagctttcagccactagcttcctgttgtgtgcggggtgtggtggaattaaacagcattcattgtgtgtccctgtgcctggcacacagaatcattcatacgtgttcaagtgatcaaggggtttcatttgctcttgggggattaggtatcatttggggaggaagcatgtgttctgtgaggttgttcggctatgtccaagtgtcgtttactaatgtacccctgctgtttgcttttggtaatgtgatgttgatgttctccccctacccacaaccatgcccttgagggtagcagggcagcagcataccaaagagatgtgctgcaggactccggaggcagcctgggtgggtgagccatggggcagttgacctgggtcttgaaagagtcgggagtgacaagctcagagagcatgaactgatgctggcatgaaggattccaggaagatcatggagacctggctggtagctgtaacagagatggtggagtccaaggaaacagcctgtctctggtgaatgggactttctttggtggacacttggcaccagctctgagagcccttcccctgtgtcctgccaccatgtgggtcagatgtactctctgtcacatgaggagagtgctagttcatgtgttctccattcttgtgagcatcctaataaatctgttccattttgatgacaaaaaaaaaaaaaaaaaaaaa

SEQ ID NO: 2529 - DNA, 1612 bp, Homo Sapiens
  NM_005013
agagcggagcggtgggccgggggctggaggacaggtttgtgcgctggacgcaagcaccaggcgcagcctcgctcgccgagacccggccagaacgtgttacgagtcagtttttagtgaaaaaacattgagctaggagccaagacccatctcttcactattttggtattgtgcaagtcatcttacctctctggatctcagttgtctcatctgtaaaaaggagataaaaattatttacctgcctgaacatgaggtggaggaccatcctgctacagtattgctttctcttgattacatgtttacttactgctcttgaagctgtgcctattgacatagacaagacaaaagtacaaaatattcaccctgtggaaagtgcgaagatagaaccaccagatactggactttattatgatgaatatctcaagcaagtgattgatgtgctggaaacagataaacacttcagagaaaagctccagaaagcagacatagaggaaataaagagtgggaggctaagcaaagaactggatttagtaagtcaccatgtgaggacaaaacttgatgaactgaaaaggcaagaagtaggaaggttaagaatgttaattaaagctaagttggattcccttcaagatataggcatggaccaccaagctcttctaaaacaatttgatcacctaaaccacctgaatcctgacaagtttgaatccacagatttagatatgctaatcaaagcggcaacaagtgatctggaacactatgacaagactcgtcatgaagaatttaaaaaatatgaaatgatgaaggaacatgaaaggagagaatatttaaaaacattgaatgaagaaaagagaaaagaagaagagtctaaatttgaagaaatgaagaaaaagcatgaaaatcaccctaaagttaatcacccaggaagcaaagatcaactaaaagaggtatgggaagagactgatggattggatcctaatgactttgaccccaagacatttttcaaattacatgatgtcaatagtgatggattcctggatgaacaagaattagaagccctatttactaaagagttggagaaagtatatgaccctaaaaatgaagaggatgatatggtagaaatggaagaagaaaggcttagaatgagggaacatgtaatgaatgaggttgatactaacaaagacagattggtgactctggaggagtttttgaaagccacagaaaaaaaagaattcttggagccagatagctgggagacattagatcagcaacagttcttcacagaggaagaactaaaagaatatgaaaatattattgctttacaagaaaatgaacttaagaagaaggcagatgagcttcagaaacaaaaagaagagctacaacgtcagcatgatcaactggaggctcagaagctggaatatcatcaggtcatacagcagatggaacaaaaaaaattacaacaaggaattcctccatcagggccagctggagaattgaagtttgagccacacatttaaagtctgaagtccaccagaacttggaagaaagctgttaactcaacatctatttcatctttttagctcccttcctttttctctgctcaataaatattttaaaagca

SEQ ID NO: 2530 - DNA, 1737 bp, Homo Sapiens
  NM_005015
atggtaacgtggctttacagatttttacccacttcaaatatggccgccaagctccgttctcttttaccgcctgatctgcggctacaattctggcttcatgcccgcctccaaaagtgcttcctctcgaggggttgtggttcttactgcgcaggcgcaaaagcaagtcctcttccgggcaaaatggcgatgggactaatgtgcggacgccgggagcttctgcgcttgctacagtccgggcgtcgggtccacagcgtcgcagggccctcgcaatggcttgggaaaccgctgaccacacggctcctattcccagcagccccgtgctgctgtcgcccacactacctcttccttgcggcttccggcccccgcagcctcagtacctctgctatctcttttgcagaagtccaggttcaggcccctcctgttgttgctgcaactccctcacccacagcagtacctgaggtggcttctggagagactgcagatgtagtccaaactgctgcagagcagagcttcgctgaactggggctggggtcatacaccccagtgggactgatccagaatttactggaatttatgcatgttgatctgggcctaccttggtggggggccattgctgcatgtacagtctttgcccgctgcctgatttttcctctcatcgtgacgggccagcgagaggcagccaggatccacaatcacttgccagagatccagaagttttccagtcgaatcagagaggccaagttagcaggagaccatattgagtattacaaggcttcctcggagatggcactttaccagaaaaaacatggtattaaactctataaacctctcattctccctgtgactcaggccccaatcttcatctccttcttcattgctttgagagagatggccaaccttcctgtgcccagcctgcagacaggtggcctctggtggttccaggatctcacggtatccgatcccatctacatattaccactggcagtcactgctacaatgtgggctgttcttgagctaggtgctgagacaggtgtgcaaagttctgaccttcagtggatgagaaatgtcatcagaatgatgcccctgataaccttgcccataaccatgcatttccccacggcagtgtttatgtactggctctcctccaatttgttttccctggtccaagtatcctgtctccggattccagcagtacgcactgtacttaaaatcccccagcgtgttgtacatgacctggacaaattacctccacgggaaggcttcctagagagcttcaaaaaaggctggaaaaatgctgaaatgacgcgtcagctgcgagagcgtgaacaacgcatgcggaatcagttggagctagcagccaggggtcctttacgacagacctttacccacaaccctctcctacaacctggaaaggataaccctcccaatatccctagcagcagcagcaaaccaaagtcaaagtatccctggcacgacacacttggctgacttatgttctgtgcgcattctggcaggaattctgtctcttcagagactcatcctcaaaacaagacttgacactgtgtccttgccccagtcctaggaactgtggcacacagagatgttcattttaaaaacggatttcatgaaacactcttgtacttatgtttataagagagcactgggtagccaagtgatcttcccattcacagagttagtaaacctctgtactacatgctgaaaaaaaaaaaaaaaaaa

SEQ ID NO: 2531 - DNA, 1677 bp, Homo Sapiens
  NM_005017
cccgggcgtctccccgcaacctcctcaacttccctagtcagtgacgcggcgccggccagaaatccgaccggaccgggctcgggggagcgtgagttgcagcatgtgccgaagcgccacctcagaagataaaaagaaatgagtctcatatttggcattcttttagttaaaagaagatggatgcacagtgttcagccaaggtcaatgcaaggaagaggagaaaagaggcgcccggacccaacggggcaacagaagaagatggggttccttccaaagtgcagcgctgtgcagtgggcttacggcaaccagctcctttttctgatgaaattgaagttgactttagtaagccctatgtcagggtaactatggaagaagccagcagaggaactccttgtgagcgacctgtgagagtttatgccgatggaatatttgacttatttcactctggtcacgcccgagctctgatgcaagcgaagaaccttttccctaatacgtacctcattgtgggagtttgcagtgatgagctcacacacaacttcaaaggcttcacggtgatgaacgagaatgagcgctatgacgcagtccagcactgccgctacgtggatgaggtggtgaggaatgcgccctggacgctgacacccgagttcctggccgaacaccggattgattttgtagcccatgatgatattccttattcatctgctggcagtgatgatgtttataagcacatcaaggaggcaggcatgtttgctccaacacagaggacagaaggtatctccacatcagacatcatcacccgaattgtgcgggattatgatgtgtatgcgaggcggaacctgcagaggggctacacagcaaaggagctcaatgtcagctttatcaacgagaagaaataccacttgcaggagagggttgacaaagtaaagaagaaagtgaaagatgtggaggaaaagtcaaaagaatttgttcagaaggtggaggaaaaaagcattgacctcattcagaagtgggaggagaagtcccgagaattcattggaagttttctggaaatgtttggtccggaaggagcactgaaacatatgctgaaagaggggaagggccggatgctgcaggccatcagcccgaagcagagccccagcagcagccctactcgcgagcgctccccctccccctctttccgatggcccttctccggcaagacttccccaccttgctccccagcaaatctctccaggcacaaggctgcagcctatgatatcagtgaggatgaagaagactaatgtttcctccctcctttcctgtcctccctttctgtcccattaccttcagaagctctctgttgaattccaaattgtgaccccaacactaaacctaaggacagctacaaaggaaagacaactggggaaagaagacctaggactgggggaacccaaacagcctgtcctgcaagtgacatcactcacccacacgaaggagggggactgcaccttagaagcctgctctgcatccatttacccccccccaagggctttgtttcactgtttatgttcacgtgatctcaacagggaaattgtcattttctttaaaaaaaaaaaaaaaaaaaaaaaaaaaaaaaaaaaaaaaaaaaaaaaaaaaaaaaaaaaaaaaaaaaaaaaaaaaaaaaaaaaaaaaaaaaaaaaa

SEQ ID NO: 2532 - DNA, 2115 bp, Homo Sapiens
  NM_005018
agtttcccttccgctcacctccgcctgagcagtggagaaggcggcactctggtggggctgctccaggcatgcagatcccacaggcgccctggccagtcgtctgggcggtgctacaactgggctggcggccaggatggttcttagactccccagacaggccctggaacccccccaccttctccccagccctgctcgtggtgaccgaaggggacaacgccaccttcacctgcagcttctccaacacatcggagagcttcgtgctaaactggtaccgcatgagccccagcaaccagacggacaagctggccgccttccccgaggaccgcagccagcccggccaggactgccgcttccgtgtcacacaactgcccaacgggcgtgacttccacatgagcgtggtcagggcccggcgcaatgacagcggcacctacctctgtggggccatctccctggcccccaaggcgcagatcaaagagagcctgcgggcagagctcagggtgacagagagaagggcagaagtgcccacagcccaccccagcccctcacccaggccagccggccagttccaaaccctggtggttggtgtcgtgggcggcctgctgggcagcctggtgctgctagtctgggtcctggccgtcatctgctcccgggccgcacgagggacaataggagccaggcgcaccggccagcccctgaaggaggacccctcagccgtgcctgtgttctctgtggactatggggagctggatttccagtggcgagagaagaccccggagccccccgtgccctgtgtccctgagcagacggagtatgccaccattgtctttcctagcggaatgggcacctcatcccccgcccgcaggggctcagctgacggccctcggagtgcccagccactgaggcctgaggatggacactgctcttggcccctctgaccggcttccttggccaccagtgttctgcagaccctccaccatgagcccgggtcagcgcatttcctcaggagaagcaggcagggtgcaggccattgcaggccgtccaggggctgagctgcctgggggcgaccggggctccagcctgcacctgcaccaggcacagccccaccacaggactcatgtctcaatgcccacagtgagcccaggcagcaggtgtcaccgtcccctacagggagggccagatgcagtcactgcttcaggtcctgccagcacagagctgcctgcgtccagctccctgaatctctgctgctgctgctgctgctgctgctgctgcctgcggcccggggctgaaggcgccgtggccctgcctgacgccccggagcctcctgcctgaacttgggggctggttggagatggccttggagcagccaaggtgcccctggcagtggcatcccgaaacgccctggacgcagggcccaagactgggcacaggagtgggaggtacatggggctggggactccccaggagttatctgctccctgcaggcctagagaagtttcagggaaggtcagaagagctcctggctgtggtgggcagggcaggaaacccctccacctttacacatgcccaggcagcacctcaggccctttgtggggcagggaagctgaggcagtaagcgggcaggcagagctggaggcctttcaggcccagccagcactctggcctcctgccgccgcattccaccccagcccctcacaccactcgggagagggacatcctacggtcccaaggtcaggagggcagggctggggttgactcaggcccctcccagctgtggccacctgggtgttgggagggcagaagtgcaggcacctagggccccccatgtgcccaccctgggagctctccttggaacccattcctgaaattatttaaaggggttggccgggctcccaccagggcctgggtgggaaggtacaggcgttcccccggggcctagtacccccgccgtggcctatccactcctcacatccacacactgcacccccactcctggggcagggccaccagcatccaggcggccagcaggcacctgagtggctgggacaagggatcccccttccctgtggttctattatattataattataattaaatatgagagcatgctaaggaaaa

SEQ ID NO: 2533 - DNA, 1194 bp, Homo Sapiens
  NM_005024
atggactctctagcaacatcaatcaaccagtttgccctggagttgagcaaaaagctagctgaatctgctcagggtaaaaatatcttcttttcttcctggagcatctcaacttccttgaccatagtgtatttgggcgccaaaggtaccactgcagcccaaatggcccaggtgcttcaatttaacagagaccagggagtcaaatgtgaccctgaaagtgaaaaaaaaaggaaaatggaattcaacttgagcaactcggaagaaatacactctgatttccaaacacttatctcagaaatcctcaagcccaacgatgactacttacttaaaacagccaatgcgatatatggagagaaaacgtatgcatttcacaataaatatttagaagacatgaaaacatattttggtgcagaacctcagcctgttaactttgtggaagcttctgatcaaatcagaaaggacatcaactcttgggttgaaagacagaccgagggtaaaatccagaatctcctgcctgatgactctgtggattccacaaccaggatgattctggtgaacgccctatactttaaaggaatctgggaacatcaattcttagtgcaaaacaccacagaaaagccttttagaataaacgagactacaagcaaaccagtgcaaatgatgtttatgaagaaaaagcttcacatttttcacatagaaaagccaaaagcagtgggccttcaactctactacaaaagccgtgacctcagcctgcttatactactgccagaagacattaatgggctggaacagctggaaaaggccatcacctatgagaagctgaatgagtggaccagtgcagacatgatggagttgtatgaagtgcagctacaccttcccaagttcaagctggaagacagttatgatctcaagtcaaccctgagcagtatggggatgagtgatgccttcagccaaagcaaagctgatttctcaggaatgtcttcagcaagaaacctatttttgtccaatgttttccataaggcttttgtggaaataaatgaacaaggtactgaagctgcagctggcagtgggagtgagatagatatacgaattagagtcccatccattgaattcaatgcaaatcacccattcctcttcttcatcaggcacaataaaaccaacaccattcttttttatggaagattatgctccccctaa

SEQ ID NO: 2534 - DNA, 547 bp, Homo Sapiens
  NM_005031
gtggcagctgggcctcaccccggcagggctgtgcgtgaccccctgagtgggggaaggcaggctgttgccatggtggcctgagcgagcagaattcctccagggacaatggcgtctcttggccacatcttggttttctgtgtgggtctcctcaccatggccaaggcagaaagtccaaaggaacacgacccgttcacttacgactaccagtccctgcagatcggaggcctcgtcatcgccgggatcctcttcatcctgggcatcctcatcgtgctgagcagaagatgccggtgcaagttcaaccagcagcagaggactggggaacccgatgaagaggagggaactttccgcagctccatccgccgtctgtccacccgcaggcggtagaaacacctggagcgatggaatccggccaggactcccctggcacctgacatctcccacgctccacctgcgcgcccaccgccccctccgccgccccttccccagccctgcccccgcagactccccctgccgccaagacttccaataaaacgtgcgttcctctcga

SEQ ID NO: 2535 - DNA, 3800 bp, Homo Sapiens
  NM_005035
ggcgcgggcgcatgcgcaggcgcgggccggtggggtggcctggagcggcgtgcgtaatgtcggcactttgctggggccgcggagcggcggggctcaaacgagccctacggccttgcggccgcccgggactccccggcaaagaagggaccgccggtggcgtctgcggccccaggaggagctcgtccgccagcccccaggagcaagaccaagaccgcaggaaggactggggccacgtggagctgctggaggtgctccaggcgcgggtgcggcagctgcaggctgagagcgtgtcggaggtggtggtgaacagggtggatgtggcgcggctcccagaatgtggcagtggagatggtagcctccagccacccaggaaggtccagatgggggccaaggatgccaccccggtgccctgtggccgctgggcaaagatactggagaaggataagcggacccagcagatgcgtatgcagcggttgaaggcgaagctgcagatgccattccagagcggggagttcaaggcgctgaccaggcgcctgcaggtggagccccggctcctgagcaagcagatggccgggtgcctggaggactgcacgcgccaggcccccgagagcccctgggaggagcagctggcccggctgctgcaggaggcccctgggaagctgagcctcgatgtggagcaggccccgtcggggcagcactcgcaggcccagctctcaggtcagcagcagaggctcctggccttcttcaagtgctgcctgctcactgaccagctgcccctcgcccaccacctgctggtcgtccaccacggccagcggcagaagcggaagctgctcacgctggacatgtacaacgccgtgatgcttggctgggcgcggcagggtgccttcaaggagctggtatatgtgttattcatggtgaaggatgccggcttgactccggacctgctgtcctatgcggctgccctccagtgcatggggaggcaggaccaggacgccgggaccatcgaaaggtgtctggaacagatgagccaggaggggctgaagctgcaggcactcttcaccgccgttctgctgtctgaggaggatcgggccactgttctgaaggccgtgcacaaggtgaagcccaccttcagcctcccgccgcagctgccgcccccggtcaacacctccaagctgctcagggacgtgtatgccaaggatgggcgtgtgtcctacccgaagctgcacctgcccttgaagaccctgcagtgcctctttgagaagcagctccacatggagctggccagcagggtgtgcgtggtgtccgtggagaagcccacgttgccaagcaaggaggtcaagcacgcgcggaagaccctgaagaccctgcgggaccaatgggagaaagcactgtgccgggcgctgcgggagaccaagaaccgcctagagcgcgaggtgtacgagggccggttctcactttaccccttcctgtgcctgctggacgagcgcgaggtggtgcggatgctcctgcaggtcctgcaggcgctgcccgcccaaggtgagtccttcaccaccctggcccgggagctgagtgcgcgcactttcagccggcacgtggtgcagaggcagcgggtcagtggccaggtgcaggcgctgcagaaccactacaggaagtacctctgcttgctggcctccgacgccgaggtgcccgagccctgcctgccgcggcagtactgggaggagctgggggcgcccgaggccctgcgggagcagccctggcccctgccagtgcagatggagctgggcaagctgctggcggagatgctggtgcaggctacgcagatgccatgcagcctggacaagccgcatcgttcctctcggcttgtccccgtgctctaccacgtgtattccttccgcaacgtccagcagatcggcatcctgaagccgcacccggcctacgtgcagctgctggagaaggccgcggagcccacgctgaccttcgaggcggtggatgtacccatgctttgccccccgctgccctggacatcgccgcactctggtgctttcctgctcagccccaccaagctgatgcgcacggtggaaggcgccacgcagcaccaggagctgctggaaacctgcccgcccaccgcgctgcatggcgcactggacgccctcacccaactgggcaactgcgcctggcgcgtcaacgggcgcgtgctggacctggtgctgcagctcttccaggccaagggctgcccccagctaggcgtgccggccccgccctccgaggcgccccagccgcccgaggcccacctgccgcacagcgccgcgcccgcccgcaaggccgagctgcgccgtgagctggcgcactgccagaaggtggcccgggagatgcacagcctgcgggcggaggcgctgtaccgcctctcgctggcgcagcacctgcgggaccgcgtcttctggctgccgcacaacatggacttccgcggccgcacctacccctgcccgccgcacttcaaccacctgggcagcgacgtggcgcgggccctgctggagttcgcccagggccgcccgctcggcccgcacggcctggattggctcaagatccacctggtcaatctcacggggttgaagaagcgggagccgctgcggaagcgcctggcctttgcggaggaggtgatggatgacatcctggactccgcggaccaacccttgacgggccgaaagtggtggatgggcgcggaggaaccctggcagacgctggcctgctgtatggaggtggcgaacgctgtgcgcgcctccgaccctgccgcctatgtctcccacctccccgtccatcaggacggctcttgcaacggcctgcagcattatgctgctctgggccgcgacagcgtgggcgccgcctccgtcaacctggagccctcggatgtgccgcaggacgtgtacagcggcgtggccgcgcaggtggaggtgttccgtaggcaggacgcccagcggggcatgcgggtggcacaggtgctggaaggtttcatcacccgcaaggtggtgaagcagacggtgatgacggtggtgtacggggtcacgcgctatggcgggcgcctgcagattgagaagcgcctccgggagctgagcgactttccccaggagttcgtgtgggaggcctctcactatctcgtacgccaggtcttcaagagtctacaggagatgttctcggggacccgggccatccagcactggctgaccgagagtgcccgcctcatctcccacatgggctctgtggtggagtgggtcacacccctgggcgtccccgtcatccagccctatcgcctggactccaaggtcaagcaaataggaggtggaattcagagcatcacctacacccacaacggagacatcagccgaaagcccaacacacgtaagcagaagaacggcttcccgcccaacttcatccactcgctggactcctcccacatgatgctcaccgccctgcactgctacaggaagggcctgaccttcgtctctgtgcacgactgttactggactcacgcagctgatgtctccgtcatgaaccaggtgtgccgggagcagtttgtccgcttgcacagcgagcccatcctgcaggacctgtccagattcctggtcaagcggttctgctctgagccccagaagatcttggaggccagccagctgaaggagacactgcaggcggtgcccaagccaggggccttcgacctggagcaggtgaagcgttccacctacttcttcagctgacaccccgtgagccttgtcagtgtgtaaataaagctcttttgccacccccag

SEQ ID NO: 2536 - DNA, 2161 bp, Homo Sapiens
  NM_005040
ggaggagctgttttgcggcgggcggagctgcaggctgggcagggcttagcctgtgcgcttctgctggcctccttttcgccctcccacccgcactgcagtctccagcctgagccatgggccgccgagccctcctgctcctgcttctgtcttttctggcgccctgggccaccatagccctccggccggccttaagggccctcggcagcctacacttgccaaccaaccccacatccctcccggctgtagccaagaactattcggttctctacttccaacagaaggttgatcattttggatttaatactgtgaaaacttttaatcagcggtacctagtagctgataaatactggaagaaaaatggtggatcaatacttttctacactggtaatgaaggggacattatctggttttgtaataacacggggttcatgtgggatgtggctgaggaactgaaagctatgttggtgtttgctgaacatcgatactatggagagtctctcccctttggtgacaactcattcaaggattccagacacttgaatttcctgacatcagaacaagctctggctgattttgcagagttaatcaaacacttgaaaagaacaatcccaggagctgaaaatcaacctgtcattgccataggaggctcctatggtggcatgcttgccgcctggtttaggatgaaatatcctcatatggtagttggagctcttgcagcttctgcccctatctggcagtttgaggatttagtaccttgtggtgtatttatgaagatcgtaactacagattttaggaaaagcggtccacattgttcagagagcatccacaggtcctgggatgccattaatcgactctcaaatactggcagtggtttgcagtggcttactggagcccttcacttatgcagcccattaacttctcaggacatccaacatttgaaagactggatctctgaaacctgggtgaatctggcaatggtggactatccttatgcctctaactttttacagcctttgcctgcttggcctatcaaggtagtgtgccagtatttgaaaaatcccaatgtatctgattcactgctgctgcagaatattttccaagctctgaatgtatattacaattattcgggccaggtgaaatgcctgaatatttcagagacagcaactagcagtctgggaacactgggttggagctatcaggcctgcacagaagtagtcatgcccttttgtactaatggtgtcgatgacatgtttgaacctcactcatggaacttaaaggaactttctgatgactgttttcaacagtggggtgtgagaccaaggccctcctggatcactactatgtatggaggcaaaaacattagttcacacacaaacattgttttcagcaatggtgaactagacccctggtcaggaggtggagtaactaaggatatcacagacactctggttgcagtcaccatctcagagggggcccaccacttagatctccgcaccaagaatgccttggatcctatgtctgtgctgttagcccgctccttggaagttagacatatgaagaattggatcagagatttctatgacagtgcgggaaagcagcactgagaaacttttgattgttttcaatttcttcttttatgttcacaccaccacattcccattcactttgattttctacatgtaattaccttcttttgtttatcattagatttgatggggccaaagttgagatagaatagagggtgatgacggtaagagcaagtgtcccatgaatgtgatttcctgggttctcactgtctttgcaccacgtctaggaagaatcttcttgatagctctcccacaccatcagtggccctcataactggagtagagttcctggttgcttttcataagagggagagttactttctttgtatctctgcaagcagagatttctctttggttttgaggttgaagtgtctttggcccatttgtaagtccccatccctaccctacacaaagtaaaagcagaagatagataaaaaatgatgtaattgcagctggtaggatgtctggtgccaatccaggaagtgagagccatttcttttgtaccggatttaatgactttgaactgtgctgtaaataaataatacagctggaccttaaaaaaaaaaaaaaaaaaa

SEQ ID NO: 2537 - DNA, 2529 bp, Homo Sapiens
  NM_005041
gaagtgatgtgagtggtggctggtgcaaggagccacagtgggctgcctggggggctgatgccaccattccaggagcctcggtgaagagaggatatccatctgtgtagccgcttctctatacgggattccagctccatggcagcccgtctgctcctcctgggcatccttctcctgctgctgcccctgcccgtccctgccccgtgccacacagccgcacgctcagagtgcaagcgcagccacaagttcgtgcctggtgcatggctggccggggagggtgtggacgtgaccagcctccgccgctcgggctccttcccagtggacacacaaaggttcctgcggcccgacggcacctgcaccctctgtgaaaatgccctacaggagggcaccctccagcgcctgcctctggcgctcaccaactggcgggcccagggctctggctgccagcgccatgtaaccagggccaaagtcagctccactgaagctgtggcccgggatgcggctcgtagcatccgcaacgactggaaggtcgggctggacgtgactcctaagcccaccagcaatgtgcatgtgtctgtggccggctcacactcacaggcagccaactttgcagcccagaagacccaccaggaccagtacagcttcagcactgacacggtggagtgccgcttctacagtttccatgtggtacacactcccccgctgcaccctgacttcaagagggccctcggggacctgccccaccacttcaacgcctccacccagcccgcctacctcaggcttatctccaactacggcacccacttcatccgggctgtggagctgggtggccgcatatcggccctcactgccctgcgcacctgcgagctggccctggaagggctcacggacaacgaggtggaggactgcctgactgtcgaggcccaggtcaacataggcatccacggcagcatctctgccgaagccaaggcctgtgaggagaagaagaagaagcacaagatgacggcctccttccaccaaacctaccgggagcgccactcggaagtggttggcggccatcacacctccattaacgacctgctgttcgggatccaggccgggcccgagcagtactcagcctgggtaaactcgctgcccggcagccctggcctggtggactacaccctggaacccctgcacgtgctgctggacagccaggacccgcggcgggaggcactgaggagggccctgagtcagtacctgacggacagggctcgctggagggactgcagccggccgtgcccaccagggcggcagaagagcccccgagacccatgccagtgtgtgtgccatggctcagcggtcaccacccaggactgctgccctcggcagaggggcctggcccagctggaggtgaccttcatccaagcatggggcctgtggggggactggttcactgccacggatgcctatgtgaagctcttctttggtggccaggagctgaggacgagcaccgtgtgggacaataacaaccccatctggtcagtgcggctggattttggggatgtgctcctggccacaggggggcccctgaggttgcaggtctgggatcaggactctggcagggacgatgacctccttggcacctgtgatcaggctcccaagtctggttcccatgaggtgagatgcaacctgaatcatggccacctaaaattccgctatcatgccaggtgcttgccccacctgggaggaggcacctgcctggactatgtcccccaaatgcttctgggggagcctccaggaaaccggagtggggccgtgtggtgagaacagtgagcttggaaaggaccagtatgcttggactgaaggggttctcacagtgggagccagggctgtcttcgtattcccattagaccaagcttgtccaacccgaggcccgcatgcggcccaggatggctttgaatgcggcccaacgcaaattcgcaaactttcttaaaacattatgagtttctttttgctattttttttttttttttagctcatcggctatcgttagtgctagtggattttacatgtggcccaacacaattcttcttccaacgtggcccagagaagccaaaagattggatacgcatcagacagatggaaaagggagattcagactgtttttcagggaggtggctgggtttacacgctaatcccgattcaccctgtccaaactgcctaagccctccgccattctcaagccctgcagtcacagctacacagatcacagcttcagccaggagctgggcagaaggccaagaggctgttcccaccaggctgctcagggctggtcttttaggacccttcccttgagccctctatggtgtggcaaagccttcattgccttaactggagccccatcagctccagctgctctgtcttctttgcccacaatgctttgcccctgagacaaatggaggcctgtcctgacctgtctcaccatgtacatagcttgataaagggccaataaatatgatgttatggtgaaaaaaaaaaaaaaaaaaaaaa

SEQ ID NO: 2538 - DNA, 6084 bp, Homo Sapiens
  NM_005044
gccccaacagcgcgcacgcggctaccgagctggaggaggcggcgggcgcgagacccggaatgcgcagggcccccgcctcgccccccccagcccgggccgcggcccccgccttccccgcagtcgtcccgcactcggtgcccgccccccgaggccggcggctgctcccactcggggccgttgctgcttgtgccgtgagcgccgcccagccattgtccccgtcgctccgtcagccgcgccggaccgcgcaccaggaggcgagagcgcgcatggggagcctctgttgatgccgccgccgcgccgccctccgaggctgcgtcccgggaagcccggctccccgagcgctccggcctggcccggtgccccggacctgagtgcgtccccatggaggcgcccgggctggcccaggcggccgcggcggagagcgactcccgcaaggtggcggaggagacccccgacggggcgcccgcgctctgccccagccctgaggcgctgtcgccggagccgcctgtgtacagcctgcaggactttgacacgctggccaccgtgggcactgggacgttcgggcgggtgcacctggtgaaggagaagacagccaagcatttcttcgccctcaaggtgatgagcattcccgacgtcatccgcctaaagcaggagcaacacgtacacaatgagaagtctgtcctgaaggaagtcagccacccgttcctcatcaggctgttctggacgtggcatgacgagcgcttcctctacatgctcatggagtacgtgccgggcggcgagctcttcagctacctgcgcaaccgggggcgcttctccagcaccacggggctcttctactctgcagagatcatctgtgccatcgagtacctgcactccaaagagatcgtctacagggacttgaagccagagaacatcctgctggatagggatggccacattaagctcacggactttgggttcgccaagaagctggtagacaggacttggaccctctgtggaacacccgagtacctagcccccgaagtcattcagagcaagggccacggaagggccgtggactggtgggccctcggcatcctgatattcgagatgctttcggggtttcctccgttttttgatgacaacccgtttggcatttatcagaaaattcttgcaggcaaaatagatttccccagacatttggatttccatgtaaaagacctcattaagaaactgctcgtggttgacagaacaaggcgattaggaaacatgaagaacggggcgaatgatgtgaagcatcatcggtggttccgctccgtggactgggaagctgttccgcagagaaaactgaagcctcccatcgtgcccaagatagctggtgacggcgacacttccaacttcgaaacttaccctgagaatgactgggacacagccgcgcccgtgccgcagaaggatttagaaatcttcaagaatttctgaggacaggagctcacatctggaagaaacaggaagattggaatctgcctggaacaaagaactgcacctaagcagaccagaagcaaaatgtcttcttcacggcataaggacatctccacttttctctgtacctgtgtgtatagaaatagattagagcacagttgaaattcatggaactggcattatttaagcaactggaattccacactgtaggaaggttttgaaaattgtttggttgtagattttatcttatcctttagtgttgtgttcctactgtgatgtcttggtttttgtcatagacttaagtttataagtttgaactggacttgttcgattataaccacaaattgtgtgtgtgtgtgtgtgtgtgtgtgtgtgtgtgtgtgtgtgtgtatgcctgtgtgtatatatagaagtcattatggcagatgcacagaaattgtgcagtgatgtaaatgttcatactttacagagcctataatttttatttttcaatttgttttttcaaaaatctcttctcggggacaacatctgaagggtatgttgcatgcattaaaaaaaatcatctcacatgcattttatagttttggggaagaaaatatcatggggaggtctaccttcagtatctttagtgcttcttacctggtaacttgagactttaaaagaagaaacaaagaggggaagatatgggagcgaatttattccaagaatctacaatgacattgaagttgttggaggaatgtactgtatttaaaaaaaccttctgtgacacattcaaaaatttcatctgagctggatgcagtggcttgttcctatagtcccagcactttgggaggctgaggtgggtggattgcttgagcccaggagttggagaccagtctgggaaacgtggtgagacctcatctctacaaaatacaaaaaaattagccgggcatggtggcacgtgagtgtagtctcagctactcaggaggctgagatgagaggatcacttgagcctggggaggtccaggccgcagtgatccgagatcacaccactgcattccagcctgggtgacagagtgagaccctgtccaaaaaaaaaaaaaaaaaaaaagaaggcaatggctttgtgcttttgaagatggattgaagagaacgtccaccttaaggctttaaaagacagtgaagctgggtgcggtggtgcactcctgtaaccctgggactttgggaagctgaggcaggaagattgagcctaggagttcgagaccgacctgggcagcatagcgagaccccatctctatataaaaaaaaagatgttaaaacagtgaaattacagaaacagaacatagccaccctttttcatcagtgaccttttcttcacgtggaggtcaactcagtaggtgagaataattagtaggttcagcagaataaactctttacaattaataactcagtggaaaatgatgttcagatggtgaaatgtggaaatgttttagacaactctattttcagcctgtgcttctcactcaccatcctgttgggattaacagttgagggccatcgctgcctaaacatttagcgtgcggtttcccatcagttttaccgtgaatgtgaaaaggtgaaactggtgctgacttcggcagcaggtatactaaaattggaatgacacagaggagattagcatggccccctgcgcgaggaagatctgcagattcatgcagcattccatatttttttaagaaaaggttacactgtgcaccgacatgtggagctagaaggaaaagcttttaagtctcatgtttgctgactataaaaataaatcatagtaataatattgaacattctactttaaaaattattaataaaaccataaatgaaacacttgagcacactttaaaaagtacataaatccatgagtccatatgcctatttttaggttgtctgttttattatccaggatttcatactcagatgagaattagcatcaggaaagcctgaaatgccttaattgtgaactgatatgcaggaaaatgaaatatgcaagcacattggtgaccttgttctttacagacgtcgtgatcagcctccagccatacagaacaaatgagaaattagaagcgattccaagaacgtgtgatggtgtgaaacccactttggaccatcacacacatttcagcatttgaagtgacacaagctacctggtaactgcccatggcggggtcatagtttaaatggcccaatgtcatgtagaggttaatttaatcaaaatgagctataaacatggagcaatcactgtataattttaaaatagtttacctggccaggcatggtggctcacgcctgtaatcccagcactttgggaggccgaggcaggtggatcacctgaggtcaggagttcgagaccagcctggccaacatggcaaaacccccatctctactaaaatacaaaaattaggtgtggtggcgggcacctgtaatcctggctactcgggaggctgaggcaggagaatcgcttgaacccgggaggcagaggctgcagtaagccgagatcgtgccactgcactccagcctgggccacagagcaagactccgtctcaaaacataaaaataaaaaaaatacaaatagctgacccgggtgggcattccaaaatgtccgcatggacgatcacgaaacaatcacggtgcgaaatgtccgcatggatgatcacgaaacaatcacggtgcagaatgtccgtatggatgatcatgacaaacaatcactgcgcaaaatgtggaggaaaattcattaccataatcacaacatttgtatcagaaaaacattacaaatttactttgcttcatgtaattttacgagttggcaatattttcttaaattggaatactctaagagaataggacatggatatgttacaagaagaagtgtattggggcaagtcttgtttttctgaagggaaatgccaccggcctgctttcataggcattgataaagccaggaaggaaataaagtcacaaccaaatagtatacactgtctctactgaattcttctaattccttcgcaacagaagtctaaatcctgcttagcctaaacatatctatagccagcgatgggcaaattatatttgctgtcagcatgatagaataagaagcagaaaccccccagcagtggggtaagattgcgcgcttcatcccctcaaaatgcagttcagccccactccctctccatgcccatcaaacaactgcacaatcacttgttactgaatttcccattcagcgttttgtttctttctgtccatacttaaagaccaaatcatttgtttgctttgaagaaaaagcaaaaacaagaacaaaaacaccaaatcatttgaaatcactgtccattaaaaaaaatcaccagtggaactaaacagttgagtggtttgggatgtgttcgccatttctgtgtttgacctacatggcctctaattctttggaccattgtaactgtgaaactatggcttaatactgttaaagaccccaaggctccactctgtagccaggtgcacctcaggctgcacaaataccccaccagaatgtcacaatcattcattgctccagctactgagtgaacagggtgcaagacagcactggcttgggttgtatttttgcagccagttaactttgcatcaggtctacacagtccttgcagcctttgatttctccagttgtagagatttgaaatggggtgcccgggttcctctcgtttttccttcaatctacctagcatgcattttacacacattggaggagtcgtatgcactgtttttctgttgctgatggaggcaagcaggccttctaattagtctaacttaaacggatgggattcacttaacaaaagcaagaagaaaagcacacgaacaggtgtcttaatgcatttggatagtttctttgcggggtgtgtgtgtgtgtgtgtgtgtgtgtgtgtgtgtgtgtgtgtgtgtgtcttggtgaaggtgaggggctgtattttcaccaagccttttcataatcaagtttgctttgcaaaccttatggccttgcaccccgcagaacagtcccttcctaatagcagggatgctctgtcatggttttctgtaaattatcgtgtgttgggaagttctgttgaggcttagtttgatcttccatggtggacacgtctgttctgtatgtaaaaggcattacaattgtgttttagcagatgagacttgaagcctttccacagtccttgtgctctgagatggctgttgagctctgctcaactgtcgtagctgaattctttctttgcgctgaacactgggcagcctcaccatgttgccaacgtgcttctggggcccctgtcactgccgccggatgccgcgcacacaggcagagtgccttggcaggtttgtgcaccccttggcgagccagaactgggaaccccgcggggtgaccccttctcatggggggtcggggaggggagtgcctatttttaatcctgtctgtttgttgcacaatggaaatcactgtgatttgtacatatgccctaggaaaattttactgctgtctaatttatgtaataatactgttgattccaggtttgtttaataaaactttgtatcttttcagaagtctgagtttcatctgcttctgtctcc

SEQ ID NO: 2539 - DNA, 2437 bp, Homo Sapiens
  NM_005051
ctgcaatggcggctctagactccctgtcgctcttcactagcctcggcctgagcgagcagaaggcccgcgagacgctcaagaactcggctctgagcgcgcagctgcgcgaggccgctactcaggctcagcagaccctgggttccaccattgacaaagctaccgggatcctgttatatggcttggcctcccgactcagggatacccggcgtctctccttccttgtaagctacatagccagtaagaagatccacactgagccccagctaagcgctgcccttgagtatgtgcggagtcaccccttggaccccatcgacactgtggacttcgagcgggaatgtggcgtgggtgtcattgtgaccccagagcagattgaggaggctgtggaggctgctattaacaggcaccggccccagctcctggtggaacgttaccatttcaacatggggctgctgatgggagaggctcgggctgtgctgaagtgggcagatggcaaaatgatcaagaatgaagtggacatgcaggtcctccaccttctgggccccaagttggaggctgatctggagaagaagttcaaggtggcaaaagctcggctagaagaaacagaccggaggacggcaaaggatgtggtggagaatggcgagactgctgaccagaccctgtctctgatggagcagctccggggggaggcccttaagttccacaagcctggtgagaactacaagaccccaggctatgtggtcactccacacaccatgaatctactaaagcagcacctggagattactggtgggcaggtacgtacccggttcccgccagaacccaatggaatcctgcatattggacatgccaaagccatcaatttcaactttggctatgccaaggccaacaatggcatctgttttctgcgttttgatgacaccaaccctgagaaggaggaagcaaagttcttcacggccatctgtgacatggtagcctggctaggctacacaccttacaaagtcacatatgcgtctgactattttgaccagctatatgcgtgggctgtggagctcatccgcaggggtctggcttatgtgtgccaccagcgaggagaggagctcaaaggccataatactctgccttcaccctggagagaccgtcccatggaggagtcactgctgctctttgaggcaatgcgcaagggcaagttttcagagggcgaggccacactacggatgaagctggtgatggaggatggcaagatggaccctgtagcctatcgagtcaagtatacaccacaccaccgcacaggggacaaatggtgcatctatcccacctacgactacacacactgcctctgtgactccatcgagcacatcactcactcactctgcaccaaggaattccaggcccgacgctcttcctacttctggctttgcaatgcactggacgtctattgccctgtgcagtgggagtatggccgcctcaacctgcactatgctgttgtctctaagaggaagatcctccagcttgtagcaactggtgctgtgcgggactgggatgacccacggctctttacactcacggccctgcgacggcggggcttcccacctgaggccatcaacaacttctgtgcccgggtgggagtgactgtggcacaaaccacaatggagccacatcttctagaagcctgtgtgcgtgatgtgctgaatgacacagccccacgagccatggctgtgctggagtcactacgggtcatcatcaccaactttcctgctgccaagtccttggacatccaggtgcccaacttcccagctgatgagaccaaaggcttccatcaggttccctttgcacccattgtcttcattgagaggactgacttcaaggaggagccagagccaggatttaagcgcctggcttggggccagcctgtgggcctgaggcatacaggctacgtcattgagctgcagcatgttgtcaagggccccagtggttgtgtagagagtctggaggtgacctgcagacgggcagatgctggagagaagccaaaggcctttattcactgggtgtcacagcctttgatgtgtgaggttcgcctctatgagcgactattccagcacaagaaccctgaagatcctactgaggtgcctggtggatttttaagtgacctgaacctggcatcactacacgtggtggatgcagcattagtggactgctctgtggccctggcaaaacccttcgacaagttccagtttgagcgtcttggatatttctccgtggatccagacagccatcagggaaagcttgtctttaaccgaactgtcacactgaaggaagacccaggaaaggtgtgagctggaagcactgaacctacctcatcctcctggagggtgtggctaccctcgccaccccaaattccatgtcaataaagaacagctaaattctcctagaaaaaaaa

SEQ ID NO: 2540 - DNA, 4423 bp, Homo Sapiens
  NM_005057
ggaagccgcggggccttctaaggccgaaagtcttcggagcttgcgccagtctcttcgcggcgtccaccacttagacgcaagttgctgaagccggccggggagaaggtgttgttgccggagctgagaccgggcggccacagtccgcagggatgaacctcgagttgctggagtcctttgggcagaactatccagaggaagctgatggaactttggattgtatcagcatggctttgacttgcacctttaacaggtggggcacactgcttgcagttggctgtaatgatggccgaattgtcatctgggatttcttgacaagaggcattgctaaaataattagtgcacacatccatccagtgtgttctttatgctggagccgagatggtcataaactcgtgagtgcttccactgataacatagtgtcacagtgggatgttctttcaggcgactgtgaccagaggtttcgattcccttcacccatcttaaaagtccaatatcatccacgagatcagaacaaggttctcgtgtgtcccatgaaatctgctcctgtcatgttgaccctttcagattccaaacatgttgttctgccggtggacgatgactccgatttgaacgttgtggcatcttttgataggcgaggggaatatatttatacgggaaacgcaaaaggcaagattttggtcctaaaaacagattctcaggatcttgttgcttccttcagagtgacaactggaacaagcaataccacagccattaagtcaattgagtttgcccggaaggggagttgctttttaattaacacggcagatcgaataatcagagtttatgatggcagagaaatcttaacatgtggaagagatggagagcctgaacctatgcagaaattgcaggatttggtgaataggaccccatggaagaaatgttgtttctctggggatggggaatacatcgtggcaggttctgcccggcagcatgccctgtacatctgggagaagagcattggcaacctggtgaagattctccatgggacgagaggagaactcctcttggatgtagcttggcatcctgttcgacccatcatagcatccatttccagtggagtggtatctatctgggcacagaatcaagtagaaaactggagtgcatttgcaccagacttcaaagaattggatgaaaatgtagaatacgaagaaagggaatcagagtttgatattgaagatgaagataagagtgagcctgagcagacaggggctgatgctgcagaagatgaggaagtggatgtcaccagcgtggaccctattgctgccttctgtagcagtgatgaagagctggaagattcaaaggctctattgtatttacccattgcccctgaggtagaagacccagaagaaaatccttacggccccccaccggatgcagtccaaacctccttgatggatgaaggggctagttcagagaagaagaggcagtcctcagcagatgggtcccagccacctaagaagaaacccaaaacaaccaatatagaacttcaaggagtaccaaatgatgaagtccatccactactgggtgtgaagggggatggcaaatccaagaagaagcaagcaggccggcctaaaggatcaaaaggtaaagagaaagattctccatttaaaccgaaactctacaaaggggacagaggtttacctctggaaggatcagcgaagggtaaagtgcaggcggaactcagccagcccttgacagcaggaggagcaatctcagaactgttatgaagaccttcgaagttcttcattctttctcactttgccatcatgtggcctctggacactgtggtcagtcatttgaaaattgactttaatttaaaacaaaggcctgtgcctcccacccaggaggtgggagggtgaattttatgtttaaatgaagaagtgaattatggaagaagagtatacgaccttcccttccctttcaagcataagtccaaatagactctcaggaatgaagatttgtgaagacatcagataggaattttgactcatttaaactttgatgcttagttatgttgctggagaaaagatacttatgttttgctcatctaacttcattgtacccagcgtcattttgacatgtcatttcctatctcccatttgccttcggtcctcaatgcatgtctttgagtgacttcttatctgaaattttgctactggtatcctaggaaagcttttgttggatactctcattttaaacttctcctctccccagatacctcctatatttccatattgtgtgcaaaggatgggcagaaaagaaagtgcttgaaagatttcaaattttcagaaagggaacaacgaaggccctctcttcctctcataccacgttttgctcaagaagctgggctgtaacaattcagggttttcccttgttttcctctcattgcatgtttccctccaatattggttcattgtcatcaatcatggtttttgaagatagctagttttatccatctccagcaaagaatcatcaatagtttatattgctttacctgtgctggcttccagagatggaaacaaacccaggtgtctctcaacaagctacttttttactggggtgggggaatctatgcaaggagtaaagtaaaaccatccagaatcaaagcagcaaccacatagttcaaatcaaagatcaaggtgaattttttgtatcactgcctgtggaaatctatcctcatcagtcattgcatttttccctgcctatacctgtgctcctttttcttactgtgttttcagtcacttcctttctgtgaaaggttgcttagctttttttttgacatttgttgttctttataaaaataacagattggatagatgtgtacatttggtgtttgaaattctctgaaaatcccattaggaaaccaggtgtgaaaagggctcagtagcttctctgagtggcgtttttagctgactggaagtgcttaatctggatcgtcttttttttttttttttttttttcaatattttaaaaggagaatttaaatactgtgcttactgtgaaatatatcagttggtgagccgggcgtggtgggtcacgcctgtaatcccagcactttgggaggccaaggcgggttgatcacccgaggtcaggagttcaagaccagcctggccaacgtggtgaaagcctgtatctattaaaagacaaaaattagctgggcgtggtagtacatgcctgtaatcccagctacactggaggctgagtcaggagaatcacttgaacgtgggaggcagaggttgcagtgagtggagatcgcaccactgccctccagcctaggtgacagaatgagactctatctcaaaaaaaaaaaaaaaatgatatcagttggtggatgctcctataggtagccaaacacattgattacctgttagattttaggatagaaatcaaagtagagcacgtcagcaagagcctctttgtctcactccatcatttaaaaccagtatattcagtagttgaagaaagagctctccctgagtcagttgcaaaacgtctatatttttagatgccactacttttttcttaaatattcattttgagactgtcatgagttagaccagtggttgagattagtagatggctcactagacatgtttttgttttgcagacattatatccattccagtcctctgcactgtacactgcagcagtgtgcaaactatgggacttagagggtttctgccatctttccacgtgtgaagtagcttggtttcctctgcctgtgcatttggatgtttgtgctatgtccacctcctaaactggctactgagaaaatcatcttcagccctgtcagattgtctctggcagtagctcctaataattatttatgtttttggaatttttttttcaacttttaaaaaaccttctatccatttcaatttgaattatttgatttgtacaatatatgtatattctcttcttcctttttgtcatccctgccctgccacccccaaaattttgtttttaaaaatattctgggctgggcatggtggctcacacctgtaatcccagcacttggggaggccgaggctggtggatcatctgaggtcaggtgtttgagaccagcctggtcaacatggtgaaaccccgtctctactaaaaatacaaaaattagctgggcgtggtggcgggcacctgtaatcctagctactcgggaggctgaggcaggagaattgcttgaatccaggaggcagaggttgcagtgagctgagattgcgccactgcactccagcctgggtgacagagcaagactccatctcaaaaaaaaaaaaaaaaaaaaatctgtagttttgtacaagatgagacttagccttgggtacttcttgctgaagctttaatgctttgtaaataaaatcggatgtttattaaagaaaaaaaaaaaaaa

SEQ ID NO: 2541 - DNA, 2632 bp, Homo Sapiens
  NM_005067
agctgagggacgcgtcagccaggcaccccggggtgtggccagaggacttcggcgacgcttccccgagagtagcccccctcctcaacccagaaaagacaaccccgcggggctgcagcgagccaggcatgctcactggcgcaggcccggcccgcagcccgagcaggaagcgccggcgctaggcggccccctgcgctgccagctggagccgggcggagccagcgccccggcgcagggtggctctgccagtccccgcgcgcctgggcggccgcacacgtgtccaggcgtcacgtccgcgcgcgcccccggggcttgcgtcagcggctgttccagaagcgggtgggccagggctctgcgcaccgctggggttcggggcccgggacgccgccgggaggagggcaccgcgcggggtccgacgcggaggcgtgctcggaacgccgggggctgcggagtgcatcagcgcggtccagccctccgcctgccgggcgccgagcgtctccgccgcccggacctgggctgggcgccgtggcgttgcctcggagctcgctgcccgcggggcgcgcaccgccttgacccgggcggccccgcggcaggcaggcgcccgcagttccatggttggttcggagcgcgatgagccgcccgtcctccaccggccccagcgctaataaaccctgcagcaagcagccgccgccgcagccccagcacactccgtccccggctgcgcccccggccgccgccaccatctcggctgcgggccccggctcgtccgcggtgcccgccgcggcggcggtgatctcgggccccggcggcggcggcggggccggcccggtgtccccgcagcaccacgagctgacctcgctcttcgagtgtccggtctgctttgactatgtcctgcctcctattctgcagtgccaggccgggcacctggtgtgtaaccaatgccgccagaagttgagctgctgcccgacgtgcaggggcgccctgacgcccagcatcaggaacctggctatggagaaggtggcctcggcagtcctgtttccctgtaagtatgccaccacgggctgttccctgaccctgcaccatacggagaaaccagaacatgaagacatatgtgaataccgtccctactcctgcccatgtcctggtgcttcctgcaagtggcaggggtccctggaagctgtgatgtcccatctcatgcacgcccacaagagcattaccacccttcagggagaagacatcgtctttctagctacagacattaacttgccaggggctgtcgactgggtgatgatgcagtcatgttttggccatcacttcatgctggtgctggagaaacaagagaagtacgaaggccaccagcagttttttgccatcgtcctgctcattggcacccgcaagcaagccgagaactttgcctacagactggagttgaatgggaaccggcggagattgacctgggaggccacgccccgttcgattcatgacggtgtggctgcggccatcatgaacagcgactgccttgttttcgacacagccatagcacatctttttgcagataatgggaaccttggaatcaatgttactatttctacatgttgtccatgatgtgactttcgtaaaccttcaaaattatttgggcatagtgctctatgtttaataaaggtttttatagatgttttattccatatgtcttcacaagtcaggacccacaattacccgtgttttgtttgaacagcagtgtcccatctggcttcgacccaacaaagttcattaacctgggatgaatggggttggcctgttggtgatttggatgctgttctgtgatctaaaacaactcttattgaattgtatttactccctaaacaacacttgacaggctgttgcacagggcttctatagatcagtgtgttaggaatgggaggccccttcctgcctgccttcccatattggtcccttgacattgacaaaagcacagtgactgtcagcagattcctttacttttgtttgtgggaggtaggaattgttttaatgcattttaaacagtgtttctgaaattggatggctggctaatagacactgaatcacccggagtgcttatcttaaaattgcagatttagggagcctgccaatttaacagtctcatcaggtgattcttttcaacagtaatgtttgagaattactgggttaaattgtgggaaagggtccagattttaaaggtgctttaaggttgccctctgccgatactgtttgtctttctactgtttcatcccctaacttcccccaaccctcaaattaaaactagaactatagatccacatgaacgcacgcctgagatttggccactcacctatgttttgggtggattgcctaggaaagcaagtcatatggccattgatagttctcatgtaattagttttgctcaccactagtacagatgacccgtttacacgtggcttccctcggaagccctcctcaacagtagctggtgtgaaagactaaatcagtagagttggaaaagctttataaccggtgtgtcatatgcttgctatttaaagctgtgtgttggttttgtttttctgccacattcactagttttttaataaatattttccaaaaatggataaaaaaaaaaaaa

SEQ ID NO: 2542 - DNA, 3142 bp, Homo Sapiens
  NM_005073
gacgtcaggtcggaggagtagcacctgccaggagcacgtcccgccggcaggtcgcaggagccctgggagccgccgccatgggaatgtccaaatcacacagtttctttggttatcccctgagcatcttcttcatcgtggtcaatgagttttgcgaaagattttcctactatggaatgcgagcaatcctgattctgtacttcacaaatttcatcagctgggatgataacctgtccaccgccatctaccatacgtttgtggctctgtgctacctgacgccaattctcggagctcttatcgccgactcgtggctgggaaagttcaagaccattgtgtcgctctccattgtctacacaattggacaagcagtcacctcagtaagctccattaatgacctcacagaccacaaccatgatggcacccccgacagccttcctgtgcacgtggtgctgtccttgatcggcctggccctgatagctctcgggactggaggaatcaaaccctgtgtgtctgcgtttggtggagatcagtttgaagagggccaggagaaacaaagaaacagatttttttccatcttttacttggctattaatgctggaagtttgctttccacaatcatcacacccatgctcagagttcaacaatgtggaattcacagtaaacaagcttgttacccactggcctttggggttcctgctgctctcatggctgtagccctgattgtgtttgtccttggcagtgggatgtacaagaagttcaagccacagggcaacatcatgggtaaagtggccaagtgcatcggttttgccatcaaaaatagatttaggcatcggagtaaggcatttcccaagagggagcactggctggactgggctaaagagaaatacgatgagcggctcatctcccaaattaagatggttacgagggtgatgttcctgtatattccactcccaatgttctgggccttgtttgaccagcagggctccaggtggacactgcaggcaacaactatgtccgggaaaatcggagctcttgaaattcagcccgatcagatgcagaccgtgaacgccatcctgatcgtgatcatggtcccgatcttcgatgctgtgctgtaccctctcattgcaaaatgtggcttcaatttcacctccttgaagaagatggcagttggcatggtcctggcctccatggcctttgtggtggctgccatcgtgcaggtggaaatcgataaaactcttccagtcttccccaaaggaaacgaagtccaaattaaagttttgaatataggaaacaataccatgaatatatctcttcctggagagatggtgacacttggcccaatgtctcaaacaaatgcatttatgacttttgatgtaaacaaactgacaaggataaacatttcttctcctggatcaccagtcactgctgtaactgacgacttcaagcagggccaacgccacacgcttctagtgtgggcccccaatcactaccaggtggtaaaggatggtcttaaccagaagccagaaaaaggggaaaatggaatcagatttgtaaatacttttaacgagctcatcaccatcacaatgagtgggaaagtttatgcaaacatcagcagctacaatgccagcacataccagttttttccttctggcataaaaggcttcacaataagctcaacagagattccgccacaatgtcaacctaatttcaatactttctaccttgaatttggtagtgcttatacctatatagtccaaaggaagaatgacagctgccctgaagtgaaggtgtttgaagatatttcagccaacacagttaacatggctctgcaaatcccgcagtattttcttctcacctgtggcgaagtggtcttctctgtcacgggattggaattctcatattctcaggctccttccaacatgaagtcggtgcttcaggcaggatggctgctgaccgtggctgttggcaacatcattgtgctcatcgtggcaggggcaggccagttcagcaaacagtgggccgagtacattctatttgccgcgttgcttctggtcgtctgtgtaatttttgccatcatggctcggttctatacttacatcaacccagcggagatcgaagctcaatttgatgaggatgaaaagaaaaacagactggaaaagagtaacccatatttcatgtcaggggccaattcacagaaacagatgtgaaggtcaggaggcaagtggaggatggactgggcccgcagatgccctgacctctgcccccaggtagcaggacactccattggatggcccctgatgaggaagacttcagaattgggaactaaaccatgaatgctattttcttttttctttttcttttctttttttttttttttttttttttgagacagagttttgctcttgttgtccaggctggagtgcaatggcacgatctcagctcactgcaacctccgcctcccaggttcaagtaattctcctgcctcagcctcccgagtggctgggattagcggcatgcaccaccacgcccagctatttttgtatttttagtagagatggggtttcaccatgttggccaggatggtctcgatctcttgacctggtgatctgcccacctcggcctgccaaagtgctgggattacaggcttgagctaccgcgcccggccgtgaacgctattttctaagcagccagcagtgaatctaaaactctggaagaagtcttctgtttgaaaggcttatttaagccacacgtacacacactgtcttagagtactgtgagcccaccccacattggtcatcttccctatcacacaaatgatgttattttggactagcttaattttgaaatggtaacaaagtttcctattccatactgttcatttctaatactcttacgaaaactattctaaaggaggcaggagccaaggccaaaagtgaacgtacaggtttgaaatggctgtgataaggaccagctggtattaactgataactttacctttgggtttttgttattttgtttttctagtccctacctgtgtttaaattatggataactcgaaagacagctcaggtgaaggccagtaatgatttttttgaagtttcaatggtgtgaaataaatttctgttcttaaaaaaaaaaaaaaaaa

SEQ ID NO: 2543 - DNA, 3966 bp, Homo Sapiens
  NM_005079
gggcggcgccgccgcgcccgacgcctctgggggtggggacttcgcgggagtcgccggcggaggcgaggaggagctctgcgcggcgcggcgggcgatccgagccgggacgggctgcaggcgggggtgctgcagaggacacgaggcggcgggctggagacatggaccgcggcgagcaaggtctgctgagaacagacccagtccctgaggaaggagaagatgttgctgccacgatcagtgccacagagaccctctcggaagaggagcaggaagagctaagaagagaacttgcaaaggtagaagaagaaatccagactctgtctcaagtgttagcagcaaaagagaagcatctagcagagatcaagcggaaacttggaatcaattctctacaggaactaaaacagaacattgccaaagggtggcaagacgtgacagcaacatctgcttacaagaagacatctgaaaccttatcccaggctggacagaaggcctcagctgctttttcgtctgttggctcagtcatcaccaaaaagctggaagatgtaaaaaactccccaacttttaaatcatttgaagaaaaggtcgaaaacttaaagtctaaagtagggggaaccaagcctgctggtggtgattttggagaagtcttgaattcggctgcaaatgctagtgccaccaccacggagcctcttccagaaaagacacaggagagcctgtgagattcctacctttgttctgctacccactgccagatgctgcaagcgaggtccaagcacatcttgtcaacatgcattgccatgaatttctaccagatgtgcttttatttagctttacatattcctttgaccaaatagtttgtgggttaaacaaaatgaaaatatcttcacctctattcttgggaaacaccctttagtgtacatttatgttcctttatttaggaaacaccattataaaaacacttatagtaaatggggacattcactataatgatctaagaagctacagattgtcatagttgttttcctgctttacaaaattgctccagatctggaatgccagtttgacctttgtcttctataatatttcctttttttcccctctttgaatctctgtatatttgattcttaactaaaattgttctcttaaatattctgaatcctggtaattaaaagtttgggtgtattttctttacctccaaggaaagaactactagctacaaaaaatattttggaataagcattgttttggtataaggtacatattttggttgaagacaccagactgaagtaaacagctgtgcatccaatttattatagttttgtaagtaacaatatgtaatcaaacttctaggtgacttgagagtggaacctcctatatcattatttagcaccgtttgtgacagtaaccatttcagtgtattgtttattataccacttatatcaacttatttttcaccaggttaaaattttaatttctacaaaataacattctgaatcaagcacactgtatgttcagtaggttgaactatgaacactgtcatcaatgttcagttcaaaagcctgaaagtttagatctagaagctggtaaaaatgacaatatcaatcacattaggggaaccattgttgtcttcacttaatccatttagcactatttaaaataagcacaccaagttatatgactaatataacttgaaaattttttatactgaggggttggtgataactcttgaggatgtaatgcattaataaaaatcaactcatcattttctacttgttttcaatgtgttggaaactgtaaaatgatactgtagaacctgtctcctactttgaaaactgaatgtcagggctgagtgaatcaaagtgtctagacatatttgcatagaggccaaggtattctattctaataactgcttactcaacactaccaccttttccttatactgtatatgattatggcctacaatgttgtatttgttatttattaaattgtgattgttttattattgtttatgccaaatgttaactgccaagcttggagtgacctaaagcattttttaaaagcatggctagatttacttcagtataaattatcttatgaaaaccaaattttaaaagccacaggtgttgattgttataaaataacatgctgccattcttgattgctagagtttttgttagtactttggatgcaattaaaactatgtgctatcacatgtgaaaagcttaataaattccatctatcagtagtataggtctcaatatttattatgagaccagtggtctggaaacagcttgttgtaccgaatcaactggagtctatgcttaaaaaaaaaaaatttttttttaaccatccttaaattattgcttaatggtatcatattaacatattctaaataagggctttaaggcacaggctgttgaagcattttctcagaggagtggatctgtagaagtctgtctttctatagaaatattgtgcttactcaagtgttaaattattttttctatgaactagtctacttcttaaaattcaaacatattcttttgatcacattgtttcttgagcatcctgccctgctactaacttttcaacaaggcaaaatggagtaaagtggcaatttctttagatgagtgaaataccctcaagtctcttttctgcccaaaaagggaaaagtgatagaaatgggggtggcaagtggggtgagtggatgaaggtgggtattgggggtggctgtgaaagaaaataatggagaatcacttttctagacatctacctatacttaatctaagaaacaaagtaatctactgtaaagtactctgccccttgaaagaagtattaaaaagagtgaggatggatttagaaaaaaacatgaatttagaaatattcaaaatggtttttgtggcagattcaatattatgaattcacagatatttaaagaatgagaaacatagtaattagtagaaatgccagaaacagttcctggttcctcttgtgtttgacactaagaaaatagcaagagtgtgaaatctcagatacttatgaaatctcacagatgtaaggactcaagtgtagaagaaaatatccccttcttacaaaaagaaatgtcaatttatggagtttgtgggaaatagggcaagaattcttatgcttatgagagccaagtagtcagtggaagagagtagagctcaaaactggattatcaccttagcaacttagaatagtttgaaatagaaaaaaagtatttaatttggatctggatctgttaagatatgcacagtctattttttgtatagtattggaaaataaaaatgctataatttgggtatgggttcttttgtatacattacctgcccattgaggaaaggggcaagtccattatgcaacttctctccaaacccttcatattctggatatgatacttaaagagccatgagcagctacattctgcctatcagaaggcatttattaaatgactgcttgctgaagatgtgtccaaagagatcctacattaaggtcatttgtcagaatgatgtttgtgtttgtttagagttggctgacctccaactcctggggtcaaggaatcctactgccttagcttcccaaatagctaggactataggcatgcacccggccatgtgttttatttatagctcttaaagcccagatgaagaaatcacatttttgcccatagtgaagaaacatttggccattgattagtccttattttcagtgactgtcctgttttcattagattagagagaccctgtgtgggccacagttaatataaaccattatcacttttaagtaaacctgcacatcttagatttcataatttccttattgttctgactcaaaatgaactaagagcttttcactttttgtttgtaagttctcagagagtcgggtctgcaagtgcttttgcctgccaggattttgtactcaaataaatgctatttggcaactaaaaaaaaa

SEQ ID NO: 2544 - DNA, 6234 bp, Homo Sapiens
  NM_005081
gagaagcccacgccactctaccccagagctctcgatggtgcttctccggcttcagggctggagtgggggtggagggcgggaaaaaccacagagacaaaacatagagtaccccggcagccggcaagaggaagagagagtggcttccacatccccaatatcctagaggcggctgagccggaggcggtcgcacaaagcgggccccgggggccgttccagccgcggccgaccatagagatgcggctcccgccggctctgggtctggagccttccaggttacaaaccgcctttccagttcgctggctcttatgatccagctcctgcccgacgatgtggacactgtcatcacctccattttacagataggaaagctgaggcccagagaagcgaagcgactgtgtctgtccaagaccacgcgccctcctgcccggaagataagcgtatttcttctctggtgcccacctgtctcctacctcaccctgccctcccgcaggtgaaggttcttaatcttgacggctcagcgtcctccttggctccccccggaggccatgtatggtcaagcttgaagattccccagaacagcgataatattcacatttaagaagccaaaacacacaagtcggtggtgatgacagacccccttttggactcacagccagccagtagcaccggggagatggatggactgtgccctgagctattgctgatccccccgcctctctctaaccgtggaatcctggggcctgtccagagcccctgtccttcccgggaccctgcacctatacctactgagccaggctgcctgctggtagaggccacagcaactgaagagggaccagggaacatggagatcattgtggagacagtagctggaaccctgaccccaggtgctcctggagagaccccagccactgcagcttcataggctccaacgtcaaactcttccggcagcatcagcggagccatggtgctgggacacagggagaactttctgccgttcagggccttccatcccaggagctgctgccagctcccaaactgcctccaggagagagagaaccttcacaggaagcaggtacacccttgcctgggcaggagacagctgaagaggagaatgtagagaaagaagagaagagtgacacccagaaggactcccaaaaggctgtggataaaggccaaggggctcagcggctggaaggggatgtggtctctggcaccgagtccctcttcaagacccatatgtgtccagagtgtaagcgctgctttaagaagcggactcatctggtggagcacctgcatctccacttcccagaccccagcctccagtgccctaactgccagaagttcttcaccagtaagagcaagctcaagacccatctgctgcgggagctgggtgaaaaggcccaccactgcccactgtgccactacagtgcggtggagaggaatgcactcaaccgccacatggccagcatgcatgaagatatttccaacttctactcagacacctatgcctgtcctgtctgccgtgaggaattccgcctcagccaggccctaaaggagcacctcaagagccacacggcagcagccgcagcagagccattaccccttcgctgctttcaggagggctgcagctatgcagcacccgaccgcaaggccttcattaagcacctgaaggagacccatggggtgcgggctgtggagtgccgccatcactcatgtcccatgctctttgccacagccgaagccatggaggcccaccacaagagtcactacgccttccactgcccccactgtgattttgcttgttccaataagcacctattccgtaaacacaagaagcagggccaccctggcagtgaagagctgcgctgcaccttctgcccctttgccaccttcaacccagtggcttaccaggatcatgtaggcaagatgcatgctcatgaaaagatccaccagtgtcctgagtgcaactttgccactgcccacaagagggtgctcatccgacacatgcttctacatacgggtgagaagccccacaagtgtgagctgtgtgacttcacatgccgagacgtgagctacctatccaagcacatgctgacccactccaacaccaaggattacatgtgcactgaatgtggctatgtcaccaagtggaagcactacctccgtgtgcacatgcgaaaacatgcaggggacctcaggtatcagtgcaaccagtgctcctatcgctgtcaccgggctgatcagctgagcagccacaagctgcggcatcagggcaagtctctgatgtgtgaggtgtgtgccttcgcctgcaagcggaagtatgagctgcagaagcacatggcttcccagcaccaccctggcacaccggccccactctacccttgccactactgcagttaccagagccgccacaagcaggctgtgctgagccatgagaactgcaagcatacccgcctccgtgagttccactgtgccctctgtgactaccgcaccttcagcaacaccacactcttgttccataaacgcaaggcccatggctatgtacctggagaccaggcctggcagctccgctatgcaagccaggagccagaaggggccatgcagggcccaacacccccaccagattcagagccctcaaaccagctgtcagcccgacctgaggggccaggtcacgaacctgggactgtggtggaccccagcttggaccaggccctgccagagatgagtgaggaggtcaacactggaagacaggagggcagtgaggctccccatgggggtgacctgggtggcagtcccagcccagcagaggtggaggagggcagctgcacactacacctagaggccctgggagtagagctggagtctgtgactgagccaccccttgaggaggtcactgaaacagcccctatggagttcaggcccctgggactggaagggccagatggactggaaggaccagagctatctagctttgaaggtattgggacttctgacttgagtgctgaagaaaatccccttctggaaaagccagtgtctgagccctccacaaatcctccatccttagaggaggctcctaacaactgggtaggaaccttcaagacaactccacctgctgagacagcacccttgcccccattacctgagtcagagtcattactcaaggccctaaggagacaggacaaagaacaagcagaggcattggtgctagaggggcgggtgcagatggtagtgatccagggagaggggcgagccttccgctgcccacactgcccttttatcactcgccgggagaaggccctgaatctgcactccaggactgggtgccaaggccgccgagagcccctgctgtgccccgagtgtggggctagcttcaagcaacaacgcggcctcagcacccacctgctgaagaagtgccctgttctactcagaaagaacaagggcttgcccagaccagattcacccatccctctgcaacctgtgctcccaggtacccaggcctcagaggacacagaaagtgggaagcccccacctgcatcacaagaagcagagctactgcttccaaaagatgctcctttggagcttcccagggagccagaagaaacagaagagcctcttgccacagtctctggttccccagtccctcctgcaggaaactccttgcccacagaggcccctaagaagcactgctttgacccagtccctcctgcaggaaactcctcacccacggaggcccctaagaagcaccaccttgacccagtccctcctgcaggaaactcctcacccacagaggccctgaagaagcaccgctttgagcagggcaagtttcactgcaactcctgcccattcctttgttcccggctctcctctattacctctcacgtggctgaaggctgcagggggggacgtggcgggggaggaaaacgagggaccccccagacccagcctgatgtgtccccgttgagcaatggggactctgctcccccgaagaatgggagtacagagtccagctctggtgatggggatacagttctggttcaaaagcagaagggggctcgcttctcctgccctacatgtccctttagctgccagcaggaacgggctctgaggactcaccagatccggggctgccccctcgaggagtctggagagctgcactgcagcctctgcccattcactgctcctgctgccactgccttaaggctccaccagaagcggaggcaccccactgcagccccagcccgtgggccccggccccatctacagtgtggggactgtggcttcacctgtaaacagagccgttgcatgcagcagcaccggcggctcaagcacgagggggtgaagccccatcagtgccccttctgtgacttttcgaccaccagacggtaccggttagaggctcaccagtcccgacacacaggcattggccgcatcccctgcagctcttgcccccagacgtttggtaccaactcgaaactgcgcttgcaccggttaagggtacatgacaaaacacctacccacttctgtccactttgtgactatagtggctaccttcgccatgacatcactcgtcatgtcaacagctgccaccaaggcaccccagcctttgcctgctcccagtgtgaagcccagttcagctcagagacagcacttaagcagcatgctctgcgccgacaccccgagcctgcacagcctgcccctggctctcctgcagagaccactgagggccccctgcactgttcccgctgtgggttgctgtgccccagccctgccagcttacgaggacacacccgtaaacagcacccacggcttgagtgtggggcctgccaggaggccttccctagccgactggctctggatgagcaccggaggcagcagcatttcagccaccgctgtcagctctgtgactttgctgcccgggagcgggtgggcctggtaaagcactacctggaacagcatgaggagacttcagcagccgtggcagcctcagatggggatggggatgctggccagcccccgctacactgccccttttgtgacttcacatgccgccatcagctggtactagatcaccatgtgaaagggcatgggggcactcgtctctacaagtgcaccgattgtgcttacagcaccaagaaccgacagaagatcacctggcacagccgcatccacactggggaaaagccttaccactgtcacctctgcccctatgcctgtgctgatccctctcgtctcaagtaccacatgcggatccacaaggaggaacggaagtacctgtgccctgagtgtggctacaagtgcaagtgggtcaaccagctgaaataccacatgaccaagcatacaggactgaagccataccagtgtcccgagtgtgagtactgcaccaaccgggctgatgcactgcgtgtgcaccaggagacccggcatcgagaagcacgggctttcatgtgtgagcagtgtggcaaggccttcaagacgcgcttcctgctgcgcacccaccttcgcaagcacagtgaggccaaaccctatgtgtgcaatgtgtgccaccgtgctttccgctgggctgctggcctgcgccatcatgccctcacccacaccgaccgccaccccttcttttgccgcctctgcaactacaaggccaagcaaaagttccaggtggtcaagcacgtacgcaggcaccaccctgaccaagccgacccaaaccagggtgtgggcaaagaccccaccacccccacagtgcacctgcatgatgtgcagctggaggatcccagccctcctgctcctgccgctccccacactggacctgagggctgaaagcctgccccacctcctgtataggaagagggtatggtctgagatgtgcagactgggaccagcgctagcctgaggagctcagagcctaaggaaagactggcttttggggtacaagggtgactagaaccttcctgggactctggctatagtactttgaaattatcacccatataaaagagggacatggactataacgttgatttcttattgctgtacattgcgtttttaacctgcaagttctcagtttcttcaccatcactccatcaaagtccctggctataagatctggattttacccactccatcttctctttccttcttactgtgtcaattcctattttctttcagaatcttctaaaaacagttgtatctaaccgcatgtgctgttgtgcctaatgctctataaagcatgttaaacagaaa

SEQ ID NO: 2545 - DNA, 5744 bp, Homo Sapiens
  NM_005082
gtttcctcggcggcctcggagcgcgggtgcagcagttgtgtcccgacccctgggagcgccatggcagagctgtgccccctggccgaggagctgtcgtgctccatctgcctggagcccttcaaggagccggtcaccactccgtgcggccacaacttctgcgggtcgtgcctgaatgagacgtgggcagtccagggctcgccatacctgtgcccgcagtgccgcgccgtctaccaggcgcgaccgcagctgcacaagaacacggtgctgtgcaacgtggtggagcagttcctgcaggccgacctggcccgggagccacccgccgacgtctggacgccgcccgcccgcgcctctgcacccagcccgaatgcccaggtggcctgcgaccactgcctgaaggaggccgccgtgaagacgtgcttggtgtgcatggcctccttctgtcaggagcacctgcagccgcacttcgacagccccgccttccaggaccacccgctgcagccgcccgttcgcgacctgttgcgccgcaaatgttcccagcacaatcggctgcgggaatttttctgccccgagcacagcgagtgcatctgccacatctgcctggtggagcataagacctgctctcccgcgtccctgagccaggccagcgccgacctggaggccaccctgaggcacaaactaactgtcatgtacagtcagatcaacggggcgtcgagagcactggatgatgtgagaaacaggcagcaggatgtgcggatgactgcaaacagaaaggtggagcagctacaacaagaatacacggaaatgaaggctctcttggacgcctcagagaccacctcgacaaggaagataaaggaagaggagaagagggtcaacagcaagtttgacaccatttatcagattctcctcaagaagaagagtgagatccagaccttgaaggaggagattgaacagagcctgaccaagagggatgagttcgagtttctggagaaagcatcaaaactgcgaggaatctcaacaaagccagtctacatccccgaggtggaactgaaccacaagctgataaaaggcatccaccagagcaccatagacctcaaaaacgagctgaagcagtgcatcgggcggctccaggagcccacccccagttcaggtgaccctggagagcatgacccagcgtccacacacaaatccacacgccctgtgaagaaggtctccaaagaggaaaagaaatccaagaaacctccccctgtccctgccttacccagcaagcttcccacgtttggagccccggaacagttagtggatttaaaacaagctggcttggaggctgcagccaaagccaccagctcacatccgaactcaacatctctcaaggccaaggtgctggagaccttcctggccaagtccagacctgagctcctggagtattacattaaagtcatcctggactacaacaccgcccacaacaaagtggctctgtcagagtgctatacagtagcttctgtggctgagatgcctcagaactaccggccgcatccccagaggttcacatactgctctcaggtgctgggcctgcactgctacaagaaggggatccactactgggaggtggagctgcagaagaacaacttctgtggggtaggcatctgctacggaagcatgaaccggcagggcccagaaagcaggctcggccgcaacagcgcctcctggtgcgtggagtggttcaacaccaagatctctgcctggcacaataacgtggagaaaaccctgccctccaccaaggccacgcgggtgggcgtgcttctcaactgtgaccacggctttgtcatcttcttcgctgttgccgacaaggtccacctgatgtataagttcagggtggactttactgaggctttgtacccggctttctgggtattttctgctggtgccacactctccatctgctcccccaagtaggcaggctgtaggcacttgggctgactgcctgcagaagtcccaagaccctagtgaaaatacagcaggcagaactctccttggataattccccaagaggtcccaaggattgggagcatgggaggggagctggcgggagggtgggaggtgggatttagccaggaaaggggtgagagtgattgtgttgtgggcgaggaggcgtttccaccccctggtgcctatcagggcagggtgacctactccccattgttctggaaatctccaggctgctgggcagctgggcagagctctgggaagtgaagtcatgagtgcccgattcctcttagagaaaatccatagctactgtaggttctgtcttgggccacttggatctgaaggctgcccctttgctctctggggtagccttcagatcttggtgttttgaattcttactatagatgtttttaaagttccaaagtcattgagtttcaatgttacataaactccattacccgcatgttggggcttgatctcctggttattatctgtgcttgaggaaacacccacagcagtctctacccagaacagtttcctaaagaggcataccctcttcctccactggaaaatagtgcgttcccttcctaccctgcacacccatcgcccccacattgatggttttcaaacagcaaacttttcagctaaagcttcaaaccatgattggaatcagcctgtgttggatttgtgattcagggtcatggtgaccctgatccagtttgggtggaaatccttcctaagtatcataagaagcatcttggcagagatgctttggtggcagccatgagctttgctggaggccttgcttcccatagccttggctgtggggcaaggaactctgccaggcgagggggatgctgccctggatcaacagaagcctggtgggtttgctcgtgttagagtgtcctgccttcttactgacaactcttctcggtgatagcctctcttccctggattgtgacatatggaatgacagtgcaggtaccaccgaggctagcacagtcaagcctccagctaagctggatccctgaagcctgctatcatgcagacaggctatgcggctgcctcggaccatgctaggccacttgctggggtgtcaacctaccaccaaaggggtcttttagcaaacctcatggggaacaggaacattcctgttcatccctggccacaggctgcagacccagcactggcccttgcgtgagtcagagcctggggctggccctagccccttctactgacttcctcatttaagccaattatataagctcacattgatcagggagggagggaaagagctaaagagggtcacacaagtggctattttccctgcagtgtttctgtgtggtgaaaataacccagtccactaaggggcgggagtgaatggatggctggattttccccaagctccttatagcctaatgttgtcaggatgtgagtatgaggaatttagcctcttatagtgaaatgagtccaactctgggctttgcttagaggagagctcctgtcaggcttcctataatatgaaaagaagtcaccattggggaactagagaccccagaccttttcatatggatatttgagaatgtaatgcatctcaggcctcgtgctggaactctagggcactctaggcaggctcagaacacttgatattcctgacagctacacacctgacatgcaggtacatacctgatcggtgtcatctcctaacaaggattttcagttcctcgggagagcaataatctttgtaggaaagacatccctgcaataggtgatatgtggtccttagaagttttattcctttactacttggaagaaaagttctttggtgattcttctctgcttttgaagatgatcaaaagcatcttcattgattttctgaaacgaaagccttgtctgaaaccaattaatacttgggaaacagctgggcttggaggagtagaatgccagagataaatccatggctcctgctctggctctcttctgcagaaatgagggcaacagtgaggccacttccctggcaaatgtgcagctcaggatagggaagcataagaccctctgtttaaaagagagtcaagtaggtaaccaaagccaagctctgtgcaaggtgctttggagttgtaaattgaggagtgcatccttgctgtcttgaaccattctgtttgcaatggtgagaccttacataacctagccttgcagggccgccacacaaccctggagtcctagagttggaggaacctttgtatccatctgacttctcattttgcagaatatgatgagaaagtagaggatcgctctgttcaccactcttgctattccattagtggggagatgcctgctagcatgtgtgaggggaacactctgatacactgggaagtatcggaaattcccagaaacacaaacataaaataactctcctagacccaggtactggggactgtctcagtccgtgtggcatgataaataaaaggttaggatcaagtctttgtatttttcaagatgtggtagctgattattcctgttttaagtactctgaaattgatctgtgatcaataatactaatatgttatcttttaccgtattctgcctctcactattgattttaattagttaggagtatttgagctgttatttcttgagcttaatatttttttagagttaactctttaaggagataatcatggctgtagacaaggccagggctggctgacgtgccttagaaggtttgaatgcaataaagcggtgtttggcgttctcctgcattgtagtgcgggtacaaaatgctatttgttcgtcatactgttgtcagcagatgagccgcccactacagacggctactgcccagggacctgcccaggccccacccaagggctcccaagggttgagatttctgcagacctatagccagcacacttagtcctgccctatatagagttcctcttcgggaagcttttgataaggaattctcagaccgataggatgtctgtctgggctttgctgcgggacagtctaactgtgggggctaggggaaagcaggagagtatcgatcaaagagtaagccacacacggataatcagttactagggatggaggtgtgagggttcattatattattcattttactgttgtatatgtttgaaaatgtctataataaaaagctttaaaaaaaaaaaagaaacaaaaatagttcaggccagcaatgggccctccatgttcagtggattttatccttgtttcaattggggtaggagttccaggaggtgtggattggaggttgtctaaagaattgaactggcctttgtccctgcttcctgggagggagactttcagtccttgacatttccagggtaataggagtgtctttgttatttgtgaggccatgggatcacacctgagcttatgctaaaaggtgggatgactcagagctggggctggtcaccagacagactgaccatgtgattagaggtttgaggctttgagtcagcctgacctatggggcgggggactggaggctgagtttaatcatctggccagtgctttaatcagtacatcatgaaaccctaataaaaactctggacactaaagctcagcatagcttcctgggtggtgaagctgtggctatgccggcagggcagtgtgccctaattccacgaagagggggcatgggagcactgtgctcaagacccttccagacctttccctgtgtcttccttggcttgtggagctgatttgtatcctttataataaaactaatcataagtata

SEQ ID NO: 2546 - DNA, 1880 bp, Homo Sapiens
  NM_005084
gggtcggggccacaaggccgcgctaggcggacccaggacacagcccgcgcgcagcccacccgcccgccgcctgccagagctgctcggcccgcagccagggggacagcggctggtcggaggctcgcagtgctgtcggcgagaagcagtcgggtttggagcgcttgggtcgcgttggtgcgcggtggaacgcgcccagggaccccagttcccgcgagcagctccgcgccgcgcctgagagactaagctgaaactgctgctcagctcccaagatggtgccacccaaattgcatgtgcttttctgcctctgcggctgcctggctgtggtttatccttttgactggcaatacataaatcctgttgcccatatgaaatcatcagcatgggtcaacaaaatacaagtactgatggctgctgcaagctttggccaaactaaaatcccccggggaaatgggccttattccgttggttgtacagacttaatgtttgatcacactaataagggcaccttcttgcgtttatattatccatcccaagataatgatcgccttgacaccctttggatcccaaataaagaatatttttggggtcttagcaaatttcttggaacacactggcttatgggcaacattttgaggttactctttggttcaatgacaactcctgcaaactggaattcccctctgaggcctggtgaaaaatatccacttgttgttttttctcatggtcttggggcattcaggacactttattctgctattggcattgacctggcatctcatgggtttatagttgctgctgtagaacacagagatagatctgcatctgcaacttactatttcaaggaccaatctgctgcagaaataggggacaagtcttggctctaccttagaaccctgaaacaagaggaggagacacatatacgaaatgagcaggtacggcaaagagcaaaagaatgttcccaagctctcagtctgattcttgacattgatcatggaaagccagtgaagaatgcattagatttaaagtttgatatggaacaactgaaggactctattgatagggaaaaaatagcagtaattggacattcttttggtggagcaacggttattcagactcttagtgaagatcagagattcagatgtggtattgccctggatgcatggatgtttccactgggtgatgaagtatattccagaattcctcagcccctcttttttatcaactctgaatatttccaatatcctgctaatatcataaaaatgaaaaaatgctactcacctgataaagaaagaaagatgattacaatcaggggttcagtccaccagaattttgctgacttcacttttgcaactggcaaaataattggacacatgctcaaattaaagggagacatagattcaaatgtagctattgatcttagcaacaaagcttcattagcattcttacaaaagcatttaggacttcataaagattttgatcagtgggactgcttgattgaaggagatgatgagaatcttattccagggaccaacattaacacaaccaatcaacacatcatgttacagaactcttcaggaatagagaaatacaattaggattaaaataggttttttaaaagtcttgtttcaaaactgtctaaaattatgtgtgtgtgtgtgtgtgtgtgtgtgtgtgtgagagagagagagagagagagagagagagagagagagaattttaatgtattttcccaaaggactcatattttaaaatgtaggctatactgtaatcgtgattgaagcttggactaagaattttttccctttagatgtaaagaaagaatacagtatacaatattcaaaaaaaaaaaaaaaaaaaaaaaaaaaaaaaaaaaaaaaaaa

SEQ ID NO: 2547 - DNA, 6614 bp, Homo Sapiens
  NM_005085
ctgcgcgccgctggcgctgaggggaggaagtttgctgtcgagcggcctgggttccgtgggcaaggccgtgggaggcagcgttggctgcttcgacacactgagggcggcgcgatgggagacgagatggatgccatgattcccgagcgggagatgaaggattttcagtttagagcgctaaagaaggtgagaatctttgactcccctgaggaattgcccaaggaacgctcgagtctgcttgctgtgtccaacaaatatggtctggtcttcgctggtggagccagtggcttgcagatttttcctactaaaaatcttcttattcaaaataaacccggagatgatcccaacaaaatagttgataaagtccaaggcttgctagttcctatgaaattcccaatccatcacctggccttgagctgtgataacctcacactctctgcgtgcatgatgtccagtgaatatggttccattattgctttttttgatgttcgcacattctcaaatgaggctaaacagcaaaaacgcccatttgcctatcataagcttttgaaagatgcaggaggcatggtgattgatatgaagtggaaccccactgtcccctccatggtggcagtttgtctggctgatggtagtattgctgtcctgcaagtcacggaaacagtgaaagtatgtgcaactcttccttccacggtagcagtaacctctgtgtgctggagccccaaaggaaagcagctggcagtgggaaaacagaatggaactgtggtccagtatcttcctactttgcaggaaaaaaaagtcattccttgtcctccgttttatgagtcagatcatcctgtcagagttctggatgtgctgtggattggtacctacgtcttcgccatagtgtatgctgctgcagatgggaccctggaaacgtctccagatgtggtgatggctctactaccgaaaaaagaagaaaagcacccagagatatttgtgaactttatggagccctgttatggcagctgcacggagagacagcatcattactacctcagttacattgaggaatgggatttagtgctggcagcatctgcggcttcaacagaagttagtatccttgctcgacaaagtgatcagattaattgggaatcttggctactggaggattctagtcgagctgaattgcctgtgacagacaagagtgatgactccttgcccatgggagttgtcgtagactatacaaaccaagtggaaatcaccatcagtgatgaaaagactcttcctcctgctccagttctcatgttactttcaacagatggtgtgctttgtccattttatatgattaatcaaaatcctggggttaagtctctcatcaaaacaccagagcgactttcattagaaggagagcgacagcccaagtcaccaggaagtactcccactaccccaacctcctctcaagccccacagaaactggatgcttctgcagctgcagcccctgcctctctgccaccttcatcacctgctgctcccattgccactttttctttgcttcctgctggtggagcccccactgtgttctcctttggttcttcatctttgaagtcatctgctacggtcactggggagcccccttcatattccagtggctccgacagctccaaagcagccccaggccctggcccatcaaccttctcttttgttcccccttctaaagcctccctagcccccacccctgcagcgtctcctgtggctccatcagctgcttcattctcctttggatcatctggttttaagcctaccctggaaagcacaccagtgccaagtgtgtctgctccaaatatagcaatgaagccctccttcccaccctcaacctctgctgtcaaagtcaaccttagtgaaaagtttactgctgcagctacctctactcctgttagtagctcccagagcgcacccccgatgtcgccattctcttctgcctccaagccagctgcttctggaccactcagccaccccacacctctctcagcaccacctagttccgtgccattgaagtcctcagtcttgccctcaccatcaggacgatctgctcagggcagttcaagcccagtgccctcaatggtacagaaatcacccaggataacccctccagcggcaaagccaggctctccccaggcaaagtcacttcagcctgctgttgcagaaaagcagggacatcagtggaaagattcagatcctgtaatggctggaattggggaggagattgcacactttcagaaggagttggaagagttaaaagcccgaacttccaaagcctgtttccaagtgggcacttctgaggagatgaagatgctgcgaacagaatcagatgacttgcatacctttcttttggagattaaagagaccacagagtcgcttcatggagatataagtagcctgaaaacaactttacttgagggctttgctggtgttgaggaagccagagaacaaaatgaaagaaatcgtgactctggttatctgcatttgctttataaaagaccactggatcccaagagtgaagctcagcttcaggaaattcggcgccttcatcagtatgtgaaatttgctgtccaagatgtgaatgatgttctagacttggagtgggatcagcatctggaacaaaagaaaaaacaaaggcacctgcttgtgccagagcgagagacactgtttaacaccctagccaacaatcgggaaatcatcaaccaacagaggaagaggctgaatcacctggtggatagtcttcagcagctccgcctttacaaacagacttccctgtggagcctgtcctcggctgttccttcccagagcagcattcacagttttgacagtgacctggaaagcctgtgcaatgctttgttgaaaaccaccatagaatctcacaccaaatccttgcccaaagtaccagccaaactgtcccccatgaaacaggcacaactgagaaacttcttggccaagaggaagaccccaccagtgagatccactgctccagccagcctgtctcgatcagcctttctgtctcagagatattatgaagacttggatgaagtcagctcaacgtcatctgtctcccagtctctggagagtgaagatgcacggacgtcctgtaaagatgacgaggcagtggttcaggcccctcggcacgcccccgtggttcgcactccttccatccagcccagtctcttgccccatgcagcaccttttgctaaatctcacctggttcatggttcttcacctggtgtgatgggaacttcagtggctacatctgctagcaaaattattcctcaaggggccgatagcacaatgcttgccacgaaaaccgtgaaacatggtgcacctagtccttcccaccccatctcagccccgcaggcagctgccgcagcagcactcaggcggcagatggccagtcaggcaccagctgtaaacactttgactgaatcaacgttgaagaatgtccctcaagtggtaaatgtgcaggaattgaagaataaccctgcaaccccttctacagccatgggttcttcagtgccctactccacagccaaaacacctcacccagtgttgaccccagtggctgctaaccaagccaagcaggggtctctaataaattcccttaagccatctgggcctacaccagcatccggtcagttatcatctggtgacaaagcttcagggacagccaagatagaaacagctgtgacttcaaccccatctgcttctgggcagttcagcaagcctttctcattttctccatcagggactggctttaattttgggataatcacaccaacaccgtcttctaatttcactgctgcacaaggggcaacaccctccactaaagagtcaagccagccggacgcattctcatctggtgggggaagcaaaccttcttatgaggccattcctgaaagctcacctccctcaggaatcacatccgcatcaaacaccaccccaggagaacctgccgcatctagcagcagacctgtggcaccttctggaactgctctttccaccacctctagtaagctggaaaccccaccgtccaagctgggagagcttctgtttccaagttctttggctggagagactctgggaagtttttcaggactgcgggttggccaagcagatgattctacaaaaccaaccaataaggcttcatccacaagcctaactagtacccagccaaccaagacgtcaggcgtgccctcagggtttaattttactgcccccccggtgttagggaagcacacggagccccctgtgacatcctctgcaaccaccacctcagtagcaccaccagcagccaccagcacttcctcaactgccgtttttggcagtctgccagtcaccagtgcaggatcctctggggtcatcagttttggtgggacatctctaagtgctggcaagactagtttttcatttggaagccaacagaccaatagcacagtgcccccatctgccccaccaccaactacagctgccactccccttccaacatcattccccacattgtcatttggtagcctcctgagttcagcaactaccccctccctgcctatgtccgctggcagaagcacagaagaggccacttcatcagctttgcctgagaagccaggtgacagtgaggtctcagcatcagcagcctcacttctagaggagcaacagtcagcccagcttccccaggctcctccgcaaacttctgactctgttaaaaaagaacctgttcttgcccagcctgcagtcagcaactctggcactgcagcatctagtactagtcttgtagcactttctgcagaggctaccccagccaccacgggggtccctgatgccaggacggaggcagtaccacctgcttcctccttttctgtgcctgggcagactgctgtcacagcagctgctatctcaagtgcaggccctgtggccgtcgaaacatcaagtacccccatagcctccagcaccacgtccattgttgctcccggcccatctgcagaggcagcagcatttggtaccgtcacttctggctcatccgtctttgctcagcctcctgctgccagttctagctcagctttcaaccagctcaccaacaacacagccactgccccctctgccacgcccgtgtttgggcaagtggcagccagcaccgcaccaagtctgtttgggcagcagactggtagcacagccagcacagcagctgccacaccacaggtcagcagctcagggtttagcagcccagcttttggtaccacagccccaggggtctttggacagacaaccttcgggcaggcctcagtctttgggcagtcggcgagcagtgctgcaagtgtcttttccttcagtcagcctgggttcagttccgtgcctgccttcggtcagcctgcttcctccactcccacatccaccagtggaagtgtctttggtgccgcctcaagtaccagtagctccagttccttctcatttggacagtcttctcccaacacaggaggggggctgtttggccaaagcaacgctcctgcttttgggcagagtcctggctttggacagggaggctctgtctttggtggtacctcagctgccaccacaacagcagcaacctctgggttcagcttttgccaagcttcaggttttgggtctagtaatactggttctgtgtttggtcaagcagccagtactggtggaatagtctttggccagcaatcatcctcttccagtggtagcgtgtttgggtctggaaacactggaagagggggaggtttcttcagtggccttggaggaaaacccagtcaggatgcagccaacaaaaacccattcagctcggccagtgggggctttggatccacagctacctcaaatacctctaacctatttggaaacagtggggccaagacatttggtggatttgccagctcgtcgtttggagagcagaaacccactggcactttcagctctggaggaggaagtgtggcatcccaaggctttgggttttcctctccaaacaaaacaggtggcttcggtgctgctccagtgtttggcagccctcctacttttgggggatcccctgggtttggaggggtgccagcattcggttcagccccagcctttacaagccctctgggctcgacgggaggcaaagtgttcggagagggcactgcagctgccagcgcaggaggattcgggtttgggagcagcagcaacaccacatccttcggcacgctcgcgagtcagaatgcccccactttcggatcactgtcccaacagacttctggttttgggacccagagtagcggattctctggttttggatcaggcacaggagggttcagctttgggtcaaataactcgtctgtccagggttttggtggctggcgaagctgagggcgtgtcagcaggcctttcgatccctgggaccaaccgcatcctcagcttcttccccgagaaatgctggagcaggctgttcagaccgacgttgccatcaaaacacatacacccagaaagaaacaacagaaaccaaaactcacaaggcgcatgattacttgttttatatttcatgttgggttttccctcccactattaaacagtctgtttccgtacaaaaaaaaaaaaaa

SEQ ID NO: 2548 - DNA, 4547 bp, Homo Sapiens
  NM_005086
ataattcgaataccagggcaggccgagccagccgtgcgccgcgctccagggcccagggcgccgcacacgcacccacccacccacccagcctcgcagcgccatgggcaagaacaagcagccacgcggccagcagaggcaggggggcccgccggccgcggacgccgctgggcccgacgacatggagccgaagaagggcacgggggcccccaaggagtgcggggaggaggagccccggacctgctgcggctgccggttcccgctgctgctcgccctgctgcagctggccctgggcatcgccgtgaccgtggtgggcttcctcatggcgagcatcagctcctccctgctagtcagggacactccattttgggctgggatcattgtctgcttagtggcctatcttggcttgtttatgctttgtgtctcatatcaggttgacgaacggacatgtattcaattttctatgaaactgttatactttctgctgagtgccctgggcctgacggtctgtgtgctggccgtggcctttgccgcccaccactattcgcagctcacacagtttacctgtgagaccacactcgactcttgccagtgcaaactgccctcctcggagccgctcagcaggacctttgtttaccgggatgtgacggactgtaccagcgtcactggcactttcaaactgttcttactcatccagatgattcttaatttggtctgcggccttgtgtgcttgttggcctgctttgtgatgtggaaacataggtaccaggtcttctatgtgggtgtcaggatatgctccctcacggcttccgaaggcccccagcaaaagatctaacattcttgctcaaagttgcgagagaaagtagcacatggagtagctgaggttaaacaaacaaaaaaaaattttaaacaaagaaaggaaaaaaattgacaataaaagtcactcttctaattgaatatttttatatttttatgaaacaaaagagcatttcttcaggtttctattgtattttttttaacattcttgcagagaaagcaagatccaaattgattttgggatattaaaagttaacagaacactgaacaaggaaagaatggcatagatctatctttacagtctggagttaattcctgttaactcattttatccattccttacataatcttctttcctgttagtccagtttgatggtgtgaatggtgaatttcaggcccagttgctaaattttgtggcatcttcctctagtccttcccacctccagtcatcagccccactctgtcttggagacaggcaggaggtgggggaagagctgaatctctttattttccctggtagagacatcttcaaggcatgaaatagcttaaagagcagagtagaaacggaagaggctttgcaaaaggctagataactaacaacacctgggttggggcggcggcctcttctcttcagctcccttagcttggctccgtaagtggatcacttgccaaatgctttagatgattgcctctcaataattgaaaggtggtggtagttgtattctaaatgatgtagaaggtttaaaaataattacattatgcttctattctatcatctaaaacaaatcattaaaactaatttctagctaattgttaattataattatgctcagaagtctatttaatgagctctgactgtacttacgctgcactgtcggtgttaagagaaattactctcacaagagcagaggcctgaagattctttcttctgaaagccaagcaccacaaggaaaaaaaaaattattaatagctcaggttaaaaacacccatttaaacaaaaacaagagcatttgtaataggaagtgtttatacaaacagcacatttgtgatatgttgaaaagcatctctcttggcaaccaatctatgtttgaggaagattgggtaatgctgatgtgttccattcatgaaactgtatttgatacataatcctattattaattcgtatgcttagtcaacctaggaaatcaaaataatgttttgaagttcttatttgagcaatatggccttgacttggagggtagttttagttgttttgtttttaagtgactgtggtttaaagcacaaatgccccaaggtggggagacttctctctgtgattattgttgctattaaattctgaactgtatccatattttaaggaaggagctaaaaatggaaattcatgaaacataaatggtatcaagaactttatcagtatgctttgttgaaagcagaaattaagataataattgagttcaattcgcctctccgcattgcctattgatacactttactaatcatgaaattctaacctaaaaggaaaacattttcctgcttgtcttagaagaaagtggaataattccactgattgtgataatggtttcaatttctacacaatataaatatccagtataaaggaaagcgttaagtcggtaagctagaggattgtaaatatcttttatgtcctctagataaaacacccgattaacagatgttaaaccttttaatgttttgatttgctttaaaaatggccttcctacacattagctccagctaaaaagacacattggagagcttagaggataagtctctggagcagaatttatcacacacaaaagttacaccaacagaataccaagcagaatgatgaggacctgtaaaataccttgtgccctattaaaaaaaaaaaaaaaaaaaaagccagtaactgaatccattttgatttttggttgagtttcctacacaaagaagaaaataactgagaatctggaatgttgtagtccatcctttaaagagtaagaaagtagcagttaatgctagtaaccgtgaattaggcaccactgaaagcacatcccgaatttctttaacaacaacattttatagtgaacactacaagtttttatatttaaaaattaagactctgtatatccttaaggtgctctatgctttaccagtaattcacagggtatttcaaatggtagaatcattttagcttctgtgcttcctttttctaaataatgcaacttgtaagagttgacattgtaataagctttataatagtataaccgtcaggagatatatatatatatatatacacatacacacacacacacacatatatactatacatatataaaatggggatattactattgtatgattaaatcattcttaagtccccaaggaaaaaaaatcataaacaaatagaaagaactaaacagaaaagaaagaaagaaaagatccctttgctatgagctcgctgtatattgataagtgtaagaattgtgttgcatgaataaccgctttgggctggatttgaagtattttgatgttgtgttttgcaaatattgaagttacaataatggcaacagaaaaggaacagatacacagctttacacttagcagaatgttacatttaaaatctgacaaggcgccaagatggtgactgtctcctctaaaccacgaaagagtaagatttgtgcaaccctcctcctcttccacctccttcaggagaattaaatgaatcaagactttggaaagacggggaagagccgggacttggcagtacttgaaacaggaggaatacaccagcctaaatgtacagactttgtagccgagcccactcgatcggtctgtgccttcacgtgaccaccatctgtgcctccctcgctccatccaaatttgtgtaggctgctccttggagctatgcctaaaatatagctacaccagagccctggaaactgtagtcaagtaacaggcctcactgttttttttctttggattaaaagtgtatatctctctactgaggggtttccagctttacacttctataggttgttctgacagtgagaacacattatgtacatgttttctattcatgtccagggcatgagaatcttaatattcttatacttccctttttgcatgcagtatgtctggaatatgtttataaaattttagcaaggggtgagatcaagggacaaaggtagagtggttatttaaagacaatcagaaatgaacttaaaagctgccctgcaaaaccaatcctttcctatcatgaagagtaccttcatattttctagagattgtctctgaaccgttgctacatagccataaatttctgtaaatcatgttggctatcagttcttgctattctcagagcactctatcatgtttttaggtgtatattgtgtattcaggatagcattaaaaagaactgatggcaaatgtattgactcacagtggaaacattcatttggatgaagaattagtggtttagcctttgaaatgaataccttgaatcatttcttctgattttctagtagtttattatctcaaatgattattatccccttcaaaaatactggtctgtactttggtgttgtggtttcatttttctggcattgatcaaatagcaaatacaaaataaagcatttctacatgtttgaggtggttgtttttaaaggggatatgtgtaatgcagattttctttattaataaaattttcataatctctgaaaaaaaaaaaaaaaaaa

SEQ ID NO: 2549 - DNA, 8567 bp, Homo Sapiens
  NM_005087
aggcaaatccgacgtagacggcggcaggcggagcccaaagccggtgatgcagggtgcgcagggatcccacctggagagtcggggcggcacgttgagaccccaggggtgaagggcgggggatcccaatcccagccctgttttcccctcccctttccccgcctccttctcgcccctcccccctcctcccctctggttggaaagtttctagaatctcttcccagcggcctttgcggttccaacatggcggagctgacggtggaggttcgcggctctaacggggctttctacaagggatttatcaaagatgttcatgaagactcccttacagttgtttttgaaaataattggcaaccagaacgccaggttccatttaatgaagttagattaccaccaccacctgatataaaaaaagaaattagtgaaggagatgaagtagaggtatattcaagagcaaatgaccaagagccatgtgggtggtggttggctaaagttcggatgatgaaaggagaattttatgtcattgaatatgctgcttgtgacgctacttacaatgaaatagtcacatttgaacgacttcggcctgtcaatcaaaataaaactgtcaaaaaaaataccttctttaaatgcacagtggatgttcctgaggatttgagagaggcgtgtgctaatgaaaatgcacataaagattttaagaaagcagtaggagcatgcagaattttttaccatccagaaacaacacagctaatgatactgtctgccagtgaagcaactgtgaagagagtaaacatcttaagtgacatgcatttgcgaagtattcgtacgaagttgatgcttatgtccagaaatgaagaggccactaagcatttagaatgcacaaaacaacttgcagcagcttttcatgaggaatttgttgtgagagaagatttaatgggcctggcaataggaacacatggtagtaacatccagcaagctaggaaggttcctggagttaccgccattgagctagatgaagatactggaacattcagaatctacggagagagtgctgatgctgtaaaaaaggctagaggtttcttggaatttgtggaggattttattcaggttcctaggaatctcgttggaaaagtaattggaaaaaatggcaaagttattcaagaaatagtggacaaatctggtgtggttcgagtgagaattgaaggggacaatgaaaataaattacccagagaagacggtatggttccatttgtatttgttggcactaaagaaagcattggaaatgtgcaggttcttctagagtatcatattgcctatctaaaggaagtagaacagctaagaatggaacgcctacagattgatgaacagctgcgacagattggttctaggtcttatagcggaagaggcagaggtcgtcggggacctaattacacctccggttatggtacaaattctgagctgtctaacccctctgaaacggaatctgagcgtaaagacgagctgagtgattggtcattggcaggagaagatgatcgagacagccgacatcagcgtgacagcaggagacgcccaggaggaagaggcagaagtgtttcagggggtcgaggtcgtggtggaccacgtggtggcaaatcctccatcagttctgtgctcaaagatccagacagcaatccatacagcttacttgataatacagaatcagatcagactgcagacactgatgccagcgaatctcatcacagtactaaccgtcgtaggcggtctcgtagacgaaggactgatgaagatgctgttctgatggatggaatgactgaatctgatacagcttcagttaatgaaaatgggctagtcacagttgcagattatatttctagagctgagtctcagagcagacaaagaaacctcccaagggaaactttggctaaaaacaagaaagaaatggcaaaagatgtgattgaagagcatggtccttcagaaaaggcaataaacggcccaactagtgcttctggcgatgacatttctaagctacagcgtactccaggagaagaaaagattaataccttaaaagaagaaaacactcaagaagcagcagtcctgaatggtgtttcataaactgaagaagttcctagtttacagttcttttacattacatttacaatagtgcttgtacaagcttgccaaagatagaatatggatcgccagtctttacatcgcactttcagttcctccatttggaattcaaaaaggggagggatcctgaagaaatcatatgttaaacatactttgacacctactgtgttataaaatatatcatcagatgtgccttgagaatagtatatgtaacattaaaaaaaagttgctggctataggaaatgttattttgttttcaaaatatggcagagatggggggtggtgggtggggtgggatccctaacgtaatattctttatgaaagcattagctgcttttgttacatttttaatatgcaaccacttcttcacctgaggaaaactagaatgaaatgcagtctaaaatattttgcactgaattgtaatttcttcattagtttagtctggaaactggtctgttttaatgtgttttttaaatgctgtatgtagaggaaaatctgcagaccactggaatacatttgttaaactctcatctgcagggacactgggcgatacttggcagtgactgttctaccttgaggctttgtttggtttatttattaaagtgtacagtatttaaaaatcaaacatagctttagttaaaacactaagctgaattagtcatgtccattcagacataacctgaactactgaaaagatcaatttccagaaggtttattctgtataaactacatgttagtcttcagtagagtatcttttttttttccttttttttttttttatttcggttgtttgatgtgcaatatgtttttgtatgcaggtagtaaataaactttgatcttccatttgctgaatttttttaactttctactttttacaccaattgttgcaaaatagttggagctattaataggcttaggatagtatactttgctttttaaaaagcatttatacttgctcataaatagcattaaaatgtcagttggccatttaatcattttgtaatgaatcatctgaaatctttacacaagtttaggctgttagatgcataggtaattaataatacatgtgataattagcaaaaaaacctaacaaaattctaatcaaaggcaactttggaagacaatgggggatagaagggatgacaagcaatttttaaataataggccaatgatttgctttattcattctcaacttattttgaaggctctcatatcagtgaccaaaaatcagttattaaactttatgtatatattttagccagagcttaatttttatgaagataaagacatgaagtttaacaatggacaacagttagtacagctaattgtgaggtcaagtaattgttagacataggggaaggctttgttccacaatattatatggaccactgaacaagaatgacagccctttgttatcacttggcatatgaaaagtgttgtgtgcatagtttgtgttaattttttatgtgcataaaaatgtgattttaatttatatgctctgaaggataattcagggtatagttaaaaatgtacaatgtgccagttcagtatatataaccctagccctcaaattattctgattaaggttaaaatgtgctggtattacgtgctttttcctgaggccttctgattggttcttggtaacagaattttaaagtaaggtgtgagtagtgcaactcctgtcctttatatataaagatatcaagtaatttcatgtcctgatatttaaaaaaattacccacaaatgtgtttttttaaatcgatcaaagctagcaacaggttaaattgtctcagttctcttacataattgggttaaaaattataaggtattagaagaattttaattaatgccaaattggtaaatatggtgtaaaaaaaaaaaaaaagacttttcattttctcccacatagaatagtcagatatattaaacatcccttttccataaagatggtttcaatgggaatggaagaaacaaaatcttaaaagagtgagtatagctgaaccaattcttcattctagcaataaccacactaagttcattactttacaaatgactaaacccaatgtcttgtcctttaaaaaatataggtagtgcagaattgtgataaatacgcatttgtttttttagagagccccactccccaaagggtagccattaattcaggtagccttttaaatgtatttgagagggttccgtctttttggctgctatcctagttaggtgagatgttgctatgggaagaacttgccactatacactaaacagacacttaagcaaaagatgtattctggagcctggcacagtagcttatgtctttggttctagctactcaggagcctgaggtgggagcatcatttgaactcagttctgggccactgagaccctctttaaagagaaggaaaaaaaggtattctggaagatcttgtgcagttgcaacaatgtttcagcatatatatgtgaattcatatatgacacctgaacggaatcatgaagtaacagctgagattatatggtggcaaaaatgacctgcttttcctgaagctttgggaggcctaggattcttgctttaggcatcacctttgttaagccttaaagggggctacaacttgtgcaaaatggtgtctctggtaacacttcagaaataattggcaaaagtgtaataggaatacacaaatctttattttgaaataatcttgtattttaatgtggaattagaagcagcacatcaaactggtgagttcacagaaacttacctgagatgatgctgggttccattgctgttgtgctaagtcacgtatttttgtagctgctgttagctgtgtctagcgttttgtaacctaaggagggtcttatagaagttggtatgttaactaaatcttggactgggaaacagcaccatttgtatcctctgcaaacagatttacgcttttgaggctcaaaccaactagtgttctcatgggctgttgcctaaggacagataaacatggaaaacaggctatgtccagggacagatgattggtggttaagaattacagtaaaggaaaattacacctggattttcttctgtaaagtttcaaggaacttggatttgaactgtgaatctactgttttggcaaaaaatctcaaagaaaaggatgtttgttactgtctcagtcttcctgtctttgctacacgatttggatcccttacgctttttcgttaagaatatctgtctgctatagtgaatttgctagccccttatttttttttttaattttagttctttattagaacgtgtacttgaatggactgtagttgctcataacccatgttaatctctgatagtatttgggttttatttcaggagcttttgcaataaagcagtaactgcaatctgctaaagtcagactgttagcaagtggtgttaaaactgatttaagtccattacactgaacagtaggaaattaccacttttgtaaggctcaaaaatgatcaactattaacagtttcttatggttcagtctaattacaaatttttaaaaagtttatcagtgtatcatttcagattcatctgtatcttctgtaatattatttccagtactgaggtaaggtacacaaaaattcccctggaaaaactatattctagttttgtaagatgatttcccacagtccatttgcttatttcttcctttgataattcaaaaagatgctttaggtaatggtacagaattagaagctgctattttagctctattaactttttctctatggtttcaattttatccaaccagagagggctggcctagttggtatctttaaggcccttccagtagtaatttgagtctagtcacatgtcagaccctgagcaacacctaaccaaatgcccaagtattctcataaggagtatgctgaatttaagtggtgtttgttttacatatgtatccatcccagacattttcaactatgctgaatgcaatctataagatattccaaacaaggacaaagtaatttttcacaagtcttacagccccactattaagtatgctactaattagcttcttgaatttctttgtatttcagtgattgggatgttctttttttttgggaaagtttttttacccctttgtaccctcttaattggattaactgtaaaatgtacatattaattttctagttttagagaccattttcattaaaaatattttccaatagtttttctagataaacaatttatacttaattgttgcttggttgcttacatttcaacctctaggcttcctttttcagctaacttggctgtcttcaggttgtaaagaaaaatgtaaacatatatttgaaatttcattaactgaaactgctgtaaggtgttagcaaatgttaaccataacagattatcccatatcattggactgttctattattgggtcaggaataataggtgacacaggatagaagctcttcctatatatatcttgttgctaaggcagtagttggctctaagctgataaacagcacactgtacagcagtccaaaaactaaaaccagagcttaggtcattcaagttaactggtactcaaggttactcattccaggatactttacataaccaaaaacctaggagagcattctacattgtaattttttttttactttgtttacataaaatttacagggttttgtttttttaagcttagtctgttctttgacattgttgattcatgttctaaattttcatcagatttaacatgtttggaggttcttgtgcactcaatgtgaacctactacaagcttctgaactgcaaaaccttttttttaggtcactgtcaacagaaagatgccttatagaatttctcatgattgaaacagaactctgcattctaacctaaaacccctctaaccctttaaatgaagcattatgcctgcgtgaaattttatttttagacatttctgatactaggttttctttacgggggggcatacatattcagtatactgaatttatacagctttcagtgtggcaatatattaagaagctagttccctaatttttctcagttctcattggttttccatttaaatgtttccgtaagtactctcatcatttggaaaatacttgatggcaggagaacttgcttaaaactaaaggtggagaaagagttaacttccaggacaacccattatagctcacttcttaccaacaaagcagtttttatacagcaccttaggactcatttctaatgtcaacccagatggccagtaaaggcaagggaagaggctaagtgactcacaaaaatctctgatattgaggtctaatgtgaaggctatagataggaattccccacaaacttctaatgaggactaatatgaacagcaaattggagaagacaccaaggacctaattttagtttcactagccgtgggaccttagaaaaaagaccatttgctctggacttttgtttcccaagccataaaatgtggaagaatcttcacaatttcaagttggtcatgtatatttcccttttacagagaaagctgaagcctcgaggctcagatttacctggcttctgtttacctggcttctgcagaagtttaacttgtaacctacctctcattcccaaagtgtgtttaatcatgccgccttctttaaaatatatctggaagcaccaatgagtaaagacaaaggccccaagctagatctgtagagataagtactagactcacatctcagtactatcaaggaaaacatgcttaggttatcagaattgtgaaggccatagtacaaaaagttaagagaacggaactcaggatctgagaaagatcagccattctcagcatgttgccttggctgcttaaccttactaaacttccatttcctcacatgtaaaatgtacatcataataactagtctactgagataagggaagaatacttagcacagtgctagtacactgtaagtactcaaatgttacagatccaagtattttgtaagaaaataccagcaaaagataaaagtttttttatggatcgtatttgtatcaatcacctacatgatctagagccctcacatggataacatttaaatgttcagtttgcctaatagccttcaatgaaacacggattcttctacttaaaaaaggtaagcctggagaaaataaaactgattactatgcaagaaaaaaatgtgctctgctgtgctccttggtatttttaagtggtttccattgtcttaacacctgtcttaaaacgggtatgttgtttgcactgaaccctcaaaagtatttatacctattaagttaaatttccctttttagagttaatgcttcattgcctgtcggcatattatcactatctgtctttgaaaaattttcttttaagtctcaactatttcttcataaagctcttgttcagagaaacattttttgatttgtccaatggactgaaataaaaggttagtaaaccaaaa

SEQ ID NO: 2550 - DNA, 1512 bp, Homo Sapiens
  NM_005089
cgccctttcctgccagacctggaggggcggggcggtgccggcaagatggctgcgcccgagaagatgacgtttcccgagaaaccaagccacaaaaagtacagggccgccctgaagaaggagaaacgaaagaaacgtcggcaggaacttgctcgactgagagactcaggactctcacagaaggaggaagaggaggacacttttattgaagaacaacaactagaagaagagaagctattggaaagagagaggcaaagattacatgaggagtggttgctaagagagcagaaggcacaagaagaattcagaataaagaaggaaaaggaagaggcggctaaaaaacggcaagaagaacaagagagaaagttaaaggaacaatgggaagaacagcagaggaaagagagagaagaggaggagcagaaacgacaggagaagaaagaaaaagaggaagctttgcagaagatgctggatcaggctgaaaatgagttggaaaatggtaccacatggcaaaacccagaaccacccgtggatttcagagtaatggagaaggatcgagctaattgtcccttctacagtaaaacaggagcttgcagatttggagatagatgttcacgtaaacataatttcccaacatccagtcctacccttcttattaagagcatgtttacgacgtttggaatggagcagtgcaggagggatgactatgaccctgacgcaagcctggagtacagcgaggaagaaacctaccaacagttcctagacttctatgaggatgtgttgcccgagttcaagaacgtggggaaagtgattcagttcaaggtcagctgcaatttggaacctcacctgaggggcaatgtatatgttcagtaccagtcggaagaagaatgccaagcagccctttctctgtttaacggacgatggtatgcaggacgacagctgcagtgtgaattctgccccgtgacccggtggaaaatggcgatttgtggtttatttgaaatacaacaatgtccaagaggaaagcactgcaactttcttcatgtgttcagaaatcccaacaatgaattctgggaagctaatagagacatctacttgtctccagatcggactggctcctcctttgggaagaactccgaaaggagggagaggatgggccaccacgacgactactacagcaggctgcggggaaggagaaaccctagtccagaccactcctacaaaagaaatggggaatccgagaggaaaagtagtcgtcacagggggaagaaatctcacaaacgcacatcaaagagtcgggagaggcacaattcacgaagcagaggaagaaatagggaccgcagcagggaccgcagccggggccggggcagccggagccggagccggagccggagccgcaggagccgccgcagccggagccaaagttcctctaggtcccgaagtcgtggcaggaggaggtcgggtaatagagacagaactgttcagagtcccaaatccaaataaactagttttgttcttaaa

SEQ ID NO: 2551 - DNA, 3379 bp, Homo Sapiens
  NM_005090
gtcggggaaaggcggggtctcggccggcgctgacgcagccatggcggaggcggctttggaagccgtgcggagcgagttacgagaattcccggccgctgcaagggagctctgcgtgcctcttgctgtgccctacctggacaaacccccaactccgctccacttctaccgggactgggtctgccccaacaggccgtgcattatccgcaacgctctgcagcactggccggccctccagaagtggtccctcccctatttcagagccacagtgggctccacagaggtgagtgtggccgtgaccccagatggttacgcggatgccgtgagaggggatcgcttcatgatgccagctgagcgccgcctgcccctgagcttcgtgctggatgtgctggagggccgggcccagcaccctggagtcctctatgtgcagaagcagtgctccaacctgcccagcgagctgccccagctgctgcctgatctggaatcccatgtgccctgggcctccgaagccctgggaaagatgcccgatgctgtgaacttctggctgggggaggcggctgcagtgacttctttgcacaaggaccactatgagaacctctactgcgtggtctcaggagagaagcatttcctgttccatccgcccagcgaccggcccttcatcccctatgagctgtacacgccggcaacctaccagctaactgaagagggcacctttaaggtggtggatgaagaggccatggagaaggcagaggtgtccaggacctgcctgctcacggttcgtgtcctgcaggcccatcgcctaccctctaaggacctagtgaccccctctgactgctacgtgactctctggctgcccacggcctgcagccacaggctccagacacgcacggtcaagaacagcagtagccctgtctggaaccagagctttcacttcaggatccacaggcagctcaagaatgtcatggaactgaaagtctttgaccaggacctggtgaccggagatgaccctgtgttgtcagtactgtttgatgcggggactctgcgggctggggagttccggcgcgagagcttctcactgagccctcagggtgaggggcgcctggaagttgaatttcgcctgcagagtctggctgaccgtggcgagtggctcgtcagcaatggcgttctggtggcccgggagctctcctgcttgcacgttcaactggaggagacaggagaccagaagtcctcagagcacagagttcagcttgtggttcctgggtcctgtgagggtccgcaggaggcctctgtgggcactggcaccttccgcttccactgcccagcctgctgggagcaggagctgagtattcgcctgcaggatgcccccgaggagcaactaaaggcgccactgagtgccctgccctctggtcaagtggtgaggcttgtcttccccacgtcccaggagcccctgatgagagtggagctgaaaaaagaagcaggactgagggagctggccgtgcgactgggcttcgggccctgtgcagaggagcaggccttcctgagcaggaggaagcaggtggtggccgcggccttgaggcaggccctgcagctggacggagacctgcaggaggatgagatcccagtggtagctattatggccactggtggtgggatccgggcaatgacttccctgtatgggcagctggctggcctgaaggagctgggcctcttggattgcgtctcctacatcaccggggcctcgggctccacctgggccttggccaacctttatgaggacccagagtggtctcagaaggacctggcagggcccactgagttgctgaagacccaggtgaccaagaacaagctgggtgtgctggcccccagccagctgcagcggtaccggcaggagctggccgagcgtgcccgcttgggctacccaagctgcttcaccaacctgtgggccctcatcaacgaggcgctgctgcatgatgagccccatgatcacaagctctcagatcaacgggaggccctgagtcatggccagaaccctctgcccatctactgtgccctcaacaccaaagggcagagcctgaccacttttgaatttggggagtggtgcgagttctctccctacgaggtcggcttccccaagtacggggccttcatcccctctgagctctttggctccgagttctttatggggcagctgatgaagaggcttcctgagtcccgcatctgcttcttagaaggtatctggagcaacctgtatgcagccaacctccaggacagcttatactgggcctcagagcccagccagttctgggaccgctgggtcaggaaccaggccaacctggacaaggagcaggtcccccttctgaagatagaagaaccaccctcaacagccggcaggatagctgagtttttcaccgatcttctgacgtggcgtccactggcccaggccacacataatttcctgcgtggcctccatttccacaaagactactttcagcatcctcacttctccacatggaaagctaccactctggatgggctccccaaccagctgacaccctcggagccccacctgtgcctgctggatgttggctacctcatcaataccagctgcctgcccctcctgcagcccactcgggacgtggacctcatcctgtcattggactacaacctccacggagccttccagcagttgcagctcctgggccggttctgccaggagcaggggatcccgttcccacccatctcgcccagccccgaagagcagctccagcctcgggagtgccacaccttctccgaccccacctgccccggagcccctgcggtgctgcactttcctctggtcagcgactccttccgggagtactcggcccctggggtccggcggacacccgaggaggcggcagctggggaggtgaacctgtcttcatcggactctccctaccactacacgaaggtgacctacagccaggaggacgtggacaagctgctgcacctgacacattacaatgtctgcaacaaccaggagcagctgctggaggctctgcgccaggcagtgcagcggaggcggcagcgcaggccccactgatggccggggcccctgccacccctaactctcattcattccctggctgctgagttgcaggtgggaactgtcatcacgcagtgcttcagagcctcgggctcaggtggcacggtcccagggtccaggctgagggctgggagctcccttgcgcctcagcagtttgcagtggggtaaggaggccaagcccatttgtgtaatcacccaaaaccccccggcctgtgcctgttttcccttctgcgctaccttgagtagttggagcacttgatacatcacagactcatacaaatgtgaaaaaaaaaaaaa

SEQ ID NO: 2552 - DNA, 972 bp, Homo Sapiens
  NM_005091
acggcggggcgaagcgcccaggggcctgtgcgtccctccctgctgagcgagggggcctgtcattgccgtgggcgtgacccagaccccaaccacagtgcatcccgccctggcccagccagagaaggaagctgagtctggggtctgctgggccagcaggaagtcccagcagggtgtgaagcaagactttccgggccactcctggaatcccccagcagataaaggcggcccctccaccgggcgctcctagcggtctcccggaccctgccgccctgccactatgtcccgccgctctatgctgcttgcctgggctctccccagcctccttcgactcggagcggctcaggagacagaagacccggcctgctgcagccccatagtgccccggaacgagtggaaggccctggcatcagagtgcgcccagcacctgagcctgcccttacgctatgtggtggtatcgcacacggcgggcagcagctgcaacacccccgcctcgtgccagcagcaggcccggaatgtgcagcactaccacatgaagacactgggctggtgcgacgtgggctacaacttcctgattggagaagacgggctcgtatacgagggccgtggctggaacttcacgggtgcccactcaggtcacttatggaaccccatgtccattggcatcagcttcatgggcaactacatggatcgggtgcccacaccccaggccatccgggcagcccagggtctactggcctgcggtgtggctcagggagccctgaggtccaactatgtgctcaaaggacaccgggatgtgcagcgtacactctctccaggcaaccagctctaccacctcatccagaattggccacactaccgctccccctgaggccctgctgatccgcaccccattcctcccctcccatggccaaaaaccccactgtctccttctccaataaagatgtagctcaaaaaaaaaaaaaaaaaaaaaaa

SEQ ID NO: 2553 - DNA, 7737 bp, Homo Sapiens
  NM_005093
ggagggagaaaaagagagagactgactgtatctggggattctggcaaggtgaagagctggtctgtttggcaggaccttcccatctgggatccatctgtgtttccctggaatgggacaggcagctctagtcagtgagaaatcgcagatgtgagagagctgacacatgtccagctaatgaaaggaggaggaaggctggtctccgattgagctttgaagattaggaggagaaaaagaggagctttggaatatctatttcaaataaatttggtgtatttaagaatctggattgtttataatttgggcatttgggaggtggggttttgccatgttgcccaggtgggtctcaaactcctgggctaaagcgatcttcccatgttggctgcccaaagtgctgggattacaggcaagagccaccataccagttcctgtctagatattatgatgaagattgaggatggtagtttttgtggagcacaatcctgactgtacctgtgatgttgcattcatcttttggaacataagcagatcaccaggtgaatggctaaagaatctggaataagcttgaaagaaatacaggtcctggcaaggcaatggaaagttggtcctgagaaaagggtgccagcgatgcctggatcgcctgtggaagtgaagatacagtccagatcctcacctcccaccatgccacccctcccaccaataaatcctggaggaccgaggccagtgtccttcactcctactgcattaagcaatggcatcaaccattctcctcctaccctgaatggtgccccatcaccgccacagagattcagcaatggtcctgcctcctccacatcatctgcactcacaaatcagcaattgccagccacttgtggtgctcgacaactcagcaagttgaaacgctttcttaccactctgcaacagtttggcaatgacatctcccctgagattggggagaaggtgcggactcttgttcttgcactggtgaactcaacagtgacaattgaggaattccactgtaagctccaagaagccacaaactttccccttcgtccttttgtgattccatttctcaaggccaacctgcccctgctgcagcgggaactgctgcactgcgctcgggcggccaagcagaccccatcccagtacctggctcagcacgaacaccttctgctcaacacaagcattgcatcgcctgctgactcgtcagagttgctcatggaggtgcacggaaatgggaagaggcccagtccagagaggagagaagagaatagttttgatagagacacaattgctcctgagcctcctgccaagagagtatgtaccatcagccctgctcctcggcacagtcctgctctcactgtgcccctcatgaatcccgggggccaattccatcctacccctccacctcttcagcattacaccttagaggatattgcaacttctcacctgtatcgggaacccaacaagatgctagagcatcgagaagttcgtgatagacaccacagtcttggtctaaatggaggctatcaagatgagttggtagatcatcgtttgacagaaagggaatgggctgatgaatggaaacatcttgaccatgcgctgaattgcattatggaaatggtagagaaaacaaggcgctctatggcagttctgcggcgctgtcaggaatcagatcgtgaagaactcaactactggaaaagacggtacaatgaaaacacagagctgaggaaaacggggaccgagttggtctccaggcagcacagccctgggagtgcagattctctcagcaatgattctcagagagagttcaacagcaggccaggtacaggatacgtacctgtggagttttggaaaaaaacagaagaagctgtgaataaggtgaaaattcaggccatgtcagaagtacagaaggccgtcgctgaggcagagcagaaagcctttgaagtgattgcaacagagagagcacgaatggagcaaaccatagcggatgtcaagcggcaggccgcagaggatgctttcctcgtcatcaatgagcaagaggagtccacggagaactgctggaactgtggccgcaaagccagcgagacatgcagtggctgcaatatcgcgcgatactgtggctctttctgccagcacaaggactgggagcggcaccaccgcctctgtggtcagaacctgcatggccagagcccccacggccagggccggccgctgcttcctgtaggcaggggctcctctgccaggtccgccgactgcagcgtgcccagcccagccctcgacaagacctcggcaaccacatcgcgttcctcaacacctgcttctgtgacagctatcgacaccaacggactctgagccccggactctgcttaccctgatggctgctcagcaccacagagtgcttgggctgagggactgactgttggaacccgtgcatgtagctgccgggtcatcagcaagaaatgaattggaggcaggaagagtccaagcctgaataataacaccccacagcctctctgtgcacttgctgtctgcggagccagtgtgccattctctgcacatgggcagccagcctgagctgcctcctccatggctttcctggtttgttcctctctccactgaagctgacttagccggccccttttcagtgtagaccaccagctcccctccccatctccttgagtcagcagactgtccaatgtgctcagccaggctggaggcggcaggcggcaggcagcaggctgtggaggaggcccctcggtcagggagcggcctgcctcacccctgaatagctccttcggccccatctccatcctcagcagatgacactgattggcctcacggggacttgggtaagcaacaggcggcattcaggactcttctcaaccctgctgttcagacttgataagatctcagagtccacaggaaagaagtcactgttgcaataaaagcacccgtagtagcaaaaacataaaacaaataaaacttcccccacatcacagatgattttggacaagattttccaaccttgctggctactttagtttgggacctgttttttttctcatttgattttgcttgtgcagaaaatagtttccagcacatggattgatctgagagagaatgaggctcagttgtggatagtctgttttctctgagcatgttggccaactagtatcgtcaaattattgagtggatcatctcttggaaatgcagaacttctgccaccacttggctatttgcacagtcatcttgttctgtgtccttttatctctcagaccacacacatctggaacgctgtgggcatcttctgcccatgggctccatttggcacctgctgagccacagttgtcctgctggatgtgctgtgcaggttggtaggacttgcccccactgtcaaggcctggtctcatctgaaaagccctcctggacctcaaagaattcttcagacctcatagttacaggtcattatatctactatgttgatttatcatcaggcacacaacttctgtttccttctcttgtgttatctgatagcgtccctccttgagctcatcagaaaggttttatgaaatgtgaaccattttgggaaaagctgatcaatttttcttcctagcttcccattttcaaatgggacatcactcatatccctttcagaatgttaggaactgcctcccacattcttccctgtctttttgggttttgttttttgttgttgtggtggttttttaacacaaagtctcactctgttgcccaggctggagtgcagtggcatgatcttggctcactgcaacctctgccttccaggttcaagcaattctcctgcctcagcctcccgagtagctgagattacaggcgcccaccaccacgcccagctaatttttgtatttttagtagagacagggtttcaccatgttggccaggctgatctcgaactcctgacctcaggtgacctgccttggcctcccaaagtgcagggattacaagcgtgagccaccatgcccggcctgtctttttggttttgatgggagtctgaggaccccgacccctcctgctctccatctttgagcctctggcatcctctcacacccagaaatcagttggagtaagtttaattggccctgctccagctggcctttgaagcacaagtttaaatctccaccttctgtgcactgaccagagtctaaaataaaagttgtcagtaccataaaggaaaagggatccacacaggtagccttctccttggatacaggtacatcttactgtaagaatttcaagtcctggctgggcgcagtggctcactcctgtaatcccagcactttgagagaccgaggcaggcagatcacttgaggtcaggaattcaagaccaacctggccaacatggtgaaaccctgtctctaataaaaaaaaaatagaaaaatcagccgggtgtggtggcacacacctgtaatcctagctactcaggaggctgaggcaagagaatctcttgaacctgtgagccagaggttgcagtgagccgagattccaccactgcactccagcctgggcaacagagcaaaactctgtctcaaaaaaaaaaaaaaaaaggcaaaattaaagaatttcaagtccctaatttactctaaccaagcattttcagtcttacaaagaaatctagtgcacgacacctttaaaatgcctagatttccattgcctaaagtaaggtgtgaccagtgaaacaacagcagagaatcatgttcctttgctgtggaacacataagccccacagttttccagtcagcctaatacatgggtatcccccgaccccatctgcctccttaagccacagtccttggtggggaactctaagggggacggagtcagtaccccggacagggccacatttgcatgagacatggctgtctcacaggtcacagagccattacaacagcttactagtttttcatggatttgttggattaacaccttaagcaggttttttattgttattttgtttgtttgtttgttttgagacgggagtttctctcttgtctcccaggctggagtgcaatcgcgcaatctcggctcacggtaacctctgcctcccaggttcaagcgagtctcctgcctcagccttctgagtagctgggattacaggcatgcgccaccacgcccaactaattttgtatttttagtagagacggggtttctccttgttggtcaggctggtctcaaaccccggacctcaggtgatccccccaccttggcctcccaaagtgccaggattacaggcatgagccactgtgtccggtcttgagcaggtttttaaaatctccagtggccataaaactagccagggtagctcatgcttttactggttggaataaggagccaaaaccaacaaaataatatttattagggctcgatgcccatttctgtggctaaggcttaggtttggtgtgcagagcctggcctgctcttgtgggctgtggttgctgtgacagtttcgttttctgaatctttgtaatgctcttccaccctgctcgtgctgcccagaggctgatctgcaaacctgggcagtattccacactgaagctcagtttgcaaaccttctgctgtgttaattctggtcagtttcacacagaagtcacgagggcctctgcccaggaccttctattcacatttcaagaatccctttctgaaattctccaactctctggtcaggaggaggagcaccattggggcggggtaggcagctagaggcgcaggagcgaatccaggttccttgcgtggttcccagcctctgctgacagcacctcagctaccaggtggggagtggaaattcagcctgcttagaggactgacctctacagttcatatttgcagtgacataaaaggcaaagaggagctggcatggtggtacagaaggtatcagtcaagcgcaggctcttcagaaacctagaaactaaaaagagatgcaacatgtgactggccatcagccagacatgtctagggtgagaccagtgctcagcaccacccgccaaggaacactgatgagttgtgggacattatggtcggccaagtgaggaatgattgcagggaccagagaagaccaaagatgccagatgtccccagagtttcttgagggctgggtttcacgtctttgcttgtcctttttgtccccacttgcctgcaccgtgcctgactcatccagtggggaaggtgactcaagaagttgtttaagcctaggcctaggcagtccacttcgggaggtgggggcactccacactggggggccctgcagctccagggctggtgctctagcagatccgctcaggcacggttgggtgaccgtggggtcaccgattgcgtagattatttctagggcagtgctgggttagaaatgtctgtctggaaacaggacacatcttgccaccacaagtccacacctggccttggctgctgcccgctctctgcagcgtggatttcctttgcccatttgggccagaaggtcaccaggagttcatcactgcttagtgtcaacttgacatcttcagcttccagacagaaaacccatgctttactttgtacagccctgtcccagagttagtaagcctcggcttgtcacctgcttgcaaagggtatagacatcattctgggtagttctagaggatatcgcaacaagtgcgtttgaaggttcagcacagctggaattgtacggtagtgagctcttcaaaatgaaaacagaatgaccggatggccatctgtcctggaaactgtagaattgaataaatcactgaaaatagaacacttcttggaggctttcttcagaactgaactagaaacaaggtttccaggctcccaggtcagtagaccaaaccaacttccttagatttttttttttaagctgtttgcagaaaactgggtggtagcgtgtctgaaccaaacggaagaatagccagcggagcatggactgttccagcacgggccagatggccagctgtcgagagcagccctgcccagattgcggtgggggctgtgccagcggctccgcagggcccttccaactctggagtgtctgtagttcttgtgaaaccaaaacgttgactacctgcctctttcctcgggcatcgacgtgctcatttccaaagatgatggtgcaggtgaccttttccatcgtgagctaagagaaggttaggaggcctgaggggcgggccttgtgtcccctcctccccctccacagcccctgaggtggagcttccctcacagaccccatctggtcgagcctacggctgcccagtgtacactcagtgatgcttataccaaatagggcatgtgcgctggtgtctgttggggacagccccatccctaccttggagtcggcagagaagcagcaataagcattaggcgaatgattgaaagggctgctgcgccaagaggccttcagtccccttaacgtggctttccaacttcctgacgaggctacaaaggctccgctcacaaaagaaagccaataatgtaaataaatagaaaacgaagcctccacgcgtggtttttaaagggggatgatgaatgtgacaccacccacagaatgcattagaatctggtttttctgtgctttgtcattttactctgataggaatttttgttacctaactctgtgcataacttatttaatgtactgtataaatgaaccaaaactgttaaatatgtatttagtttgttctacttaaagtagtcaataaaaaggctatattcctt

SEQ ID NO: 2554 - DNA, 7011 bp, Homo Sapiens
  NM_005095
agtgtgggcgggggccggggggccgagaggtaccgccgccaccgcgcggggagccgcagcggttccgagcggggcccaacatggcggagagagaggtggagtccggcccccgaaagaggtttgaacaaaaaagtggtgcagtttttgatgaaattgtagagaactgtggtggtatcatggatacagaaatgtctgaagatatagaccacaacttaactcctacccttgacagcatgtcttatggaatgccgaatcaaacaggatctgaaaattcattgctggatgaagatgattattttttgaactctggggatcttgcaggaattccagtcgttggtagtgacaatgaggatgaacaggattttagttcaaaggacaatcttgtttcttcaattcatactgatgatagcttggaagtagagagaagagtcacacagcatgaatcagacaatgaaaatgaaatacaaattcaaaataagttaaaaaaagactttcctaaacaatttgatcaggtttctgtctttaaatcaatacggaaagattttagtctagtaagagaaaacagcaaagagacattttctggaaaggagaaaaatagagacctaacttatgaacgtgaaaaacggttggataaaccccataaagatttggattcaaggttgaaaagcagtttttttgataaagcagctaatcaagttgaagaaacattacatacccatttaccacaaaccccagaaacaaactttagggattccagctacccatttgccaataaagaatccattggttcggaactggggaattcctttgcatcaaatattagaattaaagaagaacctttggatgatgagtatgacaaagcaatggcaccacagcagggactactagacaaaataaaagatgaacctgacaatgctcaagagtatagtcatggccaacagcaaaaaactcaagagggggaactgaaaattagtgctgtgttttcagtcagtggcagccctcttgctccacagttgactactggctttcagccctcactggcgtcatctggcatgaataaaatgcttccttcagttccagccacagctgttcgagtttcctgttctggttgtaaaaaaatcctccagaaggggcaaactgcttatcagaggaaagggtctactcagctattctgctccacactgtgcctcactggatatacagttccacctgcccgcccaccgcctcctctcaccaagaaaacttgttcaagttgctcaaaagacattttaaatccaaaggatgtgatcagtgcccagtttgaaaacaccaccactagtaaagatttttgcagtcagtcatgtttgtcaacatatgaactgaaaaaaaaacctattgttaccataaatacaaatagtatttcaaccaaatgcagcatgtgtcagaagaatgctgttattcgacatgaagttaattaccagaatgtggtccataaactttgcagtgatgcctgcttctctaagtttcgttctgctaacaacctcaccatgaactgttgtgagaactgtgggggttactgttacagtgggtcgggacaatgccacatgcttcagatagagggacagtctaagaagttttgtagttcatcgtgtatcacggcatacaagcagaaatcagccaaaattacaccgtgtgcgctttgcaaatcattgagatcctcagcagaaatgattgaaaataccaatagcttggggaagacagagcttttctgttctgttaattgcttatctgcttacagagttaaaatggttacttctgcaggtgtacaagttcagtgtaacagttgtaaaacctcagcaattcctcagtatcacctagccatgtcagatggaagtatacgcaacttctgcagctacagctgtgtggtagctttccagaatttattcaacaaaccaactggaatgaattcttcagtagtgcccttgtctcagggccaagtaattgtaagcatccccacaggttccacagtgtcagccggaggaggtagcacatctgctgtttctcccacctccatcagtagctctgctgcagctggtctccagcgtctcgctgcccagtcccagcatgttgggtttgcacgaagtgttgtgaaactcaaatgtcaacactgtaaccgtctttttgccacaaaaccagaacttcttgactataagggcaaaatgtttcagttctgtggcaagaattgttctgatgaatataagaaaataaataatgtaatggcaatgtgtgaatattgtaaaattgagaaaattgtaaaggagactgttcggttctcaggtgctgacaagtcattctgtagtgaaggttgcaaattgctttataaacatgacttggcaaaacgctggggaaatcactgtaaaatgtgcagttattgtttacagacatctcccaaattggtacagaataatttaggagggaaagtggaagagttctgttgtgaagaatgcatgtccaaatatacagttttgttctatcagatggccaaatgtgatgcttgtaagcgacagggtaaactcagtgagtccttgaaatggcgaggggaaatgaaacatttctgtaacctgctttgtatcttgatgttctgtaatcagcaaagtgtatgtgacccgccttcacaaaataatgcagcaaatatttccatggttcaagctgcttcagcaggacccccatctctgagaaaagattcgactccagttatagccaatgtagtatcattggcaagtgcccctgctgctcagcctacagtgaattctaacagtgtcttacaaggtgcagttccaacagtaacagcgaaaatcatcggtgatgcaagtactcaaacagatgccctgaaactgccaccttcccaacctccaaggcttttgaagaacaaagctttattatgcaaacccatcacacagactaaagccacctcttgcaaaccacatacccaaaacaaagaatgccagacagaagacactccaagtcagccccagattattgtggtgccagttcccgtaccagtgtttgttcccatacctcttcacctttatactcaatatgctccagtcccatttggaattccagttccaatgcctgtccctatgcttattccatcttcaatggatagtgaagataaagtcacagagagtattgaagacattaaagaaaagcttcccacacatccatttgaagctgatctccttgagatggcagaaatgattgcagaagatgaagagaagaagactctatctcagggagagtcccaaacttctgaacacgaactctttctagacaccaagatatttgaaaaagaccaaggaagtacatacagtggtgatcttgaatcagaggcagtatctactccacatagctgggaggaagagctgaatcactatgccttaaagtcaaatgctgtgcaagaggctgattcagaattgaagcagttctcaaaaggggaaactgaacaggacctggaagcagattttccatcagactcctttgacccacttaataaaggacagggaatccaggcacgttcccgaacaagacgacgacacagagatggcttcccccaacccagacgaagaggacggaagaagtctatagtggctgtggagcccaggagtcttattcaaggagcctttcaaggctgctcagtgtccgggatgacactgaaatacatgtatggggtaaatgcttggaagaactgggttcagtggaaaaatgccaaggaagagcagggggatctaaaatgtggaggggttgaacaggcctcatctagcccacgttctgaccccttaggaagtactcaagaccatgcactctctcaagaatcctcagagccaggctgtagagtccgctctatcaagctgaaggaagacattctgtcctgcacttttgctgagttgagtttgggcttatgccagtttatccaagaggtgcggagaccaaatggtgaaaaatatgatccagacagtatcttatacttgtgccttggaattcaacagtacctgtttgaaaatggtagaatagataacatttttactgagccctattccagatttatgattgaacttaccaaactcttgaaaatatgggaacctacaatacttcctaatggttacatgttctctcgcattgaggaagagcatttgtgggagtgcaaacagctgggcgcttactcaccaatcgtccttttaaacaccctccttttcttcaataccaaatacttccaactaaagaatgttactgagcacttgaagctttcctttgcccatgtgatgagacggaccaggactctgaagtacagtaccaagatgacatatctgaggttcttcccacctttacagaagcaggagtcagaaccagataaactgactgttggcaagaggaaacgaaatgaagatgatgaggttccagtgggggtggagatggcagagaatactgacaatccactaagatgcccagtccgactttatgagttttacctgtcaaaatgttctgaaagtgtgaagcaaaggaatgatgtgttttaccttcaacctgagcgctcctgtgtcccgaatagccccatgtggtactccacattcccgatagaccctggaaccctggacaccatgttaacacgtattctcatggtgagggaggtacatgaagaacttgccaaagccaaatctgaagactctgatgttgaattatcagattaaaacggaagtgaggttcttattttcatacatattggtatgcaccaaactgtgaatgcatccagctgttggaaaatgatgtataagtctaagtcctcttgacttgaccataagatcatggaaaacagatgacttgtgaaccccacagtgtggatgtgcaaatgaaaattgaaggaaagaatatgaactgagaaatgttctttggcagtgatatagttcttagacatcttcagaatgactaatttctccgagtggtgcataatcttattttgtttgggagtaacaaatcgtggaatatttttaaggaaaactgttgtataaaactttaccatagtaaccttagaccttagagaggtagctttggagtgaaactttggctgcaataggctactttggcaagccctccgtaaaagtcagaggagagatcagtacagagctaagagtgacatcaaatgaggactgtgggacccagatttgaagacccaataaaaatactcaactttttaaaaaagatagtgaagtggtcttgattgattttgattttcactgccaagccaatcatgtgaaggacagaagcttttgccatgggcccctcacatcagggaaaatgaccttcactgctgttaacagtaatgtgtccctttcattttctggatcaagccttctcagcggtgggtctggatgtgggtaaactaaggtaaaggggatgatattccacaaactaattatgcacacagaaaatctgtggagcctatcagaccccaagtgtcttgaaatgtttgtagaaacccactaaaatgccccttctctgggtgtgggcccttattgcagctgtctcacagcctgagctgtggtacagagaaatgggggttctccttttattttcattttttttccccaatggcagcttttctcccgttgttttaccttcctatttcccaaacagttcctcttattttgtcttttgcaccagtttctggaggcccttgtcatttcaaaaaggatagtctcttttcttactctggcaaacctgtgagtgattccacaaagatacagtattacttagctatctgaattatgatagaaaaggtcctagttaggttcctatataaagcatttggaagatgaccttgttgcccttgaaacttgaaaatagggattctggggtgaggatacaaagacattgtcttgcatatccataagcaggtcttagagcattattccaaactctagctgtttcagtagttctatgaggattgcaagtcataggtgtgtgtggcatatcagtccatctccctcatctccattctcagtttcttccccacaaaatttggaatcaaagcttttatgacgtttgccaattgcagaacttcttcagctaaggttaatttgacgctatgataaaactgagagatgtcaaaaagcctcttagaaattttaatcttgaaagacttttcagggtatctcattttttaggtgggggtggcaggtgtatttcttttttaacaaataaaaggcatttaagtaaaactaaaatgaaaaaagtaggccttctgacattgtgtacttggtggttctgtccctctgcctgtaacaaatctcatttttgttaccaagaactgtatgaaagaagtaaatccaccccgattctgtatgattaattccatctgtgtttgtcatttctgactggaaaacttcttactccataccttgttcgatatggaggacaaataattggattgtctgataagtctgccaataaactatccagaaatagcaagtgtaatagtccccactatacgaattttatggtttgtataaacactaacattttccccttctgtagttgtatgaaaaaacaaatattgttagcatagtagataaattgttatgaaataccagaaaaaaaaatctgtatcttttactgagaacacccaatacccagataaatgactgtatcaggatttcatttgcatgttagtccacagagttgcccagaaccctaaatttattcataagagaaaatattgattaattattggtcattcctcataagtgtagctgttgatgtgtgcgtctgattattgcttttttaattttatgaaaattgtgtaaaattacattttttttccaggggagaaaaaaacatcaaacaaaaacatctaaatcatcctttttgttctttttcagtttttaaccacttttaggttttccccttacagaaaccacagaaatattcccttagaataaaatagtatatttgtatttgaaaaaaaaaaaaaaaaaa

SEQ ID NO: 2555 - DNA, 1781 bp, Homo Sapiens
  NM_005103
cggggaaggggtggggtggaggcgggagcggagccgggcgccgccggagctgcgcggggagcgctcgctggctggctggctggctggctctccgctgcgctgcgctgcgctccggccgctcccgcggcccgtggatgggggtgtccggctgagccccgggatccgcctccctccgccaggacccgcacagataaactcatcctgaaagtcgctgttgttctcctgctgagcaagaatggaggccccactggtgagtctggatgaagagtttgaggaccttcgaccctcctgctcggaggacccggaggagaagccccagtgtttctatggttcatctccccaccatctcgaggacccctccctctccgagcttgagaatttttcttccgaaataatcagcttcaagtccatggaggacctcgtaaatgaatttgatgagaagctcaatgtctgctttcggaactacaacgccaagaccgagaacctagctcccgtgaagaaccagttacagatccaagaggaggaggagacccttcaggacgaggaggtttgggatgctctgacagacaattacatcccttcactctcagaagactggagggatccaaacatcgaggctctgaatggcaactgctctgacactgagatccatgagaaagaagaggaagagttcaatgagaagagtgaaaatgattccggtatcaacgaggagcctctgctcacagcagatcaggtaattgaggagattgaggaaatgatgcagaactccccagaccctgaggaagaagaggaggttctggaagaagaggatggaggagaaacttcctcccaggcagactcggtcctcctgcaggagatgcaggcattgacacagaccttcaacaacaactggtcctatgaagggctgaggcacatgtctgggtctgagctgaccgagctgctggaccaggtggagggtgccatccgtgacttctcggaggagctggtgcagcagctggcccgccgggacgagctggagtttgagaaggaagtgaagaactcctttatcacggtgcttattgaggttcagaacaagcagaaggagcagcgagaactgatgaaaaagaggcggaaagagaaagggctgagcctgcagagcagccggatagagaagggaaaccagatgcctctcaagcgcttcagcatggaaggcatctccaacattctgcagagtggcatccgccagacctttggctcctcaggaactgacaaacagtatctgaacacagtcattccttacgagaagaaagcctctcctccctcagtggaagacctgcagatgctgacaaacattctctttgccatgaaggaggataatgagaaggtgcctactttgctaacggactacattttaaaagtgctctgccctacctaaccttgccctttggagcagcctcgctgcaggaggtcactgagcaagagtcattccatcacagggactgcatgagaccatgtaacctccgacatgtatttaaacgtgtatagcttaacctggattaaacacgagcaagcgcgcggggtcctttgccgttggcttctagtgctagtaatcattggatgcatgatggggcagggccggtgatggtgcctcccccttgctggtgtcaggagaggggaaggcagccgctttcaccgctcattatgtagtctggctacagccctcaaaaacagcttatactcttaagactaattttgaaataaaaccttcatttaattaatattcttaaaaaaaaaaaaaaaaa

SEQ ID NO: 2556 - DNA, 4525 bp, Homo Sapiens
  NM_005109
ttggcccgtgcgtggggctggggtggagggcgggacagaggggctgggcccaggcaaagcttctgtcgctgctgctgcggaggccgaggacaggacgtgggctgggccgggcagtgccggactcggaggagcaggaggcgaggtccgccggagctctgagcccccgctgctctgccgcgcggtgaccccgcgccccggcgccgtccgacccgtggctgttccgagacgattggtgggggcgcggcggcggcggcggcggctgttgggggtggggagacgcgcggcgaggagacgagcgaggtcagcgagtttgagggaggaccgcgagccgctgccgccgtcatgtccgaggactcgagcgccctgccctggtccatcaacagggacgattacgagctgcaggaggtgatcgggagtggagcaactgctgtagtccaagcagcttattgtgcccctaaaaaggagaaagtggcaatcaaacggataaaccttgagaaatgtcaaactagcatggatgaactcctgaaagaaattcaagccatgagtcaatgccatcatcctaatattgtatcttactacacatcttttgtggtaaaagatgagctgtggcttgtcatgaagctgctaagtggaggttctgttctggatattattaagcacattgtggcaaaaggggaacacaaaagtggagtcctagatgaatctaccattgctacgatactccgagaagtactggaagggctggaatatctgcataaaaatggacagatccacagagatgtgaaagctggaaacattcttcttggagaagatggctcagtacagattgcagactttggggttagtgcttttttagcaactggtggtgatattacccgaaataaagtgagaaagacctttgttggcaccccttgttggatggcacctgaagttatggaacaggtccgtggttatgatttcaaagctgatatttggagttttggaattacagcaattgaattggctacaggggcggctccttatcataaatatccaccaatgaaggttttaatgctgacactgcagaacgatcctccttctttggaaactggtgttcaagataaagaaatgctgaaaaaatatggaaaatcatttagaaaaatgatttcattgtgccttcaaaaagatccagaaaaaagaccaacagcagcagaactattaaggcacaaatttttccagaaagcaaagaataaagaatttcttcaagaaaaaacattgcagagagcaccaaccatttctgaaagagcaaaaaaggttcggagagtaccaggttccagtgggcgtcttcataagacagaggatggaggctgggagtggagtgatgatgaatttgatgaagaaagtgaggaagggaaagcagcaatttcacaactcaggtctccccgagtgaaagaatcaatatcaaattctgagctctttccaacaactgatcctgtgggtactttgctccaagttccagaacagatctctgctcatctacctcagccagctgggcagattgctacacagccaactcaagtctctctcccacccaccgcagagccagcaaaaacagctcaggctttgtcttcaggatcaggttcacaagaaaccaagatcccaatcagtctagtactaagattaaggaattccaaaaaagaactaaatgatattcgatttgaatttactcctgggagagatacagcagagggtgtctctcaggaactcatttctgctggcctggtcgacggaagggatttagtaatagtggcagctaatttgcagaaaattgtggaagaacctcagtcaaatcgatctgtcactttcaaactggcatctggtgtcgaaggctcagatattcctgatgatggtaaactgataggatttgcccagctcagcatcagctaaaccacaaccctggaagaggcggcctaaggagattccacacatgcgtatctctgttgcttctattggcctaaacccactactgccaaagaacccagcaacaaacctcccggctaggagctttagaagtctttatgttcttcctgccatcattcctccttttcccacagggaaagaaaagttggatcactagtggccagcatccccagagttccgttagtaaacttacttcatatgtcccctgtcttcctccatctgagaagtggcccatgtgcttcaaggcccaggagggagatctgtcagctcattcttgccttactccaatgatggcccaggtggaaaagtagcagctgtatcgggcttcctcatcctgcctgttcccccacacctgccaggatatggacatcttgggatatctctttaccactgaagtagaattgattgttcagctggagcccagagaatttaatttaatgttttttctttgtacctgatgtgaattctagcaacctttgttaggaaaaagcacagcctcagatggaggcagcctaaactgtgttcttgttttgttcatggtgtttctaagcgttttgctgaagctgctctcaggcacccccttcttcattgctctctccagaaagggttgctagccttaacttcagctggtgcaaaacatctgactgtagccgaacttcagccatcagatccttcaaagtggaactttggattgtttttacagacaacatcgagtaatggcttgtaaatgtgaattttgccagaggtggtttttgaacaggaaaatcataattcatatcattggagaagtatttattttcaaatatcaaattgaagaaaaactcaatcctcccatgaaaatcagttcgcctggcctccaagtcgtgaggaaatgggtatgcaaggctgagatttctacagcaataaaggagacacacactgggccagagaggcctgccttctgcctgctctcctgcactgaccctttggagggggtctctgtgtgctgaagctaactcaagatggaaagtgaaaccacatgtgccgtgacctttaggttttatgagtagacagtgttcatttgattttctacagaaataatataaattattctttaggtttaaaaaagagcactcataatgcaatatgtgaataatcagtgaggttgatttttcttttttcctaccgtttcatagtctttgtctaactgctagtaaccctaccgagttttatatatgagtgggatactcaatctggccttaaaaagatacacaaagatgggctgtgggtccctggaaagggggagagttgccctttacagaatcactcgagccctttccagcactgttggtctgatgaacaaggttgttttaccttattttctcttggaacatatctgaaaaccttccccacaaataacttgtcacaccttttgtttcattctgagtctttagttttagtcatgggctttcttcacctgctctaggtgcaaaggcatgttgggaaagagatggatgttggggaggaagagaggagatggatttcagttgggagttaggaggagagtaggtgagatgatcagacaccggagttcaacgtcccagcagtcttggtaaaaggagggagcctgctgagccaggagggagaaaagaagattgaccagcttgctagaaaaatacttagcttttctttttctttttttgtggaggggggacggagaggaacaaggatggggaggtaggaatgaggtatagaaaagagatagcatcttctttggcacaagactagtggcttaccgcttaccttagagttttgttttttttttttcaaacccatcaaaatctacttatttatgaatccaaggggtggcagcatcactctgttctagcattctttgtggagatggtctggtgcctagctgggagtgagcagcagcccatcccctgttcactttctctagcccatcattacctgtgaactgcagtggggcagtcatggcaaatagaattgggctggggtttctccttcttttcagttcattgtttgccctgctaggaattagaagacagacaccatgtcccaggacagtgttacttcttctgcatgatgtgtggtagactccctttgctggcttgtgcagtgatactgagaaaatacatgaacagaaactgcccaggtggaacagcacgtaacctagtgagtgactgtactcctttctaggaatgctgattcagagtgcacctctttgactaggtcccaggatccccttgtccctggagtagggactaactatagcacaaagtaatatgtgccaatgctatttgtgaaatgtttggtctttctaaacgactaaaggatttgttgggtttttgcttaagttttgaaccaaatcctagagccagctgataatatttaataatctggaggagagaataatgatgtaccaataagtggagattcctccttatgatgtatgctaggttatggaagatgtaaaatattcaactttttcctcctttttttggactttgtattttactgcatgttttcttcatttttaatcaataaagagtaaattgtccttaaa

SEQ ID NO: 2557 - DNA, 2902 bp, Homo Sapiens
  NM_005115
aactcccaagccccacccctgggcttggcctgccttgccctgccgggaagtgatccccaaggcagggtgagagttccccatctgaggcgtttgttgcagctacctgcacttctagattcatcttcttgtgagccctgggcttaggagtcaccatggcaactgaagagttcatcatccgcatccccccataccactatatccatgtgctggaccagaacagcaacgtgtcccgtgtggaggtcgggccaaagacctacatccggcaggacaatgagagggtactgtttgcccccatgcgcatggtgaccgtccccccacgtcactactgcacagtggccaaccctgtgtctcgggatgcccagggcttggtgctgtttgatgtcacagggcaagttcggcttcgccacgctgacctcgagatccggctggcccaggaccccttccccctgtacccaggggaggtgctggaaaaggacatcacacccctgcaggtggttctgcccaacactgccctccatctaaaggcgctgcttgattttgaggataaagatggagacaaggtggtggcaggagatgagtggcttttcgagggacctggcacgtacatcccccggaaggaagtggaggtcgtggagatcattcaggccaccatcatcaggcagaaccaggctctgcggctcagggcccgcaaggagtgctgggaccgggacggcaaggagagggtgacaggggaagaatggctggtcaccacagtaggggcgtacctcccagcggtgtttgaggaggttctggatttggtggacgccgtcatccttacggaaaagacagccctgcacctccgggctcggcggaacttccgggacttcaggggagtgtcccgccgcactggggaggagtggctggtaacagtgcaggacacagaggcccacgtgccagatgtccacgaggaggtgctgggggttgtgcccatcaccaccctgggcccccacaactactgcgtgattctcgaccctgtcggaccggatggcaagaatcagctggggcagaagcgcgtggtcaagggagagaagtcttttttcctccagccaggagagcagctggaacaaggcatccaggatgtgtatgtgctgtcggagcagcaggggctgctgctgagggccctgcagcccctggaggagggggaggatgaggagaaggtctcacaccaggctggggaccactggctcatccgcggacccctggagtatgtgccatctgccaaagtggaggtggtggaggagcgccaggccatccctctagacgagaacgagggcatctatgtgcaggatgtcaagaccggaaaggtgcgcgctgtgattggaagcacctacatgctgacccaggacgaagtcctgtgggagaaagagctgcctcccggggtggaggagctgctgaacaaggggcaggaccctctggcagacaggggtgagaaggacacagctaagagcctccagcccttggcgccccggaacaagacccgtgtggtcagctaccgcgtgccccacaacgctgcggtgcaggtgtacgactaccgagagaagcgagcccgcgtggtcttcgggcctgagctggtgtcgctgggtcctgaggagcagttcacagtgttgtccctctcagctgggcggcccaagcgtccccatgcccgccgtgcgctctgcctgctgctggggcctgacttcttcacagacgtcatcaccatcgaaacggcggatcatgccaggctgcaactgcagctggcctacaactggcactttgaggtgaatgaccggaaggacccccaagagacggccaagctcttttcagtgccagactttgtaggtgatgcctgcaaagccatcgcatcccgggtgcggggggccgtggcctctgtcactttcgatgacttccataagaactcagcccgcatcattcgcactgctgtctttggctttgagacctcggaagcgaagggccccgatggcatggccctgcccaggccccgggaccaggctgtcttcccccaaaacgggctggtggtcagcagtgtggacgtgcagtcagtggagcctgtggatcagaggacccgggacgccctgcaacgcagcgtccagctggccatcgagatcaccaccaactcccaggaagcggcggccaagcatgaggctcagagactggagcaggaagcccgcggccggcttgagcggcagaagatcctggaccagtcagaagccgagaaagctcgcaaggaacttttggagctggaggctctgagcatggccgtggagagcaccgggactgccaaggcggaggccgagtcccgtgcggaggcagcccggattgagggagaagggtccgtgctgcaggccaagctaaaagcacaggccttggccattgaaacggaggctgagctccagagggtccagaaggtccgagagctggaactggtctatgcccgggcccagctggagctggaggtgagcaaggctcagcagctggctgaggtggaggtgaagaagttcaagcagatgacagaggccataggccccagcaccatcagggaccttgctgtggctgggcctgagatgcaggtaaaactgctccagtccctgggcctgaaatcaaccctcatcaccgatggctccactcccatcaacctcttcaacacagcctttgggctgctggggatggggcccgagggtcagcccctgggcagaagggtggccagtgggcccagccctggggaggggatatccccccagtctgctcaggcccctcaagctcctggagacaaccacgtggtgcctgtactgcgctaactcctgattaatacaatggaagtttctgggcatttacaatttcaacacttaaaaaaaaaaaaaaaaaa

SEQ ID NO: 2558 - DNA, 2133 bp, Homo Sapiens
  NM_005131
aggcgccgcagcgcagtggcgggcacgcgcagccgagaagatgtctccgacgccgccgctcttcagtttgcccgaagcgcggacgcggtttacgaagtctaccagagaggccttgaacaacaaaaacatcaagccattgttaagtaccttcagccaggtacctggcagtgaaaatgaaaaaaaatgtacccttgaccaagctttcagaggtattctagaagaagaaattataaatcattcatcatgtgaaaacgttttagctattatttctcttgctattgggggagtaactgaaggtatttgtaccgcatctacaccttttgtattgttgggagatgttttggattgtcttcctttggatcagtgtgacacaatattcacttttgtggaaaaaaatgttgctacttggaaatcaaatacattctattctgctgggaaaaattacttactacgtatgtgcaatgatctcctaagaagattgtctaaatcccagaatacagtcttctgtggacggattcagctctttttggccaggcttttccctctgtctgagaaatcaggtcttaacttgcagagtcagtttaatctggaaaatgtcactgttttcaatacaaatgagcaggaaagcaccctgggtcagaagcacactgaagatagagaagaaggaatggatgtagaagaaggcgaaatgggagacgaggaagctccaacaacgtgctctattccaattgattacaacctgtatcgaaaattctggtcacttcaggattacttcaggaaccctgtgcaatgctatgagaagatttcatggaaaacttttctcaagtattctgaagaagttttagctgtttttaagagttataaattagatgatactcaggcctcaagaaaaaagatggaagaattgaaaacaggaggagaacatgtatattttgcaaaatttttaacaagtgaaaagctgatggatttacaactgagtgacagtaactttcgtcgacacatcctgttgcagtatctcattttattccaatatctcaaggggcaggtcaaattcaaaagttcaaactatgttttaactgatgagcaatcactttggattgaagatactacaaaatcagtttatcaactactatctgaaaacccccccgatggagaaagattttcaaagatggtagagcatatattaaacactgaagaaaactggaactcgtggaaaaatgaaggttgcccaagttttgtgaaagaaagaacatcagataccaaacctacgagaataattcggaagagaacagcacccgaggacttcctagggaaaggacccaccaaaaaaattctgatgggaaatgaggagttaacaaggctttggaatctttgccctgataatatggaagcctgtaaatcagagacaagggaacacatgcccactttggaggaattctttgaagaagccattgaacaggcagaccctgaaaatatggtggaaaatgaatataaggctgtgaacaattcaaattatggttggagagccctgagactattagcacggagaagccctcacttcttccagccaaccaaccagcagtttaaaagtttaccagaatatcttgaaaatatggtaataaagctagccaaggaattaccgcctccttctgaagaaataaaaacaggtgaggatgaagatgaggaagataatgatgctctactgaaggaaaatgaaagtcctgatgttcggcgagacaaacctgtaacaggagaacaaatagaggtatttgccaacaagctgggtgaacaatggaagattctggctccctacttggaaatgaaagactcagaaattaggcagattgagtgtgacagtgaagacatgaagatgagagctaagcagctcctggttgcctggcaagatcaagagggagttcatgcaacacctgagaatctgattaatgcactgaataagtctggattaagtgaccttgcagaaagtctaactaatgacaatgagacaaatagttagcttcttttttttttctttttattaaaactgtgatagattttgttaccaagcagcatttgataagaggtccactggttttggtaaacaataaacatttttataacaaaaaaaaaaaaaaa

SEQ ID NO: 2559 - DNA, 3925 bp, Homo Sapiens
  NM_005134
agcccggccctcctcctccccgccgcccctcccgcgcgcgtccaccggctccccggctcgcgccgctccatgtagccccggctccccgggcggccgcggaggagggggcgaccacaagatggcggacctctcgctgcttcaggaggacctgcaggaggacgcagacggatccctggactttgtctcacaagatgaaatgttgacgcccctggggagattggacaagtatgctgcaagtgagaacatatttaacagacaaatggtggcccggagtttgctcgataccttgagggaagtctgcgatgatgaaagagattgtattgctgttttggaaagaattagcagattggccgatgattcagaaccaactgtgagagcggagctgatggaacaggtgcctcacatcgcactgttttgtcaagaaaaccggccttcaataccatatgctttttcaaaattcttactacctattgtggttagataccttgcagatcagaataatcaggtgaggaaaacaagtcaggcagctttgctggctctgttggagcaggagctcattgaacgatttgatgtggagaccaaagtgtgccctgtcctcatagagctgacagccccagatagcaatgatgatgtgaaaacagaagctgtggctataatgtgcaaaatggctcccatggttgggaaggatattacagagcgtcttatcctccctaggttttgtgagatgtgctgcgattgcagaatgtttcacgttcgaaaggtctgtgctgccaattttggagatatttgcagtgtagttggccagcaagctactgaagaaatgttgctgcccagatttttccagctttgttctgataatgtatggggagtccgaaaggcttgtgctgaatgcttcatggcggtttcatgtgcaacatgtcaagaaatccgacggaccaaattatcagcactttttattaatttgatcagtgatccttcacgttgggttcgccaagcagcttttcagtctctgggacctttcatatctacttttgctaatccatctagctcaggccagtattttaaagaagaaagcaaaagttcagaagagatgtcagtagaaaacaaaaataggaccagagatcaagaagccccagaggatgtacaagtcaggccagaggatactccttcagatctcagtgttagtaattccagtgtcatactggaaaacacgatggaagaccatgctgctgaggcatccgggaagcctctaggtgaaattagtgttccactggacagctctttactttgtactttgtcctcagaatctcaccaggaagcagctagtaatgagaatgataaaaaacctggtaactacaaatctatgttacgaccagaggttggcaccacttcacaagattcagctctcttagatcaggaattgtataactccttccatttctggaggactcctcttcctgaaatagatctagacatagagcttgaacagaactctgggggaaaacccagcccagagggaccagaggaagaatctgagggccctgtgcccagttctccaaacatcaccatggccaccagaaaggaactggaagaaatgatagaaaatctagagccccacattgatgatccagatgttaaagcacaagtggaagtgctgtccgctgcactacgtgcttccagcctggatgcacatgaagagaccatcagtatagaaaagagaagtgatttgcaagatgaactggatataaatgagctaccaaattgtaaaataaatcaagaagattctgtgcctttaatcagcgatgctgttgagaatatggactccactcttcactatattcacagcgattcagacttgagcaacaatagcagttttagccctgatgaggaaaggagaactaaagtacaagatgttgtacctcaggcgttgttagatcagtatttatctatgactgacccttctcgtgcacagacggttgacactgaaattgctaagcactgtgcatatagcctccctggtgtggccttgacactcggaagacagaattggcactgcctgagagagacgtatgagactctggcctcagacatgcagtggaaagttcgacgaactctagcattctccatccacgagcttgcagttattcttggagatcaattgacagctgcagatctggttccaatttttaatggatttttaaaagacctcgatgaagtcaggataggtgttcttaaacacttgcatgattttctgaagcttcttcatattgacaaaagaagagaatatctttatcaacttcaggagtttttggtgacagataatagtagaaattggcggtttcgagctgaactggctgaacagctgattttacttctagagttatatagtcccagagatgtttatgactatttacgtcccattgctctgaatctgtgtgcagacaaagtttcttctgttcgttggatttcctacaagttggtcagcgagatggtgaagaagctgcacgcggcaacaccaccaacgttcggagtggacctcatcaatgagcttgtggagaactttggcagatgtcccaagtggtctggtcggcaagcctttgtctttgtctgccagactgtcattgaggatgactgccttcccatggaccagtttgctgtgcatctcatgccgcatctgctaaccttagcaaatgacagggttcctaacgtgcgagtgctgcttgcaaagacattaagacaaactctactagaaaaagactatttcttggcctctgccagctgccaccaggaggctgtggagcagaccatcatggctcttcagatggaccgtgacagcgatgtcaagtattttgcaagcatccaccctgccagtaccaaaatctccgaagatgccatgagcacagcgtcctcaacctactagaaggcttgaatctcggtgtctttcctgcttccatgagagccgaggttcagtgggcattcgccacgcatgtgacctgggatagctttcgggggaggagagaccttcctctcctgcggacttcattgcaggtgcaagttgcctacacccaataccagggatttcaagagtcaagagaaagtacagtaaacactattatcttatcttgactttaaggggaaataatttctcagaggattataattgtcaccgaagccttaaatccttctgtcttcctgactgaatgaaacttgaattggcagagcattttccttatggaagggatgagattcccagagacctgcattgctttctcctggttttatttaacaatcgacaaatgaaattcttacagcctgaaggcagacgtgtgcccagatgtgaaagagaccttcagtatcagccctaactcttctctcccaggaaggacttgctgggctctgtggccagctgtccagcccagccctgtgtgtgaatcgtttgtgacgtgtgcaaatgggaaaggaggggtttttacatctcctaaaggacctgatgccaacacaagtaggattgacttaaactcttaagcgcagcatattgctgtacacatttacagaatggttgctgagtgtctgtgtctgattttttcatgctggtcatgacctgaaggaaatttattagacgtataatgtatgtctggtgtttttaacttgatcatgatcagctctgaggtgcaacttcttcacatactgtacatacctgtgaccactcttgggagtgctgcagtctttaatcatgctgtttaaactgttgtggcacaagttctcttgtccaaataaaatttattaataagatctatagagagagatatatacacttttgattgttttctagatgtctaccaataaatgcaatttgtgacctgtattaatgatttaaagtggggaaactagattaaaatatttgtcttttaactaaaaaaaaaaa

SEQ ID NO: 2560 - DNA, 1634 bp, Homo Sapiens
  NM_005139
gggtggggaagcttagagaccggtgagggagcagagctggggcgcctgtgtacagggatagagcccggcggcagcagggcgcggcttccctttcccggggcctggggccgcaatcaggtggagtcgagaggccggaggaggggcaggaggaaggggtgcggtcgcgatccggacccggagccagcgcggagcacctgcgcccgcggctgacaccttcgctcgcagtttgttcgcagtttactcgcacaccagtttcccccaccgcgctttggattagtgtgatctcagctcaaggcaaaggtgggatatcatggcatctatctgggttggacaccgaggaacagtaagagattatccagactttagcccatcagtggatgctgaagctattcagaaagcaatcagaggaattggaactgatgagaaaatgctcatcagcattctgactgagaggtcaaatgcacagcggcagctgattgttaaggaatatcaagcagcatatggaaaggagctgaaagatgacttgaagggtgatctctctggccactttgagcatctcatggtggccctagtgactccaccagcagtctttgatgcaaagcagctaaagaaatccatgaagggcgcgggaacaaacgaagatgccttgattgaaatcttaactaccaggacaagcaggcaaatgaaggatatctctcaagcctattatacagtatacaagaagagtcttggagatgacattagttccgaaacatctggtgacttccggaaagctctgttgactttggcagatggcagaagagatgaaagtctgaaagtggatgagcatctggccaaacaagatgcccagattctctataaagctggtgagaacagatggggcacggatgaagacaaattcactgagatcctgtgtttaaggagctttcctcaattaaaactaacatttgatgaatacagaaatatcagccaaaaggacattgtggacagcataaaaggagaattatctgggcattttgaagacttactgttggccatagttaattgtgtgaggaacacgccggcctttttagccgaaagactgcatcgagccttgaagggtattggaactgatgagtttactctgaaccgaataatggtgtccagatcagaaattgaccttttggacattcgaacagagttcaagaagcattatggctattccctatattcagcaattaaatcggatacttctggagactatgaaatcacactcttaaaaatctgtggtggagatgactgaaccaagaagataatctccaaaggtccacgatgggctttcccaacagctccaccttacttcttctcatactatttaagagaacaagcaaatataaacagcaacttgtgttcctaacaggaattttcattgttctataacaacaacaacaaaagcgattattattttagagcatctcatttataatgtagcagctcataaatgaaattgaaaatggtattaaagatctgcaactactatccaacttatatttctgctttcaaagttaagaatctttatagttctactccattaaatataaagcaagataataaaaattgttgcttttgttaaaagtaaaaaaaaaaaaaaaaaa

SEQ ID NO: 2561 - DNA, 1461 bp, Homo Sapiens
  NM_005143
agatgccccacagcactgctcttccagaggcaagaccaaccaagatgagtgccctgggagctgtcattgccctcctgctctggggacagctttttgcagtggactcaggcaatgatgtcacggatatcgcagatgacggctgcccgaagccccccgagattgcacatggctatgtggagcactcggttcgctaccagtgtaagaactactacaaactgcgcacagaaggagatggagtatacaccttaaatgataagaagcagtggataaataaggctgttggagataaacttcctgaatgtgaagcagatgacggctgcccgaagccccccgagattgcacatggctatgtggagcactcggttcgctaccagtgtaagaactactacaaactgcgcacagaaggagatggagtgtacaccttaaacaatgagaagcagtggataaataaggctgttggagataaacttcctgaatgtgaagcagtatgtgggaagcccaagaatccggcaaacccagtgcagcggatcctgggtggacacctggatgccaaaggcagctttccctggcaggctaagatggtttcccaccataatctcaccacaggtgccacgctgatcaatgaacaatggctgctgaccacggctaaaaatctcttcctgaaccattcagaaaatgcaacagcgaaagacattgcccctactttaacactctatgtggggaaaaagcagcttgtagagattgagaaggttgttctacaccctaactactcccaggtagatattgggctcatcaaactcaaacagaaggtgtctgttaatgagagagtgatgcccatctgcctaccttcaaaggattatgcagaagtagggcgtgtgggttatgtttctggctgggggcgaaatgccaattttaaatttactgaccatctgaagtatgtcatgctgcctgtggctgaccaagaccaatgcataaggcattatgaaggcagcacagtccccgaaaagaagacaccgaagagccctgtaggggtgcagcccatactgaatgaacacaccttctgtgctggcatgtctaagtaccaagaagacacctgctatggcgatgcgggcagtgcctttgccgttcacgacctggaggaggacacctggtatgcgactgggatcttaagctttgataagagctgtgctgtggctgagtatggtgtgtatgtgaaggtgacttccatccaggactgggttcagaagaccatagctgagaactaatgcaaggctggccggaagcccttgcctgaaagcaagatttcagcctggaagagggcaaagtggacgggagtggacaggagtggatgcgataagatgtggtttgaagctgatgggtgccagccctgcattgctgagtcaatcaataaagagctttcttttgacccataaaaaaaaaaaaaaaaaaaaaaaaaaaaaa

SEQ ID NO: 2562 - DNA, 2728 bp, Homo Sapiens
  NM_005147
gcaggcgcagagtccccgggccaagatggctgcgcggtgctccacacgctggttgctggtggttgtggggaccccgcggctgccggctatatcgggtagaggggcccggccgcccagggagggcgtggtgggggcatggctgagccgcaagctgagcgtccccgcctttgcgtcttccctgacctcttgcggcccccgagcgctgctgacattgagacctggtgtcagccttacaggaacaaaacataaccctttcatttgtactgcctccttccacacgagtgcccctttggccaaagaagattattatcagatattaggagtgcctcgaaatgccagccagaaagagatcaagaaagcctattatcagcttgccaagaagtatcaccctgacacaaataaggatgatcccaaagccaaggagaagttctcccagctggcagaagcctatgaggttttgagtgatgaggtgaagaggaagcagtacgatgcctacggctctgcaggcttcgatcctggggccagcggctcccagcatagctactggaagggaggccccactgtggaccccgaggagctgttcaggaagatctttggcgagttctcatcctcttcatttggagatttccagaccgtgtttgatcagcctcaggaatacttcatggagttgacattcaatcaagctgcaaagggggtcaacaaggagttcaccgtgaacatcatggacacgtgtgagcgctgcaacggcaaggggaacgagcccggcaccaaggtgcagcattgccactactgtggcggctccggcatggaaaccatcaacacaggcccttttgtgatgcgttccacgtgtaggagatgtggtggccgcggctccatcatcatatcgccctgtgtggtctgcaggggagcaggacaagccaagcagaaaaagcgagtgatgatccctgtgcctgcaggagtcgaggatggccagaccgtgaggatgcctgtgggaaaaagggaaattttcattacgttcagggtgcagaaaagccctgtgttccggagggacggcgcagacatccactccgacctctttatttctatagctcaggctcttcttgggggtacagccagagcccagggcctgtacgagacgatcaacgtgacgatcccccctgggactcagacagaccagaagattcggatgggtgggaaaggcatcccccggattaacagctacggctacggagaccactacatccacatcaagatacgagttccaaagaggctaacgagccggcagcagagcctgatcctgagctacgccgaggacgagacagatgtggaggggacggtgaacggcgtcaccctcaccagctctggtggcagcaccatggatagctccgcaggaagcaaggctaggcgtgaggctggggaggacgaggagggattcctttccaaacttaagaaaatgtttacctcatgatatcccagccgaggaaaaagatccactggaaactaggccgggaagcagcagcccctccaagggccagggcacctgggagacgggaggattccagaacagcagcactgagctcccacccgcagagcctctggacggccttggcaacagcaaaatcatgggacaacacctctctccacggaaaggtcacagtggacagcccgggcagtaggatgcagccccagaggctggtggcagtttcctgtccattggtaggtgacggcccctggctcaggcagagggagatggttagactcttgcagggctaaaactctaatttggaattgaatattgtggatatcttagttaaaggccatgcttacagcttagaaatgaagccttaagctgcatcaagttacgaagtgattaatttccttctcagcaaacctccgggaggttccagaatgagttcttcctgacaggttgtcttcactgggagcgtggggcccccaggccccaccagcaccgtcctcccctaatgaggggccctgccgaggcatcagctgctctgctcagttagtttttattcccggggtaccaagcagctgcacagtcggtgcctgggaggcacgtagaggcccagagagtccctgggggttctgctctgaccgtgtgggtggtgatccttgtcaggatgtacagtccttgctcccaccccatccgggatggccgcctgtccctgactattgagtcctgttgttgtaagccaggcatggagggctcctgcccttctgctgagccacagcccattgcagcactgtgctggccagacttcagctgccttgggaactgaagccctgccactgttgctagtcaggggcttggttctcccacttacactgttgacatctattttctgaagtgtgtttaaattattcagtgctaatcattgttttttcctttgtaaatgttgattcagaaaaggaaagcacaggctaagcagttgaaggttccccaccattcagtgagagcagaacccccattccccagcctctgctggtagcatgtcgcagtttccatgtgtttcaggatcttcgggctgtcgttagacaggttaatgaagaacacttctcaacagtttcctttttgttttcctttataattcactaaaataaagcatctattagtgtctgatttaggaatgtaaaatgattctgtattaatgtaaataagattatctattgcaaaaagatatttcaaacctaaaaaaaaaaaaaaaaaaaa

SEQ ID NO: 2563 - DNA, 5388 bp, Homo Sapiens
  NM_005157
aaaatgttggagatctgcctgaagctggtgggctgcaaatccaagaaggggctgtcctcgtcctccagctgttatctggaagaagcccttcagcggccagtagcatctgactttgagcctcagggtctgagtgaagccgctcgttggaactccaaggaaaaccttctcgctggacccagtgaaaatgaccccaaccttttcgttgcactgtatgattttgtggccagtggagataacactctaagcataactaaaggtgaaaagctccgggtcttaggctataatcacaatggggaatggtgtgaagcccaaaccaaaaatggccaaggctgggtcccaagcaactacatcacgccagtcaacagtctggagaaacactcctggtaccatgggcctgtgtcccgcaatgccgctgagtatctgctgagcagcgggatcaatggcagcttcttggtgcgtgagagtgagagcagtcctggccagaggtccatctcgctgagatacgaagggagggtgtaccattacaggatcaacactgcttctgatggcaagctctacgtctcctccgagagccgcttcaacaccctggccgagttggttcatcatcattcaacggtggccgacgggctcatcaccacgctccattatccagccccaaagcgcaacaagcccactgtctatggtgtgtcccccaactacgacaagtgggagatggaacgcacggacatcaccatgaagcacaagctgggcgggggccagtacggggaggtgtacgagggcgtgtggaagaaatacagcctgacggtggccgtgaagaccttgaaggaggacaccatggaggtggaagagttcttgaaagaagctgcagtcatgaaagagatcaaacaccctaacctggtgcagctccttggggtctgcacccgggagcccccgttctatatcatcactgagttcatgacctacgggaacctcctggactacctgagggagtgcaaccggcaggaggtgaacgccgtggtgctgctgtacatggccactcagatctcgtcagccatggagtacctggagaagaaaaacttcatccacagagatcttgctgcccgaaactgcctggtaggggagaaccacttggtgaaggtagctgattttggcctgagcaggttgatgacaggggacacctacacagcccatgctggagccaagttccccatcaaatggactgcacccgagagcctggcctacaacaagttctccatcaagtccgacgtctgggcatttggagtattgctttgggaaattgctacctatggcatgtccccttacccgggaattgacctgtcccaggtgtatgagctgctagagaaggactaccgcatggagcgcccagaaggctgcccagagaaggtctatgaactcatgcgagcatgttggcagtggaatccctctgaccggccctcctttgctgaaatccaccaagcctttgaaacaatgttccaggaatccagtatctcagacgaagtggaaaaggagctggggaaacaaggcgtccgtggggctgtgagtaccttgctgcaggccccagagctgcccaccaagacgaggacctccaggagagctgcagagcacagagacaccactgacgtgcctgagatgcctcactccaagggccagggagagagcgatcctctggaccatgagcctgccgtgtctccattgctccctcgaaaagagcgaggtcccccggagggcggcctgaatgaagatgagcgccttctccccaaagacaaaaagaccaacttgttcagcgccttgatcaagaagaagaagaagacagccccaacccctcccaaacgcagcagctccttccgggagatggacggccagccggagcgcagaggggccggcgaggaagagggccgagacatcagcaacggggcactggctttcacccccttggacacagctgacccagccaagtccccaaagcccagcaatggggctggggtccccaatggagccctccgggagtccgggggctcaggcttccggtctccccacctgtggaagaagtccagcacgctgaccagcagccgcctagccaccggcgaggaggagggcggtggcagctccagcaagcgcttcctgcgctcttgctccgcctcctgcgttccccatggggccaaggacacggagtggaggtcagtcacgctgcctcgggacttgcagtccacgggaagacagtttgactcgtccacatttggagggcacaaaagtgagaagccggctctgcctcggaagagggcaggggagaacaggtctgaccaggtgacccgaggcacagtaacgcctccccccaggctggtgaaaaagaatgaggaagctgctgatgaggtcttcaaagacatcatggagtccagcccgggctccagcccgcccaacctgactccaaaacccctccggcggcaggtcaccgtggcccctgcctcgggcctcccccacaaggaagaagctggaaagggcagtgccttagggacccctgctgcagctgagccagtgacccccaccagcaaagcaggctcaggtgcaccagggggcaccagcaagggccccgccgaggagtccagagtgaggaggcacaagcactcctctgagtcgccagggagggacaaggggaaattgtccaggctcaaacctgccccgccgcccccaccagcagcctctgcagggaaggctggaggaaagccctcgcagagcccgagccaggaggcggccggggaggcagtcctgggcgcaaagacaaaagccacgagtctggttgatgctgtgaacagtgacgctgccaagcccagccagccgggagagggcctcaaaaagcccgtgctcccggccactccaaagccacagtccgccaagccgtcggggacccccatcagcccagcccccgttccctccacgttgccatcagcatcctcggccctggcaggggaccagccgtcttccaccgccttcatccctctcatatcaacccgagtgtctcttcggaaaacccgccagcctccagagcggatcgccagcggcgccatcaccaagggcgtggtcctggacagcaccgaggcgctgtgcctcgccatctctaggaactccgagcagatggccagccacagcgcagtgctggaggccggcaaaaacctctacacgttctgcgtgagctatgtggattccatccagcaaatgaggaacaagtttgccttccgagaggccatcaacaaactggagaataatctccgggagcttcagatctgcccggcgacagcaggcagtggtccagcggccactcaggacttcagcaagctcctcagttcggtgaaggaaatcagtgacatagtgcagaggtagcagcagtcaggggtcaggtgtcaggcccgtcggagctgcctgcagcacatgcgggctcgcccatacccgtgacagtggctgacaagggactagtgagtcagcaccttggcccaggagctctgcgccaggcagagctgagggccctgtggagtccagctctactacctacgtttgcaccgcctgccctcccgcaccttcctcctccccgctccgtctctgtcctcgaattttatctgtggagttcctgctccgtggactgcagtcggcatgccaggacccgccagccccgctcccacctagtgccccagactgagctctccaggccaggtgggaacggctgatgtggactgtctttttcatttttttctctctggagcccctcctcccccggctgggcctccttcttccacttctccaagaatggaagcctgaactgaggccttgtgtgtcaggccctctgcctgcactccctggccttgcccgtcgtgtgctgaagacatgtttcaagaaccgcatttcgggaagggcatgcacgggcatgcacacggctggtcactctgccctctgctgctgcccggggtggggtgcactcgccatttcctcacgtgcaggacagctcttgatttgggtggaaaacagggtgctaaagccaaccagcctttgggtcctgggcaggtgggagctgaaaaggatcgaggcatggggcatgtcctttccatctgtccacatccccagagcccagctcttgctctcttgtgacgtgcactgtgaatcctggcaagaaagcttgagtctcaagggtggcaggtcactgtcactgccgacatccctcccccagcagaatggaggcaggggacaagggaggcagtggctagtggggtgaacagctggtgccaaatagccccagactgggcccaggcaggtctgcaagggcccagagtgaaccgtcctttcacacatctgggtgccctgaaagggcccttcccctcccccactcctctaagacaaagtagattcttacaaggccctttcctttggaacaagacagccttcacttttctgagttcttgaagcatttcaaagccctgcctctgtgtagccgccctgagagagaatagagctgccactgggcacctgcgcacaggtgggaggaaagggcctggccagtcctggtcctggctgcactcttgaactgggcgaatgtcttatttaattaccgtgagtgacatagcctcatgttctgtgggggtcatcagggagggttaggaaaaccacaaacggagcccctgaaagcctcacgtatttcacagagcacgcctgccatcttctccccgaggctgccccaggccggagcccagatacgggggctgtgactctgggcagggacccggggtctcctggaccttgacagagcagctaactccgagagcagtgggcaggtggccgcccctgaggcttcacgccgggagaagccaccttcccaccccttcataccgcctcgtgccagcagcctcgcacaggccctagctttacgctcatcacctaaacttgtactttatttttctgatagaaatggtttcctctggatcgttttatgcggttcttacagcacatcacctctttgcccccgacggctgtgacgcagccggagggaggcactagtcaccgacagcggccttgaagacagagcaaagcgcccacccaggtcccccgactgcctgtctccatgaggtactggtcccttccttttgttaacgtgatgtgccactatattttacacgtatctcttggtatgcatcttttatagacgctcttttctaagtggcgtgtgcatagcgtcctgccctgccccctcgggggcctgtggtggctccccctctgcttctcggggtccagtgcattttgtttctgtatatgattctctgtggttttttttgaatccaaatctgtcctctgtagtattttttaaataaatcagtgtttacattagaa

SEQ ID NO: 2564 - DNA, 1665 bp, Homo Sapiens
  NM_005165
ccggaggagtcacgtagctctgcgacatccgcagcctcatttaccagagggagccagggctgcagcctcatctgtttgcggatcagaacccgagctgtgcttgtggctgcggctgctaactggctgcgcacagggagctgtcaccatgcctcactcgtacccagccctttctgctgagcagaagaaggagttgtctgacattgccctgcggattgtagccccgggcaaaggcattctggctgcggatgagtctgtaggcagcatggccaagcggctgagccaaattggggtggaaaacacagaggagaaccgccggctgtaccgccaggtcctgttcagtgctgatgaccgtgtgaaaaagtgcattggaggcgtcattttcttccatgagaccctctaccagaaagatgataatggtgttcccttcgtccgaaccatccaggataagggcatcgtcgtgggcatcaaggttgacaagggtgtggtgcctctagctgggactgatggagaaaccaccactcaagggctggatgggctctcagaacgctgtgcccaatacaagaaggatggtgctgactttgccaagtggcgctgtgtgctgaaaatcagtgagcgtacaccctctgcacttgccattctggagaacgccaacgtgctggcccgttatgccagtatctgccagcagaatggcattgtgcctattgtggaacctgaaatattgcctgatggagaccacgacctcaaacgttgtcagtatgttacagagaaggtcttggctgctgtgtacaaggccctgagtgaccatcatgtatacctggaggggaccctgctcaagcccaacatggtgaccccgggccatgcctgtcccatcaagtataccccagaggagattgccatggcaactgtcactgccctgcgtcgcactgtgcccccagctgtcccaggagtgaccttcctgtctgggggtcagagcgaagaagaggcatcattcaacctcaatgccatcaaccgctgcccccttccccgaccctgggcgcttaccttctcctatgggcgtgccctgcaagcctctgcactcaatgcctggcgagggcaacgggacaatgctggggctgccactgaggagttcatcaagcgggctgaggtgaatgggcttgcagcccagggcaagtatgaaggcagtggagaagatggtggagcagcagcacagtcactctacattgccaaccatgcctactgagtatccactccataccacagcccttggcccagccatctgcacccacttttgcttgtagtcatggccagggccaaatagctatgcagagcagagatgccttcacctggcaccaacttgtcttcctttctctcttcccttcccctctctcattgctgcacctgggaccataggatgggaggatagggagcccctcatgactgagggcagaagaaattgctagaagtcagaacaggatggctgggtctccccctacctcttccagctcccacaattttcccatgatgaggtagcttctccctgggctctccttcttgcctgccctgtctcctgggatcagagggtagtacagaagccctgactcatgccttgagtacataccatacagcaaataaatggtagcaaaacattctaaaaaaaaaaaaaaa

SEQ ID NO: 2565 - DNA, 1864 bp, Homo Sapiens
  NM_005170
ctggcggctcttgggactggcggggctgcgcgcggggttagggtgggggtacgggaaggctcaacccaggacctgcgtaccttgctttgggggcgcactaagcacctgccgggagcagggggcgcaccgggaactcgcagatttcgccagttgggcgcactggggatctgtggactgcgtccgggggatgggctagggggacatgcgcacgctttgggccttacagaatgtgatcgcgcgagggggagggcgaagcgtggcgggagggcgaggcgaaggaaggagggcgtgagaaaggcgacggcggcggcgcggaggagggttatctatacatttaaaaaccagccgcctgcgccgcgcctgcggagacctgggagagtccggccgcacgcgcgggacacgagcgtcccacgctccctggcgcgtacggcctgccaccactaggcctcctatccccgggctccagacgacctaggacgcgtgccctggggagttgcctggcggcgccgtgccagaagcccccttggggcgccacagttttccccgtcgcctccggttcctctgcctgcaccttcctgcggcgcgccgggacctggagcgggcgggtggatgcaggcgcgatggacggcggcacactgcccaggtccgcgccccctgcgccccccgtccctgtcggctgcgctgcccggcggagacccgcgtccccggaactgttgcgctgcagccggcggcggcgaccggccaccgcagagaccggaggcggcgcagcggccgtagcgcggcgcaatgagcgcgagcgcaaccgcgtgaagctggtgaacttgggcttccaggcgctgcggcagcacgtgccgcacggcggcgccagcaagaagctgagcaaggtggagacgctgcgctcagccgtggagtacatccgcgcgctgcagcgcctgctggccgagcacgacgccgtgcgcaacgcgctggcgggagggctgaggccgcaggccgtgcggccgtctgcgccccgcgggccgccagggaccaccccggtcgccgcctcgccctcccgcgcttcttcgtccccgggccgcgggggcagctcggagcccggctccccgcgttccgcctactcgtcggacgacagcggctgcgaaggcgcgctgagtcctgcggagcgcgagctactcgacttctccagctggttagggggctactgagcgccctcgacctatgagcctcagccccggaagccgagcgagcggccggcgcgctcatcgccggggagcccgccaggtggaccggcccgcgctccgcccccagcgagccggggacccacccaccaccccccgcaccgccgacgccgcctcgttcgtccggcccagcctgaccaatgccgcggtggaaacgggcttggagctggccccataagggctggcggcttcctccgacgccgcccctccccacagcttctcgactgcagtggggcggggggcaccaacacttggagatttttccggaggggagaggattttctaagggcacagagaatccattttctacacattaacttgagctgctggagggacactgctggcaaacggagacctatttttgtacaaagaacccttgacctggggcgtaataaagatgacctggacccctgcccccactatctggagttttccatgctggccaagatctggacacgagcagtccctgaggggcggggtccctggcgtgaggcccccgtgacagcccaccctggggtgggtttgtgggcactgctgctctgctagggagaagcctgtgtggggcacacctcttcaagggagcgtgaactttataaataaatcagttctgtttaaaaaaaaaaaaaaaa

SEQ ID NO: 2566 - DNA, 898 bp, Homo Sapiens
  NM_005176
ccacgttacggatcggcttactccgcggagttggcctcatttctgcagtcggcgctccctgtagtttctcctctcgaacgccaggtggagcaaccggccggataccgccacagccctggcaggcggcgctgtgatgcctgagctgatcctgtatgttgcaatcactctatccgtggctgagcgactcgttggcccgggtcacgcatgcgctgagccttcctttcgctcttcccgctgctccgcccctctctgtcttctctgcagtgggagcagctctcctgccacagctcctcaccccctgaaaatgttcgcctgctccaagtttgtctccactccctccttggtcaagagcacctcacagctgctgagccgtccgctatctgcagtggtgctgaaacgaccggagatactgacagatgagagcctcagcagcttggcagtctcatgtccccttacctcacttgtctctagccgcagcttccaaaccagcgccatttcaagggacatcgacacagcagccaagttcattggagctggggctgccacagttggggtggctggttctggggctgggattggaactgtgtttgggagcctcatcattggttatgccaggaacccttctctgaagcaacagctcttctcctacgccattctgggctttgccctctcggaggccatggggctcttttgtctgatggtagcctttctcatcctctttgccatgtgaaggagccgtctccacctcccatagttctcccgcgtctggttggccccgtgtgttccttttcctatacctccccaggcagcctggggaacgtggttggctcagggtttgacagagaaaagacaaataaatactgtattaataagatgtttcttgaaaaaaaaaaaaaaa

SEQ ID NO: 2567 - DNA, 1864 bp, Homo Sapiens
  NM_005178
gcgcccggcgaaaccaccctcccgtgcagccgagcccagccgctctccggccgccgtccccggcggccccatgccccgatgccccgcgggggccatggacgaggggcccgtggacctgcgcacccggcccaaggccgccggactcccgggcgccgcgctgccgctccgcaagcgcccgctgcgcgcgccctccccggagcccgccgctccccgcggcgctgcgggccttgtcgtccccctggaccctctgcgcggcggctgcgacctgccggcggtccccgggcccccccacggcctggcccggccggaggcgctttactaccccggagccttactgcctttgtaccccactcgggccatgggctccccgtttcctctggtgaacctgcctacacccctataccccatgatgtgccccatggaacaccccctttctgctgacatcgccatggccacccgtgcagatgaggacggagacacgcctctccatattgctgtggtgcagggtaacctgccagctgtgcaccggctggtcaacctcttccagcaggggggccgggagctcgacatctacaacaacctacggcagacaccgctccacctggctgtgatcaccacattaccgtctgtggtccggctcctggtgacagctggtgccagccccatggcgctggaccgccatggccagacggccgctcacctggcgtgcgagcaccgcagcccgacctgcctgcgagccctgctggacagcgcagctccgggcacgttggacctggaggcccgcaattatgacgggctcaccgccctgcacgtggcagtgaacaccgagtgccaagaaaccgtgcagctcttgctagagcgcggtgccgacatcgacgcagtggacattaagagcggccgctccccgctcatccacgccgtggaaaacaacagccttagcatggtgcagctgctgctgcagcacggcgccaacgtgaacgcgcaaatgtactccggcagctccgccctgcactcagcgtccggccgcgggctcctcccgctggtgcgcacgctggtccgcagcggcgctgacagcagcctcaagaactgccacaacgacacgccgctcatggtggcgcgcagccgcagggtcatcgacatcctgagggggaaggccacccggcctgcttccacctcccagccagacccctcccctgaccggagcgccaacacctcccccgagagcagcagccgcctcagctccaatggtcttctctccgcatcaccatcctcctcaccctcccagtctccccccagggacccccctggattccccatggctcctcccaatttcttccttccttccccatctccacccgccttcctgccctttgctggggtcctccgaggccctggccggccggtgcccccctccccagctccaggaggcagctgagggggatgggggggcagatcttggactcatgaggaggggcccccctgccctgtggggtcaacccttctggaaactgtgaagatctcactctgccccccccccccatcttcgggaccaggatttgcacagaagcacatgcacctacccatacaccccctcttctgagcacagatgttcccccatctcgctccctcccaggactctgaccccagcattctcaggcaccagtccctgtccggaatgccacccacatcttccatttccatgtcccctcccagagctggtggacccagggaacagccactcccctccactctctaccagataactgaggaggggagaggtgggccgtaacgggcacggatcacgatgtaaattattaagcattttggttggatttcttttgtaataaactatttttgtaccata

SEQ ID NO: 2568 - DNA, 3435 bp, Homo Sapiens
  NM_005180
acagcaactatgaaataatcgtagtatgagaggcagagatcggggcgagacaatggggatgtgggcgcgggagccccgttccggcttagcagcacctcccagccccgcagaataaaaccgatcgcgccccctccgcgcgcgccctcccccgagtgcggagcgggaggaggcggcggcggccgaggaggaggaggaggaggccccggaggaggaggcgttggaggtcgaggcggaggcggaggaggaggaggccgaggcgccggaggaggccgaggcgccggagcaggaggaggccggccggaggcggcatgagacgagcgtggcggccgcggctgctcggggccgcgctggttgcccattgacagcggcgtctgcagctcgcttcaagatggccgcttggctcgcattcattttctgctgaacgacttttaactttcattgtcttttccgcccgcttcgatcgcctcgcgccggctgctctttccgggattttttatcaagcagaaatgcatcgaacaacgagaatcaagatcactgagctaaatccccacctgatgtgtgtgctttgtggagggtacttcattgatgccacaaccataatagaatgtctacattccttctgtaaaacgtgtattgttcgttacctggagaccagcaagtattgtcctatttgtgatgtccaagttcacaagaccagaccactactgaatataaggtcagataaaactctccaagatattgtatacaaattagttccagggcttttcaaaaatgaaatgaagagaagaagggatttttatgcagctcatccttctgctgatgctgccaatggctctaatgaagatagaggagaggttgcagatgaagataagagaattataactgatgatgagataataagcttatccattgaattctttgaccagaacagattggatcggaaagtaaacaaagacaaagagaaatctaaggaggaggtgaatgataaaagatacttacgatgcccagcagcaatgactgtgatgcacttaagaaagtttctcagaagtaaaatggacatacctaatactttccagattgatgtcatgtatgaggaggaacctttaaaggattattatacactaatggatattgcctacatttatacctggagaaggaatggtccacttccattgaaatacagagttcgacctacttgtaaaagaatgaagatcagtcaccagagagatggactgacaaatgctggagaactggaaagtgactctgggagtgacaaggccaacagcccagcaggaggtattccctccacctcttcttgtttgcctagccccagtactccagtgcagtctcctcatccacagtttcctcacatttccagtactatgaatggaaccagcaacagccccagcggtaaccaccaatcttcttttgccaatagacctcgaaaatcatcagtaaatgggtcatcagcaacttcttctggttgatacctgagactgttaaggaaaaaaattttaaacccctgatttatatagatatcttcatgccattacagctttctagatgctaatacatgtgactatcgtccaatttgctttcttttgtagtgacattaaatttggctataaaagatggactacatgtgatactcctatggacgttaattgaaaagaaagattgttgttataaagaattggtttcttggaaagcaggcaagactttttctctgtgttaggaaagatgggaaatggtttctgtaaccattgtttggatttggaagtactctgcagtggacataagcattgggccatagtttgttaatctcaactaacgcctacattacattctccttgatcgttcttgttattacgctgttttgtgaacctgtagaaaacaagtgctttttatcttgaaattcaaccaacggaaagaatatgcatagaataatgcattctatgtagccatgtcactgtgaataacgatttcttgcatatttagccattttgattcctgtttgatttatacttctctgttgctacgcaaaaccgatcaaagaaaagtgaacttcagttttacaatctgtatgcctaaaagcgggtactaccgtttattttactgacttgtttaaatgattcgcttttgtaagaatcagatggcattatgcttgttgtacaatgccatattggtatatgacataacaggaaacagtattgtatgatatatttataaatgctataaagaaatattgtgtttcatgcattcagaaatgattgttaaaattctcccaactggttcgacctttgcagatacccataacctatgttgagccttgcttaccagcaaagaatatttttaatgtggatatctaattctaaagtctgttccattagaagcaattggcacatctttctatactttatatacttttctccagtaatacatgtttactttaaagattgttgcagtgaagaaaaacctttaactgagaaatatggaaaccgtcttaattttccattggctatgatggaattaatattgtattttaaaaatgcatattgatcactataattctaaaacaattttttaaataaaccagcaggttgctaaaagaaggcattttatctaaagttattttaataggtggtatagcagtaattttaaatttaagagttgcttttacagttaacaatggaatatgccttctctgctatgtctgaaaatagaagctatttattatgagcttctacaggtatttttaaatagagcaagcatgttgaatttaaaatatgaataaccccacccaacaattttcagtttattttttgctttggtcgaacttggtgtgtgttcatcacccatcagttatttgtgagggtgtttattctatatgaatattgtttcatgtttgtatgggaaaattgtagctaaacatttcattgtccccagtctgcaaaagaagcacaattctattgctttgtcttgcttatagtcattaaatcattacttttacatatattgctgttacttctgctttctttaaaaatatagtaaaggatgttttatgaagtcacaagatacatatatttttattttgacctaaatttgtacagtcccattgtaagtgttgtttctaattatagatgtaaaatgaaatttcatttgtaattggaaaaaatccaataaaaaggatattcatttagaaaatagctaagatctttaataaaaatttgatatgaaaagcacaatgtgcagaagttatggaaaacctatagaggattacaacaggtaaacgttaaagagaatacattgctgacttatagtgatgtggctaagaagtacatgctttgttgtaaaattgcttgaaagcccattgaaagatgtatctgtttatttacagtctttgaagtaaaagttaccaatgtttgccaataaaaa

SEQ ID NO: 2569 - DNA, 3110 bp, Homo Sapiens
  NM_005186
gaggaagcggggtaggagccccaggaggaggaggaggagaaggagagagggagggcggagggcggaggggcggcgggaggagggcggggaggagcgctcttcctggttgggccctgccctgagctgccaccgggaagccagcctcagggactgcagcgacccccaaacacccctcccccaggatgtcggaggagatcatcacgccggtgtactgcactggggtgtcagcccaagtgcagaagcagcgggccagggagctgggcctgggccgccatgagaatgccatcaagtacctgggccaggattatgagcagctgcgggtgcgatgcctgcagagtgggaccctcttccgtgatgaggccttccccccggtaccccagagcctgggttacaaggacctgggtcccaattcctccaagacctatggcatcaagtggaagcgtcccacggaactgctgtcaaacccccagttcattgtggatggagctacccgcacagacatctgccagggagcactgggggactgctggctcttggcggccatcgcctccctcactctcaacgacaccctcctgcaccgagtggttccgcacggccagagcttccagaatggctatgccggcatcttccatttccagctgtggcaatttggggagtgggtggacgtggtcgtggatgacctgctgcccatcaaggacgggaagctagtgttcgtgcactctgccgaaggcaacgagttctggagcgccctgcttgagaaggcctatgccaaggtaaatggcagctacgaggccctgtcagggggcagcacctcagagggctttgaggacttcacaggcggggttaccgagtggtacgagttgcgcaaggctcccagtgacctctaccagatcatcctcaaggcgctggagcggggctccctgctgggctgctccatagacatctccagcgttctagacatggaggccatcactttcaagaagttggtgaagggccatgcctactctgtgaccggggccaagcaggtgaactaccgaggccaggtggtgagcctgatccggatgcggaacccctggggcgaggtggagtggacgggagcctggagcgacagctcctcagagtggaacaacgtggacccatatgaacgggaccagctccgggtcaagatggaggacggggagttctggatgtcattccgagacttcatgcgggagttcacccgcctggagatctgcaacctcacacccgacgccctcaagagccggaccatccgcaaatggaacaccacactctacgaaggcacctggcggcgggggagcaccgcggggggctgccgaaactacccagccaccttctgggtgaaccctcagttcaagatccggctggatgagacggatgacccggacgactacggggaccgcgagtcaggctgcagcttcgtgctcgcccttatgcagaagcaccgtcgccgcgagcgccgcttcggccgcgacatggagactattggcttcgcggtctacgaggtccctccggagctggtgggccagccggccgtacacttgaagcgtgacttcttcctggccaatgcgtctcgggcgcgctcagagcagttcatcaacctgcgagaggtcagcacccgcttccgcctgccacccggggagtatgtggtggtgccctccaccttcgagcccaacaaggagggcgacttcgtgctgcgcttcttctcagagaagagtgctgggactgtggagctggatgaccagatccaggccaatctccccgatgagcaagtgctctcagaagaggagattgacgagaacttcaaggccctcttcaggcagctggcaggggaggacatggagatcagcgtgaaggagttgcggacaatcctcaataggatcatcagcaaacacaaagacctgcggaccaagggcttcagcctagagtcgtgccgcagcatggtgaacctcatggatcgtgatggcaatgggaagctgggcctggtggagttcaacatcctgtggaaccgcatccggaattacctgtccatcttccggaagtttgacctggacaagtcgggcagcatgagtgcctacgagatgcggatggccattgagtcggcaggcttcaagctcaacaagaagctgtacgagctcatcatcacccgctactcggagcccgacctggcggtcgactttgacaatttcgtttgctgcctggtgcggctagagaccatgttccgatttttcaaaactctggacacagatctggatggagttgtgacctttgacttgtttaagtggttgcagctgaccatgtttgcatgaggcagggactcggtcccccttgccgtgctcccctccctcctcgtctgccaagcctcgcctcctaccacaccacaccaggccaccccagctgcaagtgccttccttggagcagagaggcagcctcgtcctcctgtcccctctcctcccagccaccatcgttcatctgctccgggcagaactgtgtggcccctgcctgtgccagccatgggctcgggatggactccctgggccccacccattgccaagccaggaaggcagctttcgcttgttcctgcctcgggacagccccgggtttccccagcatcctgatgtgtcccctctccccacttcagaggccacccactcagcaccaccggcctggccttgcctgcagactataaactataaccactagctcgacacagtctgcagtccaggcgtgtggagccgcctcccggctcggggaggccccggggctgggaacgcctgtgccttcctgcgccgaagccaacgccccctctgtccttccctggccctgctgccgaccaggagctgcccagcctgtgggcggtcggccttccctccttcgctccttttttatattagtgattttaaaggggactcttcagggacttgtgtactggttatgggggtgccagaggcactaggcttggggtggggaggtcccgtgttccatatagaggaaccccaaataataaaaggccccacatctgtctgtgaaaaaaaaaaaaaaaaaaaaaaaaaaaaaaaaaaaaaaaaaaaaaaaaaaaaaaaaaaaaaaaa

SEQ ID NO: 2570 - DNA, 4372 bp, Homo Sapiens
  NM_005187
acagctggctgcctcacccgcaggctgcagggagaccttccccagcctgcagccccaggcccgccccgcgtcacatgagccccagggctcccaccccctccccagggcagaggacacccagttggtggccgggagggcctcggctttccagggacagaggcccaactccaggacgccccagctggcccagcccctcctctttccctcaaggctgcaggaggtcgggaaaggcagtcctggtagaggcctgtcctgggctccaggttggcccctgagggtggccctcctcatgccggcttcaagactgagggacagggcagccagttcagcctcgggatccacctgtggctccatgtcccagacgcaccctgtgctggagagcggcctcctggcatctgccggctgctccgcaccccggggtcccaggaagggcggcccagccccagtggacaggaaagctaaggcctcagcgatgccggactccccagcggaggtgaagacgcagccccggtccacaccccccagcatgccgcccccaccgcctgccgcatcccagggggccacacgccccccctccttcacgccacacacacatcgagaggacgggcctgcgacgctgccccacggccgttttcatggctgcttaaaatggtctatggtctgtctcttgatgaacggcagcagccactcaccaacagccatcaatggtgcaccgtgcacacccaacggcttcagcaatggcccggccacctcgtccacagcctccttgtccacacagcacctgcccccagcctgcggggcccggcagctcagcaagctcaagcgcttcctcaccacactgcagcagtttggcagcgacatctccccagagattggggagcgcgtgcgcacactggtgctgggcctggtgaactcgacattgacgatcgaggagtttcattccaagcttcaggaggccaccaacttccctctgcggccgtttgtcattcccttcctgaaggcaaacctgcccttgctgcagcgggagctcctgcactgtgcacgcctggccaagcagacgcccgcccagtacttggcccagcatgagcagctcctgctggacgccagcgcctcctcccccatcgactcctcagagctgctactggaagtcaacgagaacggcaagaggaggacgcccgacaggaccaaagagaacgggtcagaccgcgacccgctgcaccccgagcacctcagcaaacggccatgcaccctgaaccctgcccagcgctacagccccagcaacgggccaccgcagcccacaccgccgccgcactaccgcctggaggacatagccatggcccaccacttccgagatgcctaccgccacccagacccccgggagctacgagagcgccatcggccgcttgtggtgcctgggtcccggcaggaagaagtgatcgaccacaagctcacagagcgtgagtgggcagaagagtggaagcacctcaacaacctcctgaactgcatcatggacatggtggagaagacgcggcgctcgctcacggtgctgcgcaggtgccaggaggccgaccgcgaggagctcaaccactgggcgcggcgctacagcgacgccgaggacacaaagaagggccccgctcccgccgcggcccggccccgcagcagctccgccggtcccgaagggcctcagctagacgtgcctcgcgagttcctgccgaggaccctcaccggctacgtgcctgaggacatctggaggaaggctgaagaggccgtgaatgaggtgaagcggcaggccatgtcggagctgcagaaagccgtgtcggacgcggagcgcaaagcgcacgagctcatcaccacggagcgtgccaagatggagcgggccctggccgaggcgaagcggcaggcctccgaggacgccctgacggtcatcaaccagcaggaggactccagcgagagctgctggaactgcgggcggaaagccagtgagacgtgcagcggctgcaacgcggcacgctactgcgggtccttctgccagcatcgggactgggagaagcatcaccacgtgtgtggccagagcctgcagggccccacagccgtggtggccgacccggtgcctggaccgcccgaagccgcccacagcctgggcccctccctgcctgtgggtgctgccagccccagcgaagccggctctgcggggccttctcgccccggctcccccagcccacctggcccactggacaccgtgccccgctgaccccactggcccctggcctgccggacacagcaccgtgccaaccccacccagctccaggcccaccggatgctgtgcctggcctccgatgcctggcctgccagacactgcgccccgcctgacctgggggagccgaccaattagtcactgctgctactgcccctctccgaaagaagacacagaaccaacaaaaccgcattcagtgcacctgcctcagctacctaatgattccgcgcggagacctcctgacaacgtctcttcaagcatcctcagaagcctcgactgagctttagacagcagagcagatgccgcaggcgcggcggctctgcccacctctcttttcctctctgtctgtctctccccctctgtcttctctatcctctctctctctatgactatcacacactttctcttcaatgaaaaaatcgaattggtggcttatattttcagcaaagaattttggggggttttgtgtgttggcaaaagagctactcagaaatggacaaagaaaacgggggggttctccccctcctgattaaaaagggagaaagaaaactgcgattttatagctggagatctgaacccagctgtgcccctcccccaggggcgtgaggctgatcagcgaagacgggaggaaagatttcgatttctgactcaagatgcatttttggtttcagatttttttttcctgtaatgttaaactctttggctttaagtaaaaatccaaaaagtttttttaaaaaagcaaaggaagcatacttgtgaactaccttgctagctagccagccaaggataccggacacacctctgctccaaaggaaatccaaaaaagcaaacacaagaaatcaaaatccaaaatttgtttgtcactgccaaagtatttttttcactgtttcacttgctcttgggtttgtttggatgtgggtctttttctcttctgttctgattttgtttgtgggtgtcgggatatttgggtgcagagggtttgtgcccagttagaagcgacttttgttctcttctgcgtaggcgttggtgcgtccgccgcgtgtgcgtggtccgtgtgccgttgctccggcctgcgtctccatatgtgtaggaaaggacacgccgtctgtcctcacgccccctgtgacttttcatatttccgttttccacttgtggaaaaaaagtgctaaagttttcttcccagagagagcataattccgaaacaaaactgtgacaatcttttgggttgattctcgactgcttttcgagcatgcggagccagcaggcctccctgaaacactgcttctcggccagcccgtcctcctctacctctctcctctccgcgccctccgacctctctcggccccctcaccccagctccgacctctctcagccccatcgccccaactccaacctctcggccccatcgccccaccgcagctactcccctttcttccaaacttttgcagaaaaaacaaaaaaactacaaacaaaagcagccctctgcctcctccccagggaagaccctgaccgtgtacatagccctggtgctcctgcccagccacccctcagatgcgttcgcctctggccctggggtgtgtctcggtgacgttttctatcagacgtgctccctcccatcctccagccctgcccaccctccctccactcctctcaactgcctcagcgatttcaagaaggaaataaagggataaagaaattcatgcttgcaccgagtacaaggacagacagcaggcacggcccgcagcctggcatctgtgcgtgtggcgtggcccgtggcttggcatctgtgtgcgtggtgtggcccgtggcctggcatctgtgtgcgtggcgtggcccgtggcctggcatctgtgtgtgtggcgtggcccgtggcctggcatctgtgcgcgtggcgtggcccgtggcctggcatctgtgtgcgtggctatcaggagttctaggaactcagtgcaatacgggagtgacccagctactgaaccagccacgaacagcccgccagaggcctgaagctgagcgtgtacgttaatgtgaatgtatatagtctttgcagaggtccaaatgatattcatgatggtaataaacgagatgtttgccaaataaaaaacagaaaccgcagga

SEQ ID NO: 2571 - DNA, 11242 bp, Homo Sapiens
  NM_005188
cccggatagccggcggcggcggcggcggcggcggcggcggcggccgggagaggcccctccttcacgccctgcttctctccctcgctcgcagtcgagccgagccggcggacccgcctgggctccgaccctgcccaggccatggccggcaacgtgaagaagagctctggggccgggggcggcagcggctccgggggctcgggttcgggtggcctgattgggctcatgaaggacgccttccagccgcaccaccaccaccaccaccacctcagcccccacccgccggggacggtggacaagaagatggtggagaagtgctggaagctcatggacaaggtggtgcggttgtgtcagaacccaaagctggcgctaaagaatagcccaccttatatcttagacctgctaccagatacctaccagcatctccgtactatcttgtcaagatatgaggggaagatggagacacttggagaaaatgagtattttagggtgtttatggagaatttgatgaagaaaactaagcaaaccataagcctcttcaaggagggaaaagaaagaatgtatgaggagaattctcagcctaggcgaaacctaaccaaactgtccctcatcttcagccacatgctggcagaactaaaaggaatctttccaagtggactctttcagggagacacatttcggattactaaagcagatgctgcggaattttggagaaaagcttttggggaaaagacaatagtcccttggaagagctttcgacaggctctacatgaagtgcatcccatcagttctgggctggaggccatggctctgaaatccactattgatctgacctgcaatgattatatttcggtttttgaatttgacatctttacccgactctttcagccctggtcctctttgctcaggaattggaacagccttgctgtaactcatcctggctacatggcttttttgacgtatgacgaagtgaaagctcggctccagaaattcattcacaaacctggcagttatatcttccggctgagctgtactcgtctgggtcagtgggctattgggtatgttactgctgatgggaacattctccagacaatccctcacaataaacctctcttccaagcactgattgatggcttcagggaaggcttctatttgtttcctgatggacgaaatcagaatcctgatctgactggcttatgtgaaccaactccccaagaccatatcaaagtgacccaggaacaatatgaattatactgtgagatgggctccacattccaactatgtaaaatatgtgctgaaaatgataaggatgtaaagattgagccctgtggacacctcatgtgcacatcctgtcttacatcctggcaggaatcagaaggtcagggctgtcctttctgccgatgtgaaattaaaggtactgaacccatcgtggtagatccgtttgatcctagagggagtggcagcctgttgaggcaaggagcagagggagctccctccccaaattatgatgatgatgatgatgaacgagctgatgatactctcttcatgatgaaggaattggctggtgccaaggtggaacggccgccttctccattctccatggccccacaagcttcccttcccccggtgccaccacgacttgaccttctgccgcagcgagtatgtgttccctcaagtgcttctgctcttggaactgcttctaaggctgcttctggctcccttcataaagacaaaccattgccagtacctcccacacttcgagatcttccaccaccaccgcctccagaccggccatattctgttggagcagaatcccgacctcaaagacgccccttgccttgtacaccaggcgactgtccctccagagacaaactgccccctgtcccctctagccgccttggagactcatggctgccccggccaatccccaaagtaccagtatctgccccaagttccagtgatccctggacaggaagagaattaaccaaccggcactcacttccattttcattgccctcacaaatggagcccagaccagatgtgcctaggctcggaagcacgttcagtctggatacctccatgagtatgaatagcagcccattagtaggtccagagtgtgaccaccccaaaatcaaaccttcctcatctgccaatgccatttattctctggctgccagacctcttcctgtgccaaaactgccacctggggagcaatgtgagggtgaagaggacacagagtacatgactccctcttccaggcctctacggcctttggatacatcccagagttcacgagcatgtgattgcgaccagcagattgatagctgtacgtatgaagcaatgtataatattcagtcccaggcgccatctatcaccgagagcagcacctttggtgaagggaatttggccgcagcccatgccaacactggtcccgaggagtcagaaaatgaggatgatgggtatgatgtcccaaagccacctgtgccggccgtgctggcccgccgaactctctcagatatctctaatgccagctcctcctttggctggttgtctctggatggtgatcctacaacaaatgtcactgaaggttcccaagttcccgagaggcctccaaaaccattcccgcggagaatcaactctgaacggaaagctggcagctgtcagcaaggtagtggtcctgccgcctctgctgccaccgcctcacctcagctctccagtgagatcgagaacctcatgagtcaggggtactcctaccaggacatccagaaagctttggtcattgcccagaacaacatcgagatggccaaaaacatcctccgggaatttgtttccatttcttctcctgcccatgtagctacctagcacaccatctccctgctgcaggtttagaggaccagtgagttgggagttattactcaagtggcacctagaagggcaggagttcctttggtgacttcacagtgaagtcttgccctctctgtgggatatcacatcagtggttccaagatttcaaagtggtgaaatgaaaatggagcagctagtatgttttattattttatgggtcttgagtgcatttgaaggtgtccttcagttcccacgtagagagagtgtggattatattacatgataacctacctggggaacagtccagaaagctatagaacaagtattttgctggaaatcctaattgaggacttaagacttcctgggttaaggatgtggccgtgtgtgtgtgtgtctgcctgtggttgtatgtgtccttgtgattataagattaacctgctgtgtgtgttaattccaggcagggaattagcacaaaaggtttaggaaggaatctttttttaaagacttccatctactgtggtattatacccaagcctagtgtgtattacaacttcaacactcccctttggcttatattaccatgtgcatagctaaagtcttctatttttagaacaccttctgtctgttctttccccatcaactccttcctcatccttcttggtgttctgtcatgggccatgggcttgctatggccagccttactgaggccaagcagcttatgggatgttctttattgtgtgtgatggtattggtttgtttggtagataagtgggaggaaaagtactgttgctacactattataggcatgtttgatactagcagctaacactggtcactccaaagcactgtttctataggaacattgaagctattaagatgttttgattatcctaattacataatgaccgatttgagatagaggcctttaaatacattccatgccctccccagaaaatagtctgtgggagtcagttgccttggtgccaggtatgtgttctgatgtaggtcatgagtctttctacttaatgggaagggaagaacatttgtttccaggatgactttctggccagaataccggaaagcttttaggaagcttcgttcacatgctatttaaatgcacaaaatagacagtaaggatttatctgttcagtttttcttcccagtgaattaatttcagcttatatgggtgtcttcatttgaacatgaggaatattaggttatattttcagcagtggttttttcctttgccctttaaggagtggggataatgtccacggtggcccagcctcttgctgatggcaccttccctgcattgctgcctcccgatgatgtggttcttttcttgtgcctgtggctttgggaatgtaacatctctttcctcctttccttcccttttcctcttcacctgaggtcctaaatactctctgtaattactgtgttcttcacggtaattagacatcattcagtgaataaattactgtagtcaaagacagtatgggctggcagtttgtgtaattgcaagttcataaagagaattgagggtccagttgggagaactattagtcagttcttttatatgctgataaatgatccctcgagttcagttagtattctgtccagagtgtttagctcactttcttagcagtgtgtaagctttctccatgtcagaagcaagcctgctctttgataaatctgtcttcctgaaaatctaaatcatgcttttgtctttagatctacacagaaatgaccctccttggatcagttttctttccagtctaatcatctttggaactaaaacttgttctaactcgtctcttggcattcagctactcctagatcttttggttttatcccctggcctcagagccatttatattcccagagtaggcagtacaggatctcgtgttgatttgctgtggttacccagtgtcttctctacatggcataaagcggcaaagcccaccattaggtgaggcggtcccgagttgaggtagagtggggcagaggaagatggcagtgaatatcaaacagtagaccgccatcaacttctaacagccagtacacacactgtttcattttgaggtaacgttcagttttgcattttgtttaaatattgaaggcctagacaaagaactagaaaaaaaaaagcagtttccaggcccatccatattgtaatttttctttatctgcagatattgcctgtagtctaaagatctctttggaagacaaagcattggctatatatcttttgccttttccatgcatctaaatcttctctggagattatctccctactgtgtaggttaagggcagtctcgacttttccttttttgagtcctgtgtggctctttgaatcagcgtgaaactgaggctccagctccctgtgttgtgtgtgtgtgccatccatgggcttgggtgtcagtttgtcacaggtatctgccagcattcaaggttttggatcatttcatgaggatctttcctttgactgggtgctgtgaggacacacctgggtctgtgcctgagattgccaggcaagattaaggaaagttttcatgtggcttttgttttgaggttattctcaaaaccttaatttcttatattttctgttgactaaggcaccagtaacccattcttcaccctccatttgtatggcaatttaaaagtctttggctttgctctgaatttaattaaaactgccttttatgaacagacttcgagttttgccattttgggcaagcccttccgcttgtcccttcctagtggctaataaagtaaaaaaacccacactactttgttctctttttctcatattcattgggctgttgtattcagccagtctcatgctttccctgggtcttcacggattgctttccaagctgccttgttgcggggttgctgcagagcagcaactggacctttccagctgtcgccatgttccttccactaaagtagagggttcttaaaatggaaaaacctgtgggctcttcatatacctccctttagttaagtaatagaccaggcagcttctcatctcagcatttacctgttaatatttttgtgaatagtgctctctacctgtgggtggccgttctcttccacttgctcgtctccccccagccccattctgcataatctaccattcttctcctctctttctcttcttatacagaccctcattactggggcccaagatgtgggatactactgttagtattatttaactattttgtagatttaaaagatttctggttaagggaggtgggggtcactgttcatcactcttaaaatatgtgttttctctatagaaaagtaaaatgtgtttatggtcccaaacagtcaactcacaaatttttataacaaaatttccttgtaaaaactagggaccatctatatattccctttaagatctagttctttttgtaggtgttcagcaatggtgataaagcagaatattctcctacctcacgtcattaaagtcagaagattatagaccttctcaaactataagtccctcttcttgccgttggcctttctgactctggaatgaccactgttcattgaaaaatagttttctgactattggtctggctctaacagtttgtttgttcatccagcaaatgtttatgagtgatgaccatgtgccagaaatgtcaggtatgtgtccttcccttggcgccacatagtagtttactaatgtttgggggattgtacttggactgtcatagcctctgcgtttgaccttaaaatagctcttcccagtaagattgtgcaatttttattcacagctcttccatgtagacttacctttcctcatagagctatcctggttaataacaggccaagattctcccattatcccctgttgtctcctgtagctttgataatgcctgggagattccttggtgtaagtgtcatggataccgactgtttttatgttggaatttgttccaacataattagaatctgtttggtgagttgaaaggtaagttggctcagagttgcacagtagggcattaaatgtttaagcaaagcatctgcccacactcccctttccaatctagtgccttccttgaactttttcctgagctgctacgtccctaatcccccttgttgggaggattttcgtatcacccttatgggacctgtcaccatgtcctgtactatttggaattggttttccagtctttcaacaaccgttgtggctaactatgttttagaagggctggaggtgtgggccctgtcttcgggtctcaggacccaaagatcctttagtcagttgttgggtcttccaagagccagacattaatacagattgaactccatcagtcccctaattgtcagcctttacctccctcccagagcaaggagtttagggattctaaagcttagtgtccacacatcattctaccagaccttagagctttagaagctcaatctaaaatactgtaactcagcataaactattactatcactcctttgaactcagtctccatgagcagtgttttgttggaaatacatagaacggcttaatgcctagagggtggtggatagtgaaggacggtcaaggttatatttttgactgcttagggattctttggatccaagaaacagaaatgttcaagcggaataaaggagggagtggagttgtggtaaggatgcagggtatttcgcagaacccaggacgggaagtgcctttggttcttgggtggagctggaactgcagagctttgcacctagtcctttctcccgcttcacagtctgcttatggtatatgtggcccccaaataggcactctagtcctcaagtctacaccaccttccaactctggggatcaccatgaacaaattctcaatttcccatacttaattttttttttttttgagatggagtctcgctgtgtcgcccaggctggagtgcagtggtgcagtctcaactcaccacaacctctgcctcccaggttcaagcagttctctgcctcaacctcccgagtagctgggattacaggcgcctgccaccatgcccagctaatgttcatatttttagtagagacagggtttcaccgtcttggctaggctggtcttgaactcctgaccctcatgatccacccacctcggcctcccaaagtgctaagattacaggcgtgagccaccgcgcccggcccatacttcgtattcttaaaaaaaactacactcagcccagcacattgatcaagtatctatctctgagcagttggccttgccagggagagcagagatgtggcaggctccttcagctggagacagggagcttctcagagaagtgagcagagactccacagacaccctaaaaaggcttctactcaagaagtaaagccactactcctgcctttttgcttagtggacaggaaggcacaggagtttgtctgggacatcatagaaattcttaggtttaacttaattctggtcattgtcttctttatttcctgtttttcttccctttgtcagtcttcgcatccaagatttcttccctccctcttgtgggccagcctgtcctgttccagagctagcctgttcctgggtagccttccttagcctccattcagcctcaggtcttttgccttcttccgtgtttatttagagagcagaatctaataacgggttccactgtagccactatccatggacttctgggtcctcttcaggtttgagtgcttgaaaatgttcattctctgggcttgtggcctgtctcctccactctcctcctcaccctctcgctccttcctgtgtgagggccgctctgcagtaatgttctcaggcaagccttcctaggcacctcagaaactactttgccagagccagtaagaatatataatattggagcagttgccaggatagaaattaaatatagattccagtttaggatagagtttttaccgagagctctttagacagtatacctgtgtcttctctggcaattgctttcattttagtcctatataaaagctttccttttctgtttttttttaaaactatgcttttgcttgcctaaatcttttgatcttatatttctctcatctcagagcctgtcctgagttgtaaggtatttcatactgccttacttaaaagttttttaaactactagagtcatttgatacacacagaagttacctaataatccaaagatgtccatcaagggaggaagggtgggtcatcagactttgcctttgatgttgtagactaggctcctgagttaagcagcagagggacagcagtgccatgtgccttcactgtgtcccaggaaatctgggttggttccagtgggaaataccagtatttcttggttctggaaagtagcaaaagagtaggagatggggaaatagggatggggagagcaagccccgcatgtccatggcgagtcaggtggggagcacgggtggaagggccggctgttgacagacagactaagctgtgtggtgctcttgccgccccttcctgggtacagagcttgagaaaaatgcagccgaccactccctgtgtttgtacagagcaaagcccaaaagccaacctcagatctcctgatttggcagctgaagaaatcagcagagtcctgattgcctgattcagtcccaaaaatgaatgtcaggccccgccccctccccaccaacattgcctctcctacattctccttctgcccctaaatcagacaggaggccagagaggagtattgctcaatgcgtgctatgtgcaactcctcaggccttgtgccacctccatgctgagccctgaagcagggtgtcctgggtgcctgtgtgtcagctccctcctctctacctacctctgaccttcttgtgggtgagggtggccatgcttatggccatcttaaaactggagaggcagagaactacttatgagtctgtagaccacgtgttgtcttccatggcctgtttctcctgctgtctgggtgagtgagcctgcaacgcaatgcccatgagagtaaatgcctcctgacctaccctgctcagcactgttctagtgtcttggccttgaaagaaaagcctgacttcctgctgacacatgtggtaggggcatggcagctatgaggcacctcctacgtctgttttctggctgtggtgacttgggatttttaaccttatatatctttttcctttactcaaaacaaaacaatttttagcacactgaaaaaaaaaaaaagccaaatgttttgtgcctttctaaggcagcactgtatcccaggctgcattttaggacttaatatggaaataccagagtctgagctcctctaccttgagtttcattagtccttagtgtctaggagacaggaaagaatgctctctgtgactggagaggtgacatgcaggtgcagtgtgtctggagtccctttcccctgctgtgagacttcagtggaggagagaagcattgtaccctgggatcatttggttggttccaatcacaagcttagttatcaggttgcatgccttgtctcctgcaaaagacagaatgtttcacaattcccaggtaaactctggaccattccaagtgtcctagccttctgatgacattaattacctagttgtgtcgaggagtataggatggactctcctgagaaggggaggttggtggctttgtcttttctttttgctggatcctgaactggtctagacctcctgcccccaccccccagcccccatcagatgtggctggcctttcatttgaaggcttcagacttaaagcattaagcagctagtgccctctgcagggcctggtttccccagggaagggcagcaaggaacatgggaccagaagcctgtcctcagtaatgtgactatagtgagctttagcaaaagtttttctatataatgacatcttacttatcttttaccctttcctcagttttcccctgcctttaactaataaagaattgggagacagaaattttaaagtcctccttattcaagattttgaaattcttagcctgggagtgctggagagaacctgatgctttctccagaatgaagagtcccaatttgtatatcagtgttaagaagaaaacaaaacaaacacataggtgagattttcgtggactattttaaaaatgtgtcattaatataaaaaatttatattagcagtatttaatcattctcacctgtaaagaataagaaaaacagaaggtaaatattcttacagagaatagcagagctttaagattcattttcattttaagtccattttattttgccagtgtattaatgtttagaagtctgttttactaatgttatttattaattttttttcatttccatacacagttagttaactaaagagctttttcaagcacccatgtctgtaaaaaaatatttttaaataaagtttcttttgttgtagcagaaaaaaaaaaaaaaaa

SEQ ID NO: 2572 - DNA, 906 bp, Homo Sapiens
  NM_005192
acagaaggacgaaccagtgagctaagctgcggggcgcgggctcggccggggcaccggtgagtcgccggcgctgcagagggaggcggcactggtctcgacgtggggcggccagcgatgaagccgcccagttcaatacaaacaagtgagtttgactcatcagatgaagagcctattgaagatgaacagactccaattcatatatcatggctatctttgtcacgagtgaattgttctcagtttctcggtttatgtgctcttccaggttgtaaatttaaagatgttagaagaaatgtccaaaaagatacagaagaactaaagagctgtggtatacaagacatatttgttttctgcaccagaggggaactgtcaaaatatagagtcccaaaccttctggatctctaccagcaatgtggaattatcacccatcatcatccaatcgcagatggagggactcctgacatagccagctgctgtgaaataatggaagagcttacaacctgccttaaaaattaccgaaaaaccttaatacactgctatggaggacttgggagatcttgtcttgtagctgcttgtctcctactatacctgtctgacacaatatcaccagagcaagccatagacagcctgcgagacctaagaggatccggggcaatacagaccatcaagcaatacaattatcttcatgagtttcgggacaaattagctgcacatctatcatcaagagattcacaatcaagatctgtatcaagataaaggaattcaaatagcatatatatgaccatgtctgaaatgtcagttctctagcataatttgtattgaaatgaaaccaccagtgttatcaacttgaatgtaaatgtacatgtgcagatattcctaaagttttattgacaaaaaaaaaaaaaaaaa

SEQ ID NO: 2573 - DNA, 1837 bp, Homo Sapiens
  NM_005194
gagccgcgcacgggactgggaaggggacccacccgagggtccagccaccagccccctcactaatagcggccaccccggcagcggcggcagcagcagcagcgacgcagcggcgacagctcagagcagggaggccgcgccacctgcgggccggccggagcgggcagccccaggccccctccccgggcacccgcgttcatgcaacgcctggtggcctgggacccagcatgtctccccctgccgccgccgccgcctgcctttaaatccatggaagtggccaacttctactacgaggcggactgcttggctgctgcgtacggcggcaaggcggcccccgcggcgccccccgcggccagacccgggccgcgcccccccgccggcgagctgggcagcatcggcgaccacgagcgcgccatcgacttcagcccgtacctggagccgctgggcgcgccgcaggccccggcgcccgccacggccacggacaccttcgaggcggctccgcccgcgcccgcccccgcgcccgcctcctccgggcagcaccacgacttcctctccgacctcttctccgacgactacgggggcaagaactgcaagaagccggccgagtacggctacgtgagcctggggcgcctgggggccgccaagggcgcgctgcaccccggctgcttcgcgcccctgcacccaccgcccccgccgccgccgccgcccgccgagctcaaggcggagccgggcttcgagcccgcggactgcaagcggaaggaggaggccggggcgccgggcggcggcgcaggcatggcggcgggcttcccgtacgcgctgcgcgcttacctcggctaccaggcggtgccgagcggcagcagcgggagcctctccacgtcctcctcgtccagcccgcccggcacgccgagccccgctgacgccaaggcgcccccgaccgcctgctacgcgggggccgcgccggcgccctcgcaggtcaagagcaaggccaagaagaccgtggacaagcacagcgacgagtacaagatccggcgcgagcgcaacaacatcgccgtgcgcaagagccgcgacaaggccaagatgcgcaacctggagacgcagcacaaggtcctggagctcacggccgagaacgagcggctgcagaagaaggtggagcagctgtcgcgcgagctcagcaccctgcggaacttgttcaagcagctgcccgagcccctgctcgcctcctccggccactgctagcgcggcccccgcgcgcgtccccctgccggccggggctgagactccggggagcgcccgcgcccgcgccctcgcccccgcccccggcggcgccggcaaaactttggcactggggcacttggcagcgcggggagcccgtcggtaattttaatattttattatatatatatatctatatttttgtccaaaccaaccgcacatgcagatggggctcccgcccgtggtgttatttaaagaagaaacgtctatgtgtacagatgaatgataaactctctgcttctccctctgcccctctccaggcgccggcgggcgggccggtttcgaagttgatgcaatcggtttaaacatggctgaacgcgtgtgtacacgggactgacgcaacccacgtgtaactgtcagccgggccctgagtaatcgcttaaagatgttcctacgggcttgttgctgttgatgttttgttttgttttgttttttggtctttttttgtattataaaaaataatctatttctatgagaaaagaggcgtctgtatattttgggaatcttttccgtttcaagcattaagaacacttttaataaacttttttttgagaatggttacaaagcc

SEQ ID NO: 2574 - DNA, 1269 bp, Homo Sapiens
  NM_005195
aggtgacagcctcgcttggacgcagagcccggcccgacgccgccatgagcgccgcgctcttcagcctggacggcccggcgcgcggcgcgccctggcctgcggagcctgcgcccttctacgaaccgggccgggcgggcaagccgggccgcggggccgagccaggggccctaggcgagccaggcgccgccgcccccgccatgtacgacgacgagagcgccatcgacttcagcgcctacatcgactccatggccgccgtgcccaccctggagctgtgccacgacgagctcttcgccgacctcttcaacagcaatcacaaggcgggcggcgcggggcccctggagcttcttcccggcggccccgcgcgccccttgggcccgggccctgccgctccccgcctgctcaagcgcgagcccgactggggcgacggcgacgcgcccggctcgctgttgcccgcgcaggtggccgcgtgcgcacagaccgtggtgagcttggcggccgcagggcagcccaccccgcccacgtcgccggagccgccgcgcagcagccccaggcagacccccgcgcccggccccgcccgggagaagagcgccggcaagaggggcccggaccgcggcagccccgagtaccggcagcggcgcgagcgcaacaacatcgccgtgcgcaagagccgcgacaaggccaagcggcgcaaccaggagatgcagcagaagttggtggagctgtcggctgagaacgagaagctgcaccagcgcgtggagcagctcacgcgggacctggccggcctccggcagttcttcaagcagctgcccagcccgcccttcctgccggccgccgggacagcagactgccggtaacgcgcggccggggcgggagagactcagcaacgacccatacctcagacccgacggcccggagcggagcgcgccctgccctggcgcagccagagccgccgggtgcccgctgcagtttcttgggacataggagcgcaaagaagctacagcctggacttaccaccactaaactgcgagagaagctaaacgtgtttattttcccttaaattatttttgtaatggtagctttttctacatcttactcctgttgatgcagctaaggtacatttgtaaaaagaaaaaaaaccagacttttcagacaaaccctttgtattgtagataagaggaaaagactgagcatgctcacttttttatattaatttttacagtatttgtaagaataaagcagcatttgaaatcgaaaaaaaaaaaaaaaaaa

SEQ ID NO: 2575 - DNA, 7907 bp, Homo Sapiens
  NM_005197
gggaggacgcgcggcgcgcccggcggacgccgcaggtcccatgccgcgccgcgacccccgcgcccctgccgcccgcgcccgcggccgccccccgccgcccgccgccccgggctcgccgcgccgcgcccgcgcgtccttagcggggccaccgagcgatgcccgccgggcgcccgcgaaagtttgtcggctcctgctgaagggcagcggcgcccccgcacccccgtgccccgctccggccaggagccttcacgtaaatgggtccagtcatgcctcccagtaagaagccagaaagctcaggaattagtgtctccagtggactgagtcagtgttacgggggcagcggtttctccaaggcccttcaggaagacgatgacctcgacttttctctgcctgacatccgattagaagagggggccatggaagatgaagagctgaccaacctgaactggctgcacgagagcaagaacttgctgaagagctttggggagtcggtcctcaggagtgtcagccccgtccaggacctggacgatgacacccccccatcccctgcccactctgacatgccctacgatgccaggcagaaccccaactgcaaacccccctactccttcagctgcctcatatttatggccatcgaggactctccaaccaagcgcctgccagtgaaggatatctacaactggatcttggaacattttccgtattttgcaaatgcacctactgggtggaaaaactcagtgagacacaatttatcattgaataagtgttttaagaaagtggacaaagagaggagtcagagtattgggaaagggtcgttgtggtgcatagacccagagtatagacaaaatctaattcaggctttgaaaaagacaccttatcacccacacccacacgtgttcaatacacctcccacctgtcctcaggcatatcaaagcacatcaggtccacccatctggccgggcagtaccttcttcaagagaaatggagcccttctccaagttcctccaggagtgatccaaaatggagcgcgggtcctgagccgagggctgtttcctggcgtgcggccgctgccaatcactcccattggggtgacagcggccatgaggaatggcatcaccagctgccggatgcggactgagagtgagccatcttgtggctccccagtggtcagcggagaccccaaggaggatcacaactacagcagtgccaagtcctccaacgcccggagcacctcgcccaccagcgactccatctcctcctcctcctcctcagccgacgaccactatgagtttgccaccaaggggagccaggagggcagcgagggcagcgaggggagcttccggagccacgagagccccagcgacacggaagaggacgacaggaagcacagccagaaggagcccaaggattctctgggggacagcgggtacgcatcccagcacaagaagcgccagcacttcgccaaggccaggaaggtccccagcgacacactgcccctcaaaaagagacgcaccgaaaagccccccgagagcgatgatgaggagatgaaagaagcggcagggtccctcctgcacttagcagggatccggtcctgtttgaataacatcaccaatcggacggcaaaggggcagaaagagcaaaaggaaaccacaaaaaattaaaaacaagtcactgatttgttttgaacttacgaccatttggtttcagcatgtcaggagatttctaatgatttgtggcaatatcagcaattttttttcttttttcttgtttttggtttggttttctttcttttcttttccttttattttgttttaatttgccccctcttctttgttttggacccttaagaattttatttttaaaggagattgaagccatagaactcatattgacactcagctgttttacaaaagcttttcattatctgaagacaaaaccgaaaaagccaaaattaccattgcttcctccagcttgtcagaaacctgtggctgaatccgcagggatgtcaacgtcaatatcacaggaacacacattcggcacctagaaggcacgtgggcaaagtaatcatcgttcaggcccaacccttaggtttaaaaagtcaggttgtccatcccattgggttcactgagtgaaggcacataaagcaattgaggaggaggaggaacccctcgtccccctaggagcagacccaagcttgtggcaccaggcatctgatggtgccaggaaagccactggaattgtcacacggcgagcacagagggccggccaccagtcctcgatgcttctgaaccctgaagcccgatgacatcttacgaggtggacgttggactgttcatgcgcatcgggtgtcagtgactcatggagaagaaatggggtaaatttttagtgatgttgctaatcattgaattctgttctctattaaattaagaaaatgttccaaaagccataagcctgaagattggccctgtgcacgcacgcacacacacacacacacacacacacacacacacacacacacgaaggagagagagagaaaactgatggggaaaacaagctgtgtcttcttaactgcccaagtgaaaagcaaccaagtccaggaaattacaatagctgttaaggaaaggaaataatggtacagatctttttctgtctatcaaaactatttgatccaagtgaaaaaaaaaaaaaaactagaaagctacggaacctgccattagtattgtggtgtatttttaagattaaaggtacactgatggacaaaaaaaaaaagtaaaacatggcaaaaaataaaataactcctatactgccctcaaaatggagtttgcaattaatatcaggatttatctttgcaaaaatcagtgatttccacattcagccagtatagccagcagaaatttctgatccacaatgcatggattcctttgaagaaaaaaaagaaaaagagaaaaaaatcacaaaaacaaactttttttattcaaaagtaacaaagttcttgtaaggtaaataatgtatttagcatgaagcatgaattattttcatataaatatagaaaatagagaaaaggctatgcctgtaatttttaagcccttaggcttagagtttcttttggttttcttcttttttctttccttttctttgctttctttttttcctttttgtttttgtttttgttttttgtttttgtttttttttcgggttattttgttttggttttttgaagcaggtgtttaaggtttaaccttcttcagggacaaattctgactgttggggaacttactctgcaatataaaaatatcttcatgctctggtagggcttggatggttgaactctgtactgccttgtgtgcacttcagccccgaccccctctgattctctgttgaaaagtgtgtcctttctctctgtctgtacatgtttaacatgacgcaataatttgagggcaaacttagtagtgagtgtgtatgatagaatcaagagaattatgggacgcttacttgagaaaatcattaccatgatttggttctaggaaaaaggcagtgaataattatgcaaattagccagaagaaggggaaccgtgctaatgggccttattgggtgaggggacgagatggggttcatgtgaaggaggaagcgatgccgaggtaggaaaggccagccccagacatcctatcgccacaatgccatgtcgcaataggaagcaggggccggccatcgctaccttcagcacactgaccaacctggaattaagaccacctagattgcgagagctgaatttagaaaccagacaacgtcatgcagcccagaaactcctgttgttacctttgcctaagaaattttctttaatggcgggggcggggggcgggggtacaaagagaaatctctaaaagaatatgatcttccatccaagtggagggaaactttaaaacaaaaacacccagtactgtggctcaggatatgatgcgtgaggagagggagggaacagagatgaccttaacttttaaaaaagggactgctgtgggccaaagccaagcccatctgccaggacgaggtaatgtcagagctccatcagcccggacagtgggaactaactggtgcattccccacacttaccttccggtgggttgctgatgagagaacctgaaaaaacctacacctctacagcaggtcgaattcatgacctgaagctgaatacttccagcatatttattcagggtgtaggtgggaataaagtatcttcgcagtgctctgttccctccgtctccccagacatctgacaccctaaaagccatccacagctatggaacctgagcgacaccttgatttgtgttgtcacctgaccaagcctaaagacctccagctcagtcccccaccttcatcccaccccacagatgataaaattcagacctctctcctgaaaggcagaggttcaacattcaggactgtttctggccgaggacttcttccaattaaaacccccaccgtgggctgtctcccctcatttcatttttctaaaggggcagaggcctcttttagaaaataataaaatgcaatgtgtgtgatttacttttctgatctctttgagaaatagagaaatataaaagtgtgttcttaactccagaaccactctttttgcataaatacctcatcgggcagctttctaagtgtgattttcctgagtctcccttcgttggatctgccggaagacttgtcggggaacctttagtgagggtacttcttcctatttttcttctgtttttggaggcatacacattatgcataaccaaaacaatggctcaattgtgtttaactttgtattttgattgttgagaacaaaaacaaaaagtatcaatgtgtatgtggctgtttgtagtgaatttattggagaatgaggttgtccgtgtccttaacaagccaaggggcaggaggcaccctctcttatcccctcctccaagagcagtagagaatttaagcacaagcctatttgtgaaagaatattttgcttaagtgtcattcactttagtcttggaattccttcccaaacgtcaggtgttcttttagcttccaaactagcatatgtatccattagtctgacagatcgcctgaacaccattaagaggtgtggcgtttttgctttcatttctcctgctgggagaagtggcggttcatgtgtcattccagtatctcacatactcacacggggcaggggggagggggaaacggggaactatagcaatatttaaagatgctttggaaaccaaccgtgaacacatcaacaccacgacgtctacgattacttgctattggccctcggatacatttaagagaaagagacagtcactcttttttttcttaaatgatatacatataaacagttatttttatcctattataattgtcttttgtctttatctagtactatgtggaaagggtttgcatcatagatttttcccagccttataatataccataagctcctacttccctgcccctccctaatcagtattctttcaagagttctttggtgaagccatctatctgaaactaaaatgaaccaaacccatatttcactggtggttggagaaaaccatggccaaaacgattgtggcaggtctcaatcttgggagtttttaagaaggaatgtgccagaggccgattcccaagaacagagttttcttttgttttgcagaggcattcaatgtgtctagtgcttgctggccacagcagttactaccacagagccttctgggaggggccgttgtgttgaaggaggctcctgcctgagggacagcatcaggcagtgggctctgtagagtgagaaccaggtggaggccttctgtgcccagctcagagttctgcaccacgccaggactgcccaggccaagggctactgacgcaagttccactcattccactctgtggggggcgccttgggcctctcctggaagggctcttggagaaggaattggagttacgtacaagtgacctaaatgggaagcttttctagatgagattggattaaattccatgtgatttctctttccctttaatccaggttgggactcgtttctttctggtggatcacagctgcccagatgttgcaattgatttttatgtttctgtagagaagtatttttctttcatcttcaggattttttttgccaccaaaagaaaacattggaactctgtgtttcctcttgattgtgacttcccagtgttgacagttaagtccttagtgtcgtaggtcccagcccaccaatactatatcaaacactgttatgcacataatgcagcactgtgatctaatttaaataatacttttttattatttatactactatatataatatacatcaacacttttgctatataacctaagtgataaccctcttttagttacctgccaaactctggacttggtttatattgcagttaacacagttacaaagctgtaatggtgtctttttttcctttgtaacggaatgtgtaaatcaaagtatatacattgtgtggtgttcctgtttctggagtttcatgaggatttacacatggcattcagtgttctgtatagatctgcctacctttgtgaattcatctgttaacccctcttcctttgagagagcaccggcgatggtggttaactccttgtgttttctctctctcctactggttattcttgaattaagcacagactcgtcagctcggttgctttatcatgaataatgtgtgtgaccttgcagttcttccacagttcagcaaacaagtgctagcttcactgaccaaaaattaaggaaggaaaacacagtttttaaaacgatccatcttttaacagccgaaaccgatgtgtctatggtgctgcaccttgctgttgtacttctgaaatcagacgtgtgtgaacgatcatttctgacttaaccgtgagatgctcacgagtacccttcctgttgttttgttagcattgaaatcgagactatttatttggaatatatacaacagtgtttttccactgtatttcatttgcaaaagttgagaactgctttctctaccttttgcaaaataattgatattccatattggattctcaaagacttcgatatggtgaacctattaaacctagaaattgtattcatcctttcatgactgtggcctgagttccccagcccctctcctccttttttttagatgagatttagcacactctcagttatttaaacatgcaacatttcttgagtatgtatgttgaggccatctgagctcatagctgattcagtaaccagtttcatgctgtgtcattcacactcactacttaatactgccatggtgaaaatgtggaggaaaaatgtatccatgtgtgtctgggaagcatatacacttgtacattttttaatactctgattctgtaacatttctgagttttgttttgttttacagaaaaaaaaaaaaagtgataaagcaatcagaagaccaagaggtttactattgatgcttagggtcgtctgaccttggctggccaatagacctacacggccaaattaatttacgagagtaataatttttcaaaagccaattttttttctgtattttctgtatgaaactgccaatatcatgaatagaaagggagaaccataaaggagaaagaacgtgatgttctgttatgttcatgtaaacctaaagaaacagtgtggaggcaggcgcgatcagccgaactctagggacttggtgttgcttggaaggcatccatacctgcattttgcattcttcgtatgtaatcatattgccaaagacaaactatttcatcatttattgtaaataacacttttccccagacctaccataaagtttctgtgatgtattgtcttccagttgcaataaaaattactgagttgcatcaattgaagaaaaacaccaaaaa

SEQ ID NO: 2576 - DNA, 1648 bp, Homo Sapiens
  NM_005198
agagatctgcggaattcggccttcggaaagagcccccgggccggggcacggagagagccgagcgccgcagccgtgagccgaatagagccggagagacccgagtatgaccggagaagcccaggccggccggaagaggagccgagcgcggccggaaggaaccgagcccgtccgaagggagcggagcgcagcctggcctggggcccggtcgagcccgcgccatggcggccgaggcgacagctgtggccggaagcggggctgttggcggctgcctggccaaagacggcttgcagcagtctaagtgcccggacactaccccaaaacggcggcgcgcctcgtcgctgtcgcgtgacgccgagcgccgagcctaccaatggtgccgggagtacttgggcggggcctggcgccgagtgcagcccgaggagctgagggtttaccccgtgagcggaggcctcagcaacctgctcttccgctgctcgctcccggaccacctgcccagcgttggcgaggagccccgggaggtgcttctgcggctgtacggagccatcttgcagggcgtggactccctggtgctagaaagcgtgatgttcgccatacttgcggagcggtcgctggggccccagctgtacggagtcttcccagagggccggctggaacagtacatcccaagtcggccattgaaaactcaagagcttcgagagccagtgttgtcagcagccattgccacgaagatggcgcaatttcatggcatggagatgcctttcaccaaggagccccactggctgtttgggaccatggagcggtacctaaaacagatccaggacctgcccccaactggcctccctgagatgaacctgctggagatgtacagcctgaaggatgagatgggcaacctcaggaagttactagagtctaccccatcgccagtcgtcttctgccacaatgacatccaggaagggaacatcttgctgctctcagagccagaaaatgctgacagcctcatgctggtggacttcgagtacagcagttataactataggggctttgacattgggaaccatttttgtgagtgggtttatgattatactcacgaggaatggcctttctacaaagcaaggcccacagactaccccactcaagaacagcagttgcattttattcgtcattacctggcagaggcaaagaaaggtgagaccctctcccaagaggagcagagaaaactggaagaagatttgctggtagaagtcagtcggtatgctctggcatcccatttcttctggggtctgtggtccatcctccaggcatccatgtccaccatagaatttggttacttggactatgcccagtctcggttccagttctacttccagcagaaggggcagctgaccagtgtccactcctcatcctgactccaccctcccactccttggatttctcctggagcctccagggcaggaccttggagggaggaacaacgagcagaaggccctggcgactgggctgagcccccaagtgaaactgaggttcaggagaccggcctgttcctgagtttgagtaggtccccatggctggcaggccagagccccgtgctgtgtatgtaacacaataaacaagcttcttcttcccaccctgaaaaaaaaaaaaaaaaaaa

SEQ ID NO: 2577 - DNA, 4006 bp, Homo Sapiens
  NM_005211
gaagggcagacagagtgtccaaaagcgtgagagcacgaagtgaggagaaggtggagaagagagaagaggaagaggaagaggaagagaggaagcggagggaactgcggccaggctaaaaggggaagaagaggatcagcccaaggaggaggaagaggaaaacaagacaaacagccagtgcagaggagaggaacgtgtgtccagtgtcccgatccctgcggagctagtagctgagagctctgtgccctgggcaccttgcagccctgcacctgcctgccacttccccaccgaggccatgggcccaggagttctgctgctcctgctggtggccacagcttggcatggtcagggaatcccagtgatagagcccagtgtccctgagctggtcgtgaagccaggagcaacggtgaccttgcgatgtgtgggcaatggcagcgtggaatgggatggccccccatcacctcactggaccctgtactctgatggctccagcagcatcctcagcaccaacaacgctaccttccaaaacacggggacctatcgctgcactgagcctggagaccccctgggaggcagcgccgccatccacctctatgtcaaagaccctgcccggccctggaacgtgctagcacaggaggtggtcgtgttcgaggaccaggacgcactactgccctgtctgctcacagacccggtgctggaagcaggcgtctcgctggtgcgtgtgcgtggccggcccctcatgcgccacaccaactactccttctcgccctggcatggcttcaccatccacagggccaagttcattcagagccaggactatcaatgcagtgccctgatgggtggcaggaaggtgatgtccatcagcatccggctgaaagtgcagaaagtcatcccagggcccccagccttgacactggtgcctgcagagctggtgcggattcgaggggaggctgcccagatcgtgtgctcagccagcagcgttgatgttaactttgatgtcttcctccaacacaacaacaccaagctcgcaatccctcaacaatctgactttcataataaccgttaccaaaaagtcctgaccctcaacctcgatcaagtagatttccaacatgccggcaactactcctgcgtggccagcaacgtgcagggcaagcactccacctccatgttcttccgggtggtagagagtgcctacttgaacttgagctctgagcagaacctcatccaggaggtgaccgtgggggaggggctcaacctcaaagtcatggtggaggcctacccaggcctgcaaggttttaactggacctacctgggacccttttctgaccaccagcctgagcccaagcttgctaatgctaccaccaaggacacatacaggcacaccttcaccctctctctgccccgcctgaagccctctgaggctggccgctactccttcctggccagaaacccaggaggctggagagctctgacgtttgagctcacccttcgataccccccagaggtaagcgtcatatggacattcatcaacggctctggcacccttttgtgtgctgcctctgggtacccccagcccaacgtgacatggctgcagtgcagtggccacactgataggtgtgatgaggcccaagtgctgcaggtctgggatgacccataccctgaggtcctgagccaggagcccttccacaaggtgacggtgcagagcctgctgactgttgagaccttagagcacaaccaaacctacgagtgcagggcccacaacagcgtggggagtggctcctgggccttcatacccatctctgcaggagcccacacgcatcccccggatgagttcctcttcacaccagtggtggtcgcctgcatgtccatcatggccttgctgctgctgctgctcctgctgctattgtacaagtataagcagaagcccaagtaccaggtccgctggaagatcatcgagagctatgagggcaacagttatactttcatcgaccccacgcagctgccttacaacgagaagtgggagttcccccggaacaacctgcagtttggtaagaccctcggagctggagcctttgggaaggtggtggaggccacggcctttggtctgggcaaggaggatgctgtcctgaaggtggctgtgaagatgctgaagtccacggcccatgctgatgagaaggaggccctcatgtccgagctgaagatcatgagccacctgggccagcacgagaacatcgtcaaccttctgggagcctgtacccatggaggccctgtactggtcatcacggagtactgttgctatggcgacctgctcaactttctgcgaaggaaggctgaggccatgctgggacccagcctgagccccggccaggaccccgagggaggcgtcgactataagaacatccacctcgagaagaaatatgtccgcagggacagtggcttctccagccagggtgtggacacctatgtggagatgaggcctgtctccacttcttcaaatgactccttctctgagcaagacctggacaaggaggatggacggcccctggagctccgggacctgcttcacttctccagccaagtagcccagggcatggccttcctcgcttccaagaattgcatccaccgggacgtggcagcgcgtaacgtgctgttgaccaatggtcatgtggccaagattggggacttcgggctggctagggacatcatgaatgactccaactacattgtcaagggcaatgcccgcctgcctgtgaagtggatggccccagagagcatctttgactgtgtctacacggttcagagcgacgtctggtcctatggcatcctcctctgggagatcttctcacttgggctgaatccctaccctggcatcctggtgaacagcaagttctataaactggtgaaggatggataccaaatggcccagcctgcatttgccccaaagaatatatacagcatcatgcaggcctgctgggccttggagcccacccacagacccaccttccagcagatctgctccttccttcaggagcaggcccaagaggacaggagagagcgggactataccaatctgccgagcagcagcagaagcggtggcagcggcagcagcagcagtgagctggaggaggagagctctagtgagcacctgacctgctgcgagcaaggggatatcgcccagcccttgctgcagcccaacaactatcagttctgctgaggagttgacgacagggagtaccactctcccctcccacaaacttcaactcctccatggatggggcgacacggggagaacatacaaactctgccttcggtcatttcactcaacagctcggcccagctctgaaacttgggaaggtgagggattcaggggaggtcagaggatcccacttcctgagcatgggccatcactgccagtcaggggctgggggctgagccctcacccccccctcccctactgttctcatggtgttggcctcgtgtttgctatgccaactagtagaaccttctttcctaatccccttatcttcatggaaatggactgactttatgcctatgaagtccccaggagctacactgatactgagaaaaccaggctctttggggctagacagactggcagagagtgagatctccctctctgagaggagcagcagatgctcacagaccacactcagctcaggccccttggagcaggatggctcctctaagaatctcacaggacctcttagtctctgccctatacgccgccttcactccacagcctcacccctcccacccccatactggtactgctgtaatgagccaagtggcagctaaaagttgggggtgttctgcccagtcccgtcattctgggctagaaggcaggggaccttggcatgtggctggccacaccaagcaggaagcacaaactcccccaagctgactcatcctaactaacagtcacgccgtgggatgtctctgtccacattaaactaacagcattaatgcagtcaaaaaaaaaaaaaaaaaa

SEQ ID NO: 2578 - DNA, 838 bp, Homo Sapiens
  NM_005213
tgctgtttgtggaaaataaagcattctataggcggagctagtgaacgcctcttttaaaacacgagtctccacacttccctgttcactttggttccagcatcctgtccagcaaagaagcaatcagccaaaatgatacctggaggcttatctgaggccaaacccgccactccagaaatccaggagattgttgataaggttaaaccacagcttgaagaaaaaacaaatgagacttacggaaaattggaagctgtgcagtataaaactcaagttgttgctggaacaaattactacattaaggtacgagcaggtgataataaatatatgcacttgaaagtattcaaaagtcttcccggacaaaatgaggacttggtacttactggataccaggttgacaaaaacaaggatgacgagctgacgggcttttagcagcatgtacccaaagtgttctgattccttcaactggctactgagtcatgatccttgctgataaatataaccatcaataaagaagcattcttttccaaagaaattatttcttcaattatttctcatttattgtattaagcagaaattaccttttctttctcaaaatcagtgttattgctttagagtataaactccatataaattgatggcaattggaaatcttataaaaactagtcaagcctaatgcaactggctaaaggatagtaccaccctcacccccaccataggcaggctggatcgtggactatcaattcaccagcctccttgttccctgtggctgctgataacccaacattccatctctaccctcatacttcaaaattaaatcaagtattttacaaaaaaaaaaaaa

SEQ ID NO: 2579 - DNA, 1988 bp, Homo Sapiens
  NM_005214
gccttctgtgtgtgcacatgtgtaatacatatctgggatcaaagctatctatataaagtccttgattctgtgtgggttcaaacacatttcaaagcttcaggatcctgaaaggttttgctctacttcctgaagacctgaacaccgctcccataaagccatggcttgccttggatttcagcggcacaaggctcagctgaacctggctaccaggacctggccctgcactctcctgttttttcttctcttcatccctgtcttctgcaaagcaatgcacgtggcccagcctgctgtggtactggccagcagccgaggcatcgccagctttgtgtgtgagtatgcatctccaggcaaagccactgaggtccgggtgacagtgcttcggcaggctgacagccaggtgactgaagtctgtgcggcaacctacatgatggggaatgagttgaccttcctagatgattccatctgcacgggcacctccagtggaaatcaagtgaacctcactatccaaggactgagggccatggacacgggactctacatctgcaaggtggagctcatgtacccaccgccatactacctgggcataggcaacggaacccagatttatgtaattgatccagaaccgtgcccagattctgacttcctcctctggatccttgcagcagttagttcggggttgtttttttatagctttctcctcacagctgtttctttgagcaaaatgctaaagaaaagaagccctcttacaacaggggtctatgtgaaaatgcccccaacagagccagaatgtgaaaagcaatttcagccttattttattcccatcaattgagaaaccattatgaagaagagagtccatatttcaatttccaagagctgaggcaattctaacttttttgctatccagctatttttatttgtttgtgcatttggggggaattcatctctctttaatataaagttggatgcggaacccaaattacgtgtactacaatttaaagcaaaggagtagaaagacagagctgggatgtttctgtcacatcagctccactttcagtgaaagcatcacttgggattaatatggggatgcagcattatgatgtgggtcaaggaattaagttagggaatggcacagcccaaagaaggaaaaggcagggagcgagggagaagactatattgtacacaccttatatttacgtatgagacgtttatagccgaaatgatcttttcaagttaaattttatgccttttatttcttaaacaaatgtatgattacatcaaggcttcaaaaatactcacatggctatgttttagccagtgatgctaaaggttgtattgcatatatacatatatatatatatatatatatatatatatatatatatatatatatatatatatattttaatttgatagtattgtgcatagagccacgtatgtttttgtgtatttgttaatggtttgaatataaacactatatggcagtgtctttccaccttgggtcccagggaagttttgtggaggagctcaggacactaatacaccaggtagaacacaaggtcatttgctaactagcttggaaactggatgaggtcatagcagtgcttgattgcgtggaattgtgctgagttggtgttgacatgtgctttggggcttttacaccagttcctttcaatggtttgcaaggaagccacagctggtggtatctgagttgacttgacagaacactgtcttgaagacaatggcttactccaggagacccacaggtatgaccttctaggaagctccagttcgatgggcccaattcttacaaacatgtggttaatgccatggacagaagaaggcagcaggtggcagaatggggtgcatgaaggtttctgaaaattaacactgcttgtgtttttaactcaatattttccatgaaaatgcaacaacatgtataatatttttaattaaataaaaatctgtggtggtcgttttaaaaaaaaaaa

SEQ ID NO: 2580 - DNA, 2144 bp, Homo Sapiens
  NM_005216
aatccacctcccaccagggcacttccggcggcgctctccgcgccttatcgccaaagctgcggctctggacgcccagccgcggcgtatcccgatcacttccgggtagtgctccacgggcacgagccgcgattgggctaccgtagatggggtacttccggtgtgcaggtgctgggtccttcggcaggaggaggaagatggagcccagcaccgcggcccgggcttgggccctcttttggttgctgctgcccttgcttggcgcggtttgcgccagcggaccccgcaccttagtgctgctggacaacctcaacgtgcgggagactcattcgcttttcttccggagcctgaaggaccggggctttgagctcacattcaagaccgctgatgaccccagcctgtctctcataaagtatggggaattcctctatgacaatctcatcattttctccccttcggtagaagattttggaggcaacatcaacgtggagaccatcagtgcctttattgacggcggaggcagtgtgctggtagctgccagctccgacattggtgaccctcttcgagagctgggcagtgagtgcgggattgagtttgacgaggagaaaacggctgtcattgaccatcacaactatgacatctcagaccttggccagcatacgctcatcgtggctgacactgagaacctgctgaaggccccaaccatcgttgggaaatcatctctaaatcccatcctctttcgaggtgttgggatggtggccgatcctgataaccctttggtgctggacatcctgacgggctcttccacctcttactccttcttcccggacaagcctatcacccagtatccacatgcggtggggaagaacaccctcctcattgctgggctccaggccaggaacaatgcccgcgtcatcttcagcggctccctcgacttcttcagcgactccttcttcaactcagcagtgcagaaggcggcgcccggctcccagaggtattcccagacaggcaactatgaactagctgtggccctctcccgctgggtgttcaaggaggagggtgtcctccgtgtggggcctgtgtcccatcatcgggtgggcgagacagccccacccaatgcctacactgtcactgacctagtggagtatagcatcgtgatccagcagctctcaaatggcaaatgggtcccctttgatggcgatgacattcagctggagtttgtccgcattgatccttttgtgaggaccttcctgaagaagaaaggtggcaaatacagtgttcagttcaagttgcccgacgtgtatggtgtattccagtttaaagtggattacaaccggctaggctacacacacctgtactcttccactcaggtatccgtgcggccactccagcacacgcagtatgagcgcttcatcccctcggcctacccctactacgccagcgccttctccatgatgctggggctcttcatcttcagcatcgtcttcttgcacatgaaggagaaggagaagtccgactgaggggctagagccctctccgcacagcgtggagacggggcaaggaggggggttattaggattggtggttttgttttgctttgtttaaagccgtgggaaaatggcacaactttacctctgtgggagatgcaacactgagagccaaggggtgggagttgggataatttttatataaaagaagtttttccactttgaattgctaaaagtggcatttttcctatgtgcagtcactcctctcatttctaaaatagggacgtggccaggcacggtggctcatgcctgtaatcccagcactttgggaggccgaggcaggcggctcacgaggtcaggagatcgagactatcctggctaacacggtaaaaccctgtctctactaaaagtacaaaaaattagctgggcgtggtggtgggcacctgtagtcccagctactcgggaggctgaggcaggagaaaggcatgaatccaagaggcagagcttgcagtgagctgagatcacgccattgcactccagcctgggcaacagtgttaagactctgtctcaaatataaataaataaataaataaataaataaataaataaaaataaagcgagatgttgccctcaaacttcacctggaaaaaaaaaaaaaaaaaa

SEQ ID NO: 2581 - DNA, 501 bp, Homo Sapiens
  NM_005217
ccttgctatagaagacctgggacagaggactgctgtctgccctctctggtcaccctgcctagctagaggatctgtgaccccagccatgaggaccctcgccatccttgctgccattctcctggtggccctgcaggcccaggctgagccactccaggcaagagctgatgaggttgctgcagccccggagcagattgcagcggacatcccagaagtggttgtttcccttgcatgggacgaaagcttggctccaaagcatccaggctcaaggaaaaacatggactgctattgcagaataccagcgtgcattgcaggagaacgtcgctatggaacctgcatctaccagggaagactctgggcattctgctgctgagcttgcagaaaaagaaaaatgagctcaaaatttgctttgagagctacagggaattgctattactcctgtaccttctgctcaatttcctttcctcatctcaaataaatgccttgttacaagaaaaaaaaaaa

SEQ ID NO: 2582 - DNA, 2823 bp, Homo Sapiens
  NM_005224
acgcggacgcggctggcggctcggtttctgcaaatgcgtgaatgagccggatgccagcctctgtcccctggagcccagcgtgaggaagaggcatgccccatcagccttcagcttgagcccggcggcccccgcccccgccccctgccaccctgcactgccccggctcccccgcggcccccacgctgcagtgcggccgggccccctccccgcaggggccgcccccgccgcccacccctagcgcccgtggtggtggtggtggtggtggtggtggtggcccgggccgcagggccatgaaactacaggccgtgatggagacgctgttgcagcggcagcagcgggcgcgccaggagctggaggcccggcagcagctgccccccgatccccctgctgcaccccccggccgggcccgggctgcccccgacgaggacagagagcccgagagtgcccggatgcagcgggctcagatggccgcactggcagccatgcgggctgcagctgcgggcctgggacacccagccagccccggcggctctgaggatgggcccccaggctcggaggaggaggacgcggcccgggaggggacaccgggctcacccgggcgaggcagagaagggccaggagaggagcactttgaggacatggcctccgacgaggacatgaagcccaaatgggaggaggaggagatggaggaagacctcggggaggatgaggaggaggaggaggaggattacgaggatgaggaggaggaggaggacgaggaggggctgggccccccaggccctgccagcttgggcaccacggcactgttcccccgaaaggcccagccaccccaggccttccgcggcgatggcgttcccagggtgctggggggccaggagcggccggggcctggccctgcccaccccggaggggccgcccacgtagccccgcagctgcagccgcctgaccacggcgactggacttacgaggagcagtttaagcagctctacgaactcgacggggaccccaagaggaaggaattcctggatgacttgttcagcttcatgcagaagcgagggacacctgtgaaccgcatccccatcatggccaaacaggtccttgacctgttcatgctgtacgtgctggtgacggagaagggcggcctcgtggaggtcatcaacaagaagctgtggcgtgagatcaccaagggcctcaacctgcccacgtccatcaccagtgcagccttcaccctgcggacccaatacatgaagtacctgtacccctacgagtgtgagaagcggggcctcagtaaccccaatgagctccaggcagccatagacagcaaccgacgggagggccggcgccagagctttggtggctccctctttgcctactcgccaggcggggcacacggcatgctctcctcacccaagctacccgtgtcctccctgggcctggccgcaagcaccaatggcagctccatcacccccgcccctaagatcaagaaagaggaggactcagccatccccatcacagtccctggccgcctgcctgtgtccctggcgggccaccctgtggtggcagcccaggcagcagctgtgcaagcagcagccgcccaagcagctgtggccgcacaggcagctgccctggaacagctgcgggagaagctggagtctgcagagcctccggagaagaagatggccctggtggccgatgagcagcaacggctgatgcaacgtgcactccagcagaacttcctggccatggcggcccagctgcccatgagcattcggatcaacagccaagcctccgaaagccgccaggactctgctgtgaacctgacgggcaccaacggcagcaacagcatcagcatgtcggtggagatcaacggcatcatgtacacaggagttctgtttgctcagccgccggcccccacgccaacctctgctcccaacaaaggaggcggcggcggcggcggcagcagcagcaacgcaggcggccggggaggaaacaccggaaccagcggcggccaggctgggccagcggggctgtccacaccctccacatctacctcaaataactcgttgccttaaccgcatcactccccacccgccacccaccctggagcccgccggcctgggcagggggtccaggtgggccacacaggggccaggatggcggaagatacgggtggggagggaagatatccagaaaggagccacagctgacgccaaaaagaaaagaaaaaagatatatatatatatatatatatatacacgtatatatataaagagaatttaataaaacaggggaaaaccaaggaacacttgaatttctcaggttttggacattcagagagatgaattgtgagaacagcaaagaaatccatcagaaaaacagaaagaggcagacgtttcccagggcgttcaggcagccctgatggaccgaaggctctggtgtctggtttggccccacagcagtgtgggccgatcctgtttacctcatacatccctgcactgtgtgttttcatttttgtctgctttagttctcttttattttctattcaccacacactcaccactcccagcttctcgtgtccagtgaaacccctgaaccaagatcactgaatttttgtttttttcttgttgctttgggaaatttttttttctctgtagggtttttaagaggtttcgggggttttgttgtgtaaatattctattttattcttggggggatcaaaccttaggaaaaggatatctatatatctatatagctatatatttgtgttccttcagggaaactggtcttgaaaaagcaagaaaaaaaagcaaaaaaaaaaaaaaa

SEQ ID NO: 2583 - DNA, 4221 bp, Homo Sapiens
  NM_005226
tagtctctgactcgctcgggcagaggccgaggaagccggttccggggacgggcaacagggactcagggaccagaaggcggctgcaggacgcgaccgagcaggaccccaggcccgggaacgacgtcgcgagcgctgagactgccgggcctcccagcccatctggcattcgagcgcaggaccgggcgccccggcaccgccgcgcgccacccgctaggatgccggtggccccagcgccctcagccgacggaggagccctttttcaacgccctcgctggagtctggcctgcacgccttgctgaatgaagccggaacctcagccccgcttccctttgaaatgaatgttcctggggcgccctctcgtggattttggagctaatcgtctgtgaatgccaagtgatggcaactgccctcccgccgcgtctccagccggtgcgggggaacgagaccctgcgggagcattaccagtacgtggggaagttggcgggcaggctgaaggaggcctccgagggcagcacgctcaccaccgtgctcttcttggtcatctgcagcttcatcgtcttggagaacctgatggttttgattgccatctggaaaaacaataaatttcacaaccgcatgtactttttcattggcaacctggctctctgcgacctgctggccggcatcgcttacaaggtcaacattctgatgtctggcaagaagacgttcagcctgtctcccacggtctggttcctcagggagggcagtatgttcgtggcccttggggcgtccacctgcagcttactggccatcgccatcgagcggcacttgacaatgatcaaaatgaggccttacgacgccaacaagaggcaccgcgtcttcctcctgatcgggatgtgctggctcattgccttcacgctgggcgccctgcccattctgggctggaactgcctgcacaatctccctgactgctctaccatcctgcccctctactccaagaagtacattgccttctgcatcagcatcttcacggccatcctggtgaccatcgtgatcctctacgcacgcatctacttcctggtgaagtccagcagccgtaaggtggccaaccacaacaactcggagcggtccatggcactgctgcggaccgtggtgattgtggtgagcgtgttcatcgcctgctggtccccactcttcatcctcttcctcattgatgtggcctgcagggtgcaggcgtgccccatcctcttcaaggctcagtggttcatcgtgttggctgtgctcaactccgccatgaacccggtcatctacacgctggccagcaaggagatgcggcgggccttcttccgtctggtctgcaactgcctggtcaggggacggggggcccgcgcctcacccatccagcctgcgctcgacccaagcagaagtaaatcaagcagcagcaacaatagcagccactctccgaaggtcaaggaagacctgccccacacagccccctcatcctgcatcatggacaagaacgcagcacttcagaatgggatcttctgcaactgatcgtctccatgcgccctgctctgcggctgtgttcttatttattgcatgcgtcgcttccacaggggcccctcaagagctgtgactcgggagagctaccttactttgaccaacagcctgcccagtgtggatgtctcttacagagggggcccaaggaatcaccaccccgcttcagtgtaaacaacgtgccttgtccactttgggctccagagtctttcagatgtactaagctgctgacatcatccactgccttctgctgcatcctagacaccctccctgttgttcacagagagggaaggtcgtgggccacacaatgctgtgtgaccctctccgtgtgcctctgaatggtgttttgatgattttacactacatttcctgtgcgtagaatggatgcttgtatattcgtacatctctatgttacacagaatttgtgttgcaggtgtttgccatgtggtacctacatagaatctccatacaacacacaggtaacaggttatacaagtggattcagactgaacccccagtacaaggacattgttttgaactaggtggacatgccatccctggtctccttagactgacatgattctcatgttaaccaagttttaaaagttcaaattccccaaaaaggcttgtccaaggctggccccagatgtgtgggtctgacccacaccagccctgtgtcctgtcctttcagtcatttgtccctgcgtaattttaatcgtattccaaagcccaattatgtgatggttttcaggtttctgcaaattacagaagagccagccaagatcacccaggagcttgtgcccccagatgggccaaagaaagagcctatgaaggagaagcagaagcagacggctggcctggctcaccttcccacgccagtggggcaggggtctgcttcaggaaatggaagctgtccaggaaatgagcagagattcacaagacagcactttgattctatgttgagtttgtttctatattagaaaagcagcaagtcagtaatcccccgtggcatcacagctaagtagctgtggccaccggcagtttcacagcatcctgaaagctggcactgatcgtgactatcagtgaaagaagtttaattttcaggttagaaaatgtgatctggcagtttatgcattcttcagagtaatgtaataatacctatgtgatgctgtaattttacttttcaacataagttgaacccgtagcagtctgtttaccttgtaaagggattacttagaagacatttttgtacatgctcttccccaaggattgtacgtattatacaaatagatggaaagaaaagtgaacacgtttgtagaactttcataagcacacagttgctgtgttgagttctctttaaaaacaaggacaaaaccaaccagcgttcaaaggaacctcccatcagagtcccctaaagtattttaggttcagtgagcatttgcctgaataaaacctaaaagagtagtcttaacacattactaactttttctaagagaaattgattcctgttttgtcatctgatgcaatttgctcttataaagagacattttcataggttcagagtaactcacctccatgggctgaccaaaggcttttctaatttttgttactgatgagatgaaacctatttgtaaggagatcttccccaggagcatttctgttgccttcttgacatcaatgaaaagtagcatattctcttatgaaatagcatgagaaaacacagggcatttctaggacagtaaaacgttaaagtactggattaagaaaacaacaacaggctgggcgcagtggctcacacctgtaatcccagcactttgggaggctgaggcgggtggatcacctgaggtcaggagtttgtgaccagcctggccaacatagtgaaatcctgtttctactaaaaatacaaaaattagctggatgcgatagcacgtgcctgtagtcccagctactcgggaggctgaggctggagagttgctcaaacccgggaggcggagattgcagtgagccaagatcgcaccgctgcactccagcctgggtgacagagcgaccctctgtctcaaaaaataataataataataaataaaacaacaacaaaatgcatcagagagccaaaacattcagtattgcattttcacataggtgatgaaatgactttggaactttatctgtgttatagttatgagttgctttgggagacttggagctctctgtagctattgttcataacactttgctccataaccctgatgtccgcagtatctaagtatctcagccttcatccattaactctactagggagcccacagccaccatttccactaggaggtatcaatatttgtggtatgacataaggctcccttgaaataacaagacttttgagcaatctgaattaaaaatacatcaaaaaagtaatagcgctcatttgctaaatgcaaaaaataatcacctttgataccaatgtgcaccaatatgcctaactagctagccagctggagataatttaccagggaatgtttcaaagccctaaccttgaagtttggaaacaggtggtcttctatgctgcagagaaactatgcattaggtctcttttcaattagaaacctttactatttccaatgtatgtttgttaaaaataataataataaaaccaaaagcctttgtggaaacccaaaaaaaaaaaaaaaa

SEQ ID NO: 2584 - DNA, 1276 bp, Homo Sapiens
  NM_005227
cttccctcttcactttgtacctttctctcctcgactgtgaagcgggccgggacctgccaggccagaccaaaccggacctcgggggcgatgcggctgctgcccctgctgcggactgtcctctgggccgcgttcctcggctcccctctgcgcgggggctccagcctccgccacgtagtctactggaactccagtaaccccaggttgcttcgaggagacgccgtggtggagctgggcctcaacgattacctagacattgtctgcccccactacgaaggcccagggccccctgagggccccgagacgtttgctttgtacatggtggactggccaggctatgagtcctgccaggcagagggcccccgggcctacaagcgctgggtgtgctccctgccctttggccatgttcaattctcagagaagattcagcgcttcacacccttctccctcggctttgagttcttacctggagagacttactactacatctcggtgcccactccagagagttctggccagtgcttgaggctccaggtgtctgtctgctgcaaggagaggaagtctgagtcagcccatcctgttgggagccctggagagagtggcacatcagggtggcgagggggggacactcccagccccctctgtctcttgctattactgctgcttctgattcttcgtcttctgcgaattctgtgagccaagcagaccttccctctcatcccaaggagccagagtcctcccaagatcccctggaggaggagggatccctgctgcctgcactgggggtgccaattcagaccgacaagatggagcattgatgggggagatcagagggtctgaggtgactcttgcaggagcctgtcccctcatcacaggctaaagaagagcagtagacagccctggacactctgaagcagaggcaagacaaacacaggcgctttgcaggctgctctgagggtctcagcccatcccccaggaggactgggatttggtatgatcaaatcctcaagccagctgggggcccaggctgaagacctggggacaggtcgattgctggaccagggcaaagaagaagccctgccatctgtgccctgtgggccttttccctggggcagcaccttgccctccccaggggatcactcacttgtcttctatgaagacggactcttcatgaggttgaatttcatgccagtttgtatttttataagtatctagaccaaaccttcaataaaccactcatctttttgttgccctccccaaaaaaaaaaaaaaaaaaaaa

SEQ ID NO: 2585 - DNA, 2833 bp, Homo Sapiens
  NM_005229
ctcgggcccacgtgagctgtagggaaacgcaggggcggcttctaggtgctgccgccgccaccgccaccaccacctccaccgccgcctcggaacccaggcctggggggcggtggggccgcgtatggagcccccgccccccggagctgccaacattgccaacgccaccgccacgctacacacaggtacccctgggatggcgtgagcactcccccagcgatggacccatctgtgacgctgtggcagtttctgctgcagctgctgagagagcaaggcaatggccacatcatctcctggacttcacgggatggtggtgaattcaagctggtggatgcagaggaggtggcccggctgtgggggctacgcaagaacaagaccaacatgaattacgacaagctcagccgggccttgcggtactactatgacaagaacatcatccgcaaggtgagcggccagaagttcgtctacaagtttgtgtcctaccctgaggtcgcagggtgctccactgaggactgcccgccccagccagaggtgtctgttacctccaccatgccaaatgtggcccctgctgctatacatgccgccccaggggacactgtctctggaaagccaggcacacccaagggtgcaggaatggcaggcccaggcggtttggcacgcagcagccggaacgagtacatgcgctcgggcctctattccaccttcaccatccagtctctgcagccgcagccaccccctcatcctcggcctgctgtggtgctccccagtgcagctcctgcaggggcagcagcgcccccctcggggagcaggagcaccagtccaagccccttggaggcctgtctggaggctgaagaggccggcttgcctctgcaggtcatcctgaccccgcccgaggccccaaacctgaaatcggaagagcttaatgtggagccgggtttgggccgggctttgcccccagaagtgaaagtagaagggcccaaggaagagttggaagttgcgggggagagagggtttgtgccagaaaccaccaaggccgagccagaagtccctccacaggagggcgtgccagcccggctgcccgcggttgttatggacaccgcagggcaggcgggcggccatgcggcttccagccctgagatctcccagccgcagaagggccggaagccccgggacctagagcttccactcagcccgagcctgctaggtgggccgggacccgaacggaccccaggatcgggaagtggctccggcctccaggctccggggccggcgctgaccccatccctgcttcctacgcatacattgaccccggtgctgctgacacccagctcgctgcctcctagcattcacttctggagcaccctgagtcccattgcgccccgtagcccggccaagctctccttccagtttccatccagtggcagcgcccaggtgcacatcccttctatcagcgtggatggcctctcgacccccgtggtgctctccccagggccccagaagccatgactactaccaccaccaccaccaccccttctggggtcactccatccatgctctctccagccagccatctcaaggagaaacatagttcaactgaaagactcatgctctgattgtggtggggtggggatccttgggaagaattactcccaagagtaactctcattatctcctccacagaaaacacacagcttccacaacttctctgttttctgtcagtcccccagtggccgcccttacacgtctcctacttcaatggtaggggcggtttatttatttattttttgaaggccactgggaggagcctgacctaaccttttagggtggttaggacatctcccccacctccccacttttttccccaagacaagacaatcgaggtctggcttgagaacgacctttctttctttatttctcagcctgcccttggggagatgagggagccctgtctgcgtttttggatgtgagtagaagagttagtttgttttgttttattattcctggccatactcaggggtccaggaagaatttgtaccatttaatgggttgggagtcttggccaaggaagaatcacacccttggaatagaaatttccacctccccaacctttctctcagacagcttatccttttcaaccaactttttggccagggaggaatgtcccttttgttcttccccctgagaagccattcctttgtctgccaacctccctggggtcctgcctgtttcctcccaatggagggtttttttggggggtggtccccgtctggggggcccctccagccagtactccaggtctccctgtctctcccccgctgccattttgatagtataatctatttttaaatggggcttttcaataggggagagggagtcatctcttcctatatttggtggggtgggtgggaaggaagggatttgggggggaatcttcctgccgcctcccccactccaagtgtttatttttgataccaaacatgaattttcagttccctccctcccagccccccaatttcctgcgggcgggtacaaaggaccctttcaatgtccctggagttgggagggaggaatgggggacataaagcctgtcctgtctctattctaggcaagagagagtgggttcaaaagactcctgggctcacctgttagcgctggcccagcccaggccttgggacctgggggttggtgatttgggggacagtgctacactcgtctccactgtttgttttacttccccaaaatggaccttttttttttctaaagagtcccagagaatggggaattgttcctgtaaatatatatttttcaaagtgaaaaaaaaaaaaaaaaaaaaaaa

SEQ ID NO: 2586 - DNA, 3369 bp, Homo Sapiens
  NM_005232
gcccccgcccggcccgcccggctctcctagtcccttgcaacctggcgctgccatccgggccactgtcccaggtcccggcccggagctatggagcggcgctggcccctggggctagggctggtgctgctgctctgcgccccgctgcccccgggggcgcgcgccaaggaagttactctgatggacacaagcaaggcacagggagagctgggctggctgctggatcccccaaaagatgggtggagtgaacagcaacagatactgaatgggacacccctgtacatgtaccaggactgcccaatgcaaggacgcagagacactgaccactggcttcgctccaattggatctaccgcggggaggaggcttcccgcgtccacgtggagctgcagttcaccgtgcgggactgcaagagtttccctgggggagccgggcctctgggctgcaaggagaccttcaaccttctgtacatggagagtgaccaggatgtgggcattcagctccgacggcccttgttccagaaggtaaccacggtggctgcagaccagagcttcaccattcgagaccttgtgtctggctccgtgaagctgaatgtggagcgctgctctctgggccgcctgacccgccgtggcctctacctcgctttccacaacccgggtgcctgtgtggccctggtgtctgtccgggtcttctaccagcgctgtcctgagaccctgaatggcttggcccaattcccagacactctgcctggccccgctgggttggtggaagtggcggggacctgcttgccccacgcgcgggccagccccaggccctcaggtgcaccccgcatgcactgcagccctgatggcgagtggctggtgcctgtaggacggtgccactgtgagcctggctatgaggaaggtggcagtggcgaagcatgtgttgcctgccctagcggctcctaccggatggacatggacacaccccattgtctcacgtgcccccagcagagcactgctgagtctgagggggccaccatctgtacctgtgagagcggccattacagagctcccggggagggcccccaggtggcatgcacaggtcccccctcggccccccgaaacctgagcttctctgcctcagggactcagctctccctgcgttgggaacccccagcagatacggggggacgccaggatgtcagatacagtgtgaggtgttcccagtgtcagggcacagcacaggacggggggccctgccagccctgtggggtgggcgtgcacttctcgccgggggcccgggggctcaccacacctgcagtgcatgtcaatggccttgaaccttatgccaactacacctttaatgtggaagcccaaaatggagtgtcagggctgggcagctctggccatgccagcacctcagtcagcatcagcatggggcatgcagagtcactgtcaggcctgtctctgagactggtgaagaaagaaccgaggcaactagagctgacctgggcggggtcccggccccgaagccctggggcgaacctgacctatgagctgcacgtgctgaaccaggatgaagaacggtaccagatggttctagaacccagggtcttgctgacagagctgcagcctgacaccacatacatcgtcagagtccgaatgctgaccccactgggtcctggccctttctcccctgatcatgagtttcggaccagcccaccagtgtccaggggcctgactggaggagagattgtagccgtcatctttgggctgctgcttggtgcagccttgctgcttgggattctcgttttccggtccaggagagcccagcggcagaggcagcagaggcagcgtgaccgcgccaccgatgtggatcgagaggacaagctgtggctgaagccttatgtggacctccaggcatacgaggaccctgcacagggagccctggactttacccgggagcttgatccagcgtggctgatggtggacactgtcataggagaaggagagtttggggaagtgtatcgagggaccctgaggctccccagccaggactgcaagactgtggccattaagaccttaaaagacacatccccaggtggccagtggtggaacttccttcgagaggcaactatcatgggccagtttagccacccgcatattctgcatctggaaggcgtcgtcacaaagcgaaagccgatcatgatcatcacagaatttatggagaatggagccctggatgccttcctgagggagcgggaggaccagctggtccctgggcagctagtggccatgctgcagggcatagcatctggcatgaactacctcagtaatcacaattatgtccaccgggacctggctgccagaaacatcttggtgaatcaaaacctgtgctgcaaggtgtctgactttggcctgactcgcctcctggatgactttgatggcacatacgaaacccagggaggaaagatccctatccgttggacagcccctgaagccattgcccatcggatcttcaccacagccagcgatgtgtggagctttgggattgtgatgtgggaggtgctgagctttggggacaagccttatggggagatgagcaatcaggaggttatgaagagcattgaggatgggtaccggttgccccctcctgtggactgccctgcccctctgtatgagctcatgaagaactgctgggcatatgaccgtgcccgccggccacacttccagaagcttcaggcacatctggagcaactgcttgccaacccccactccctgcggaccattgccaactttgaccccaggatgactcttcgcctgcccagcctgagtggctcagatgggatcccatatcgaaccgtctctgagtggctcgagtccatacgcatgaaacgctacatcctgcacttccactcggctgggctggacaccatggagtgtgtgctggagctgaccgctgaggacctgacgcagatgggaatcacactgcccgggcaccagaagcgcattctttgcagtattcagggattcaaggactgatccctcctctcaccccatgcccaatcagggtgcaaggagcaaggacggggccaaggtcgctcatggtcactccctgcgccccttcccacaacctgccagactaggctatcggtgctgcttctgcccactttcaggagaaccctgctctgcaccccagaaaacctctttgttttaaaagggaggtgggggtagaagtaaaaggatgatcatgggagggagctgaggggttaatatatatacatacatacacatatatatatttttgtaaataaacaggaactgattttctgcctccatcccacccatgagggctgcaggcactacaaaagagctgactactgagaaaaaaaa

SEQ ID NO: 2587 - DNA, 5242 bp, Homo Sapiens
  NM_005238
gagatcgagagcgaacgaggcagccgccggcggagaggagggagcgggcgagggccgggcaggaggagcgggcgcggcgcgggcgaggctgggacccgagcgcgctcacttcgccgcaaagtgccaacttcccctggagtgccgggcgcgcaccgtccgggcgcgggggaaagaaaggcagcgggaatttgagatttttgggaagaaagtcggatttcccccgtccccttccccctgttactaatcctcattaaaaagaaaaacaacagtaactgcaaacttgctaccatcccgtacgtcccccactcctggcaccatgaaggcggccgtcgatctcaagccgactctcaccatcatcaagacggaaaaagtcgatctggagcttttcccctccccggatatggaatgtgcagatgtcccactattaactccaagcagcaaagaaatgatgtctcaagcattaaaagctactttcagtggtttcactaaagaacagcaacgactggggatcccaaaagacccccggcagtggacagaaacccatgttcgggactgggtgatgtgggctgtgaatgaattcagcctgaaaggtgtagacttccagaagttctgtatgaatggagcagccctctgcgccctgggtaaagactgctttctcgagctggccccagactttgttggggacatcttatgggaacatctagagatcctgcagaaagaggatgtgaaaccatatcaagttaatggagtcaacccagcctatccagaatcccgctatacctcggattacttcattagctatggtattgagcatgcccagtgtgttccaccatcggagttctcagagcccagcttcatcacagagtcctatcagacgctccatcccatcagctcggaagagctcctctccctcaagtatgagaatgactacccctcggtcattctccgagaccctctccagacagacaccttgcagaatgactactttgctatcaaacaagaagtcgtcaccccagacaacatgtgcatggggaggaccagtcgtggtaaactcgggggccaggactcttttgaaagcatagagagctacgatagttgtgatcgcctcacccagtcctggagcagccagtcatctttcaacagcctgcagcgtgttccctcctatgacagcttcgactcagaggactatccggctgccctgcccaaccacaagcccaagggcaccttcaaggactatgtgcgggaccgtgctgacctcaataaggacaagcctgtcattcctgctgctgccctagctggctacacaggcagtggaccaatccagctatggcagtttcttctggaattactcactgataaatcctgtcagtcttttatcagctggacaggagatggctgggaattcaaactttctgacccagatgaggtggccaggagatggggaaagaggaaaaacaaacctaagatgaattatgagaaactgagccgtggcctacgctactattacgacaaaaacatcatccacaagacagcggggaaacgctacgtgtaccgctttgtgtgtgacctgcagagcctgctggggtacacccctgaggagctgcacgccatgctggacgtcaagccagatgccgacgagtgatggcactgaaggggctggggaaaccctgctgagaccttccaaggacagccgtgttggttggactctgaattttgaattgttattctattttttattttccagaactcattttttaccttcaggggtgggagctaagtcagttgcagctgtaatcaattgtgcgcagttgggaaaggaaagccaggacttgtggggtgggtgggaccagaaattcttgagcaaattttcaggagagggagaagggccttctcagaagcttgaaggctctggcttaacagagaaagagactaatgtgtccaatcatttttaaaaatcatccatgaaaaagtgtcttgagttgtggacccattagcaagtgacattgtcacatcagaactcatgaaactgatgtaaggcaattaatttgcttctgtttttaggtctgggagggcaaaaaagaggtgggtgggatgaaacatgttttggggggggatgcactgaaaatctgagaactatttacctatcactctagttttgaagcaaagatggacttcagtggggaggggccaaaaccgttgttgtgttaaaatttattttattaaattttgtgccagtattttttttcttaaaaatcgtcttaagctctaaggtggtctcagtattgcaatatcatgtaagtttgtttttatttgccggctgaggattctgtcacaatgaaagaaaactgtttatatagaccccattggaaaagcaaaacgctctcactgagatcagggatcccaaattcatgggacttatataagaaggacaattaatgctgatttgggtacaggggaattatgtgtgtgaatgtcatctacaattaaaaaaaattagcacatccctttacttacttgttatcagtggattctcggggtttggacttaatgttgagctaagaagcattaagtctttgaactgaatgtattttgcatccctggttttggacgacagtaaacgtaggagcactgttgaagtcctggaagggagatcgaaggaggaagattgacttggttctttcttagtcctatatctgtagcatagatgacttggaataaaagctgtatgcatgggcattacccctcaggtcctaagaaataagtcctgaatgcatgtcgttccaaactaacactctgtaatttttcttttatgtcttattttccaagagtcctccattttttgcaccccctcaccgccaactctgttattcagtagagagaagtgtacggctttctgattggtgagtgaaaaagtaacttgagacacgacctaagttgaagagtttagacttgctgagttttagaagtgatggaaattaagagagcatttcaataaaatgtgacttggctgtctttggaagagaagtgcaaggctttcctttgaagaatttaaattagtccggtaggatgtcaggtgagactgtgtatgcaaaatgaatggcacaggtgatgccagggcctcttgcttgggtctgatgtcttggcacagggtaagtgaaggttaattccagaagagaggaatgacttgaaggcaaaggaaactaaggaaggaggttcagtgaggaaaataaggttgtccatgagatttgaatagatttttagttcccccaaggtttaaatacaaacatagtcaagcaaggtagtcatctttctgctggttgtgagggggaatctgaaaatggagttttagaggaaaagtcaacatctaactagtgaggaaaagtgcctaatacaattagaatctccctcactctatagttgcccagttgaaaggataaggaggaggggtggcttttatggacttccatgagagaaggaaagaaatatttcaggtaagcttctcagggctggccctttttgggatttggatgagaaattggaagtactaactactttctagcatatctttaagaaaattgattgttatttactcccagatcctcttgcagacccagaattatcaggaacatagctctgtgattcatgagtgtccccatactgatgaattggagcatccatatggaaagcaaaggcagaattatcccagctgtattattttgatcttttggatgcaggtgccttaatgaagctctcaaaatattttaggagctgctcagggagtgttgggtggaactgtttggactacattgttttctcttagattatgtgatttttgttgggcactggcaaaaggtgtgtgtgtgaatgtgtgcatgtgtgtgaatgttgtgtgtgtgtgtgtgtgtgtgtgtgtgtgtgtgtgtgtgtgtgtttgcagacatgcaaaactgcagctgaaataataccttagatttctaggtaagtctttccacatttcaataatgggtaagagtagaaccagggccgggtatcaattattgcttgctgtttgcaaccaggcataaaatcactttctcaaatcatccaccgttcctattaaatttatgccggaaactctccttctgtgagtataactcctgcagttcctatagcagataagatataagaaagtgcctcctagtgctcctccgcccgcttgtttgctaaaattccctttctctctaagtccaccattttcaagatttgtagatagtgtattagttaagacagctttgtcgatctggccagatgttttttctcctttgtccaaaggccagagaccatcccaggaagagtggtgggtggtttatacactggaaatgttgcgtttatgctttttaaaaacacacgttaacttcagaggaaggatgggcaaatctggtctagctgggtgaaacccttattttcccagagatgccttaacctttgttggttttggctttagggttcagagtcacttttgttcccttctccattctggagagggacttcccctacatagagccctgatttttgtggctgtggggattggaggtagcattcaaagatcagatgtgcttttcctcactttggagatgaacactctgggttttacagcattaacctgcctaaccttcatggtgagaaatacaccatctctcttctagtcatgctgtgcatgccgcttactctgttggggtctatataaatttgttgaactcttacctacattccaaagaagtttcaaggaaccataaatatatgtatacatatacatatataaaatatatatattaaaataaaattatcaggaatactgcctcagttattgaacttttttttttaagaatactttttttttaagctgagaagtatagggatgaaaaagatgttatattgtgtttgactattttccaacttgtattttcatataatttatattttttaaaagctgaaaatttagaagcaagatgaaaaaaaggaaaagcaggtgctttttaaaaatcagaactgaggtagcttagagatgtagcgatgtaagtgtcgatgtttttttaaaaaaaaatgcaaaaaaattcttatggcggagttttttgtttgtttattttagtagctgatgctggcacatcattttgctggagagttttttatatactgtagcctgatttcatattgtattttaaactgtgtgaaattaaaaacaaagaatttcattcataatgct

SEQ ID NO: 2588 - DNA, 3672 bp, Homo Sapiens
  NM_005239
gcccggttacttcctccagagactgacgagtgcggtgtcgctccagctcagagctcccggagccgcccggccagcgtccggcctccctgatcgtctctggccggcgccctcgccctcgcccggcgcgcaccgagcagccgcgggcgccgagcagccaccgtcccgaccaagcgccggccctgcccgcagcggcaggatgaatgatttcggaatcaagaatatggaccaggtagcccctgtggctaacagttacagagggacactcaagcgccagccagcctttgacacctttgatgggtccctgtttgctgtttttccttctctaaatgaagagcaaacactgcaagaagtgccaacaggcttggattccatttctcatgactccgccaactgtgaattgcctttgttaaccccgtgcagcaaggctgtgatgagtcaagccttaaaagctaccttcagtggcttcaaaaaggaacagcggcgcctgggcattccaaagaacccctggctgtggagtgagcaacaggtatgccagtggcttctctgggccaccaatgagttcagtctggtgaacgtgaatctgcagaggttcggcatgaatggccagatgctgtgtaaccttggcaaggaacgctttctggagctggcacctgactttgtgggtgacattctctgggaacatctggagcaaatgatcaaagaaaaccaagaaaagacagaagatcaatatgaagaaaattcacacctcacctccgttcctcattggattaacagcaatacattaggttttggcacagagcaggcgccctatggaatgcagacacagaattaccccaaaggcggcctcctggacagcatgtgtccggcctccacacccagcgtactcagctctgagcaggagtttcagatgttccccaagtctcggctcagctccgtcagcgtcacctactgctctgtcagtcaggacttcccaggcagcaacttgaatttgctcaccaacaattctgggactcccaaagaccacgactcccctgagaacggtgcggacagcttcgagagctcagactccctcctccagtcctggaacagccagtcgtccttgctggatgtgcaacgggttccttccttcgagagcttcgaagatgactgcagccagtctctctgcctcaataagccaaccatgtctttcaaggattacatccaagagaggagtgacccagtggagcaaggcaaaccagttatacctgcagctgtgctggccggcttcacaggaagtggacctattcagctgtggcagtttctcctggagctgctatcagacaaatcctgccagtcattcatcagctggactggagacggatgggagtttaagctcgccgaccccgatgaggtggcccgccggtggggaaagaggaaaaataagcccaagatgaactacgagaagctgagccggggcttacgctactattacgacaagaacatcatccacaagacgtcggggaagcgctacgtgtaccgcttcgtgtgcgacctccagaacttgctggggttcacgcccgaggaactgcacgccatcctgggcgtccagcccgacacggaggactgaggtcgccgggaccaccctgagccggccccaggctcgtggactgagtgggaagcccatcctgaccagctgctccgaggacccaggaaaggcaggattgaaaatgtccaggaaagtggccaagaagcagtggccttattgcatcccaaaccacgcctcttgaccaggctgcctcccttgtggcagcaacggcacagctaattctactcacagtgcttttaagtgaaaatggtcgagaaagaggcaccaggaagccgtcctggcgcctggcagtccgtgggacgggatggttctggctgtttgagattctcaaaggagcgagcatgtcgtggacacacacagactatttttagattttcttttgccttttgcaaccaggaacagcaaatgcaaaaactctttgagagggtaggagggtgggaaggaaacaaccatgtcatttcagaagttagtttgtatatattattataatcttataattgttctcagaatcccttaacagttgtatttaacagaaattgtatattgtaatttaaaataattatataactgtatttgaaataagaattcagacatctgaggttttatttcatttttcaatagcacatatggaattttgcaaagatttaatctgccaagggccgactaagagaagttgtaaagtatgtattatttacatttaatagacttacagggataaggcctgtggggggtaatccctgctttttgtgtttttttgtttgtttgtttgtttgtttttggggggttttcttgccttggttgtctggcaaggactttgtacatttgggagtttttatgagaaacttaaatgttattatctgggcttatatctggcctctgctttctcctttaattgtaaagtaaaagctataaagcagtatttttcttgacaaatggcatatgttttccacttctttgcatgcgtttaagtcagtttatacacaaaatggattttattttttagtttaactgtgtttctccgacagctcacctctctctgaccacccagccatttccttcctgtgctccacgttcttctgtgtgattaaaataagaatattatttttggaaatatgcaactccttttcagagatcaggagggatttatgtagcagctatttttactgcaaaagtaattcactggaaaaaaaatgtaatttgtaagaaagctttatttttatctcagctctatgtaaagttaaagttactgtacagagctgaaggacggggggcggtaggggtcttgatgaaacctcttgaacgaagcacagtttgtcccatctttgttcactcgtgtgtctcaaccatcttaatagcatgctgctcctttttgctcagtgtccacagcaagatgacgtgattcttattttcttggacacagactattctgaggcacagagcggggacttaagatgggaaagagaaagcatcggagccattcattcggagaaaacgttttgatcaaaatggagacttttgtagtcgtttcaaaagagcacctgagtcatgtgtattcccggcctttataaatgacccggtcaagttggtttcaaagtccgacaggcttgtctgtttactagctgcgtggccttggacgggtggctgacatctgtaaagaatcctcctgtgatgaaactgaggaatcgggtggccgggcaagctgggaagagcaaagccagagctgcgctgcctcaatacccacaaaagaccattcccagtatacataagcacaggatgtttttctcaagagggatgtatttatcacttggacatctgtttataatataaacagacatgtgactgggaacatcttgctgccaaaagaatcctaggcagtggctcattgtatgtgaggttgaaccacgtgaaattgccaatattaggctggcttttatctacaaagaaggagtttcatggggttcagcctaacagttatggaaactacagtccttataaaccattggcatggtaataaacagatcttaagtataaaaattttgtaattgggcctttactctctcaataataaagtattttgtttatataaa

SEQ ID NO: 2589 - DNA, 2679 bp, Homo Sapiens
  NM_005243
agagccagcggacggaaccattccaaacagcctagtctcgtgctgagagcctctccggtttcacgctgagacccgctcacccccgctctggccccttagatgctattttggcccgagtgtcacgtcgggcgctctttagagaggactgggacaagagttgcggacgcgaagaacgagtaagcggtggttcatccctcctgaccccacccccgtggcctggcccgatggtcgcgcccggggttgcgagatttgcgcctgcgcagtgcggcgcctagagggaaagcgagagggagacggacgttgagagaacgaggaggaaggagagaaaatggcgtccacggattacagtacctatagccaagctgcagcgcagcagggctacagtgcttacaccgcccagcccactcaaggatatgcacagaccacccaggcatatgggcaacaaagctatggaacctatggacagcccactgatgtcagctatacccaggctcagaccactgcaacctatgggcagaccgcctatgcaacttcttatggacagcctcccactggttatactactccaactgccccccaggcatacagccagcctgtccaggggtatggcactggtgcttatgataccaccactgctacagtcaccaccacccaggcctcctatgcagctcagtctgcatatggcactcagcctgcttatccagcctatgggcagcagccagcagccactgcacctacaagaccgcaggatggaaacaagcccactgagactagtcaacctcaatctagcacagggggttacaaccagcccagcctaggatatggacagagtaactacagttatccccaggtacctgggagctaccccatgcagccagtcactgcacctccatcctaccctcctaccagctattcctctacacagccgactagttatgatcagagcagttactctcagcagaacacctatgggcaaccgagcagctatggacagcagagtagctatggtcaacaaagcagctatgggcagcagcctcccactagttacccaccccaaactggatcctacagccaagctccaagtcaatatagccaacagagcagcagctacgggcagcagagttcattccgacaggaccaccccagtagcatgggtgtttatgggcaggagtctggaggattttccggaccaggagagaaccggagcatgagtggccctgataaccggggcaggggaagagggggatttgatcgtggaggcatgagcagaggtgggcggggaggaggacgcggtggaatgggcagcgctggagagcgaggtggcttcaataagcctggtggacccatggatgaaggaccagatcttgatctaggcccacctgtagatccagatgaagactctgacaacagtgcaatttatgtacaaggattaaatgacagtgtgactctagatgatctggcagacttctttaagcagtgtggggttgttaagatgaacaagagaactgggcaacccatgatccacatctacctggacaaggaaacaggaaagcccaaaggcgatgccacagtgtcctatgaagacccacccactgccaaggctgccgtggaatggtttgatgggaaagattttcaagggagcaaacttaaagtctcccttgctcggaagaagcctccaatgaacagtatgcggggtggtctgccaccccgtgagggcagaggcatgccaccaccactccgtggaggtccaggaggcccaggaggtcctgggggacccatgggtcgcatgggaggccgtggaggagatagaggaggcttccctccaagaggaccccggggttcccgagggaacccctctggaggaggaaacgtccagcaccgagctggagactggcagtgtcccaatccgggttgtggaaaccagaacttcgcctggagaacagagtgcaaccagtgtaaggccccaaagcctgaaggcttcctcccgccaccctttccgcccccgggtggtgatcgtggcagaggtggccctggtggcatgcggggaggaagaggtggcctcatggatcgtggtggtcccggtggaatgttcagaggtggccgtggtggagacagaggtggcttccgtggtggccggggcatggaccgaggtggctttggtggaggaagacgaggtggccctggggggccccctggacctttgatggaacagatgggaggaagaagaggaggacgtggaggacctggaaaaatggataaaggcgagcaccgtcaggagcgcagagatcggccctactagatgcagagaccccgcagagctgcattgactaccagatttattttttaaaccagaaaatgttttaaatttataattccatatttataatgttggccacaacattatgattattccttgtctgtactttagtatttttcaccatttgtgaagaaacattaaaacaagttaaatggtagtgtgcggagtttttttttcttccttcttttaaaaatggttgtttaagactttaacaatgggaaccccttgtgagcatgctcagtatcattgtggagaaccaagagggcctcttaactgtaacaatgttcatggttgtgatgttttttttttttttttaaataaaattccaaatgtttataaagagtcaaaaaaaaaaaaaaaaa

SEQ ID NO: 2590 - DNA, 2458 bp, Homo Sapiens
  NM_005248
aataagagaagtccgaggcggcttcctcctccctgcccagcaggggcggcggtcagaggcgggcagcaccccagttctccccgcacgccggcactcgcggctgctggagccccggctggctcaccccggggccgggcagaattgggctccaggtctctgacccctcccaaggatcatgccgcagccccactgacccaggagtaggggcctaagggcagggaacctggaatgggctgtgtgttctgcaagaaattggagccggtggccacggccaaggaggatgctggcctggaaggggacttcagaagctacggggcagcagaccactatgggcctgaccccactaaggcccggcctgcatcctcatttgcccacatccccaactacagcaacttctcctctcaggccatcaaccctggcttccttgatagtggcaccatcaggggtgtgtcagggattggggtgaccctgttcattgccctgtatgactatgaggctcgaactgaggatgacctcaccttcaccaagggcgagaagttccacatcctgaacaatactgaaggtgactggtgggaggctcggtctctcagctccggaaaaactggctgcattcccagcaactacgtggcccctgttgactcaatccaagctgaagagtggtactttggaaagattgggagaaaggatgcagagaggcagctgctttcaccaggcaacccccagggggcctttctcattcgggaaagcgagaccaccaaaggtgcctactccctgtccatccgggactgggatcagaccagaggcgatcatgtgaagcattacaagatccgcaaactggacatgggcggctactacatcaccacacgggttcagttcaactcggtgcaggagctggtgcagcactacatggaggtgaatgacgggctgtgcaacctgctcatcgcgccctgcaccatcatgaagccgcagacgctgggcctggccaaggacgcctgggagatcagccgcagctccatcacgctggagcgccggctgggcaccggctgcttcggggatgtgtggctgggcacgtggaacggcagcactaaggtggcggtgaagacgctgaagccgggcaccatgtccccgaaggccttcctggaggaggcgcaggtcatgaagctgctgcggcacgacaagctggtgcagctgtacgccgtggtgtcggaggagcccatctacatcgtgaccgagttcatgtgtcacggcagcttgctggattttctcaagaacccagagggccaggatttgaggctgccccaattggtggacatggcagcccaggtagctgagggcatggcctacatggaacgcatgaactacattcaccgcgacctgagggcagccaacatcctggttggggagcggctggcgtgcaagatcgcagactttggcttggcgcgtctcatcaaggacgatgagtacaacccctgccaaggttccaagttccccatcaagtggacagccccagaagctgccctctttggcagattcaccatcaagtcagacgtgtggtcctttgggatcctgctcactgagctcatcaccaagggccgaatcccctacccaggcatgaataaacgggaagtgttggaacaggtggagcagggctaccacatgccgtgccctccaggctgcccagcatccctgtacgaggccatggaacagacctggcgtctggacccggaggagaggcctaccttcgagtacctgcagtccttcctggaggactacttcacctccgctgaaccacagtaccagcccggggatcagacatagcctgtccgggcatcaaccctctctggcggtggccaccagtccttgccaatccccagagctgttcttccaaagcccccaggctggcttagaaccccatagagtcctagcatcaccgaggacgtggctgctctgacaccacctagggcaacctacttgttttacagatggggcaaaaggaggcccagagctgatctctcatccgctctggccccaagcactatttcttccttttccacttaggcccctacatgcctgtagcctttctcactccatccccacccaaagtgctcagaccttgtctagttatttataaaactgtatgtacctccctcacttctctcctatcactgctttcctactctccttttatctcactctagtccaggtgccaagaatttcccttctaccctctattctcttgtgtctgtaagttacaaagtcaggaaaagtcttggctggacccctttcctgctgggtggatgcagtggtccaggactggggtctgggcccaggtttgagggagaaggttgcagagcacttcccacctctctgaatagtgtgtatgtgttggtttattgattctgtaaataagtaaaatgacaatatgaatcctcaaaccatgaaaaaaaaaaaaaaaaaa

SEQ ID NO: 2591 - DNA, 1683 bp, Homo Sapiens
  NM_005251
cgcgctctctcgctctcagggcccccctcgctcccccggccgcagtccgtgcgcgagggcgccggcgagccgtctcggaagcagcatgcaggcgcgctactccgtgtccgaccccaacgccctgggagtggtgccctacctgagcgagcagaattactaccgggctgcgggcagctacggcggcatggccagccccatgggcgtctattccggccacccggagcagtacagcgcggggatgggccgctcctacgcgccctaccaccaccaccagcccgcggcgcctaaggacctggtgaagccgccctacagctacatcgcgctcatcaccatggccatccagaacgcgcccgagaagaagatcaccttgaacggcatctaccagttcatcatggaccgcttccccttctaccgggagaacaagcagggctggcagaacagcatccgccacaacctctcgctcaacgagtgcttcgtcaaggtgccccgcgacgacaagaagcccggcaagggcagttactggaccctggacccggactcctacaacatgttcgagaacggcagcttcctgcggcgccggcggcgcttcaaaaagaaggacgtgtccaaggagaaggaggagcgggcccacctcaaggagccgcccccggcggcgtccaagggcgccccggccaccccccacctagcggacgcccccaaggaggccgagaagaaggtggtgatcaagagcgaggcggcgtccccggcgctgccggtcatcaccaaggtggagacgctgagccccgagagcgcgctgcagggcagcccgcgcagcgcggcctccacgcccgccggctcccccgacggctcgctgccggagcaccacgccgcggcgcccaacgggctgcctggcttcagcgtggagaacatcatgaccctgcgaacgtcgccgccgggcggagagctgagcccgggggccggacgcgcgggcctggtggtgccgccgctggcgctgccctacgccgccgcgccgcccgccgcctacggccagccgtgcgctcagggcctggaggccggggccgccgggggctaccagtgcagcatgcgagcgatgagcctgtacaccggggccgagcggccggcgcacatgtgcgtcccgcccgccctggacgaggccctctcggaccacccgagcggccccacgtcgcccctgagcgctctcaacctcgccgccggccaggagggcgcgctcgccgccacgggccaccaccaccagcaccacggccaccaccacccgcaggcgccgccgcccccgccggctccccagccccagccgacgccgcagcccggggccgccgcggcgcaggcggcctcctggtatctcaaccacagcggggacctgaaccacctccccggccacacgttcgcggcccagcagcaaactttccccaacgtgcgggagatgttcaactcccaccggctggggattgagaactcgaccctcggggagtcccaggtgagtggcaatgccagctgccagctgccctacagatccacgccgcctctctatcgccacgcagccccctactcctacgactgcacgaaatactgacgtgtcccgggacctcccctccccggcccgctccggcttcgcttcccagccccgacccaaccagacaattaaggggctgcagagacgcaaaa

SEQ ID NO: 2592 - DNA, 4015 bp, Homo Sapiens
  NM_005253
cgaacgagcggcgctcggcggggacagaaagagggagagagagagagagagagagggagaggcgcggccgggcgaggcgggcccgtccgggagcgggctccggggaaggggtgcgggtctgggcgccggagcggggagcggggccgcgtccctctcagcgccagctctacttgagccccacgagccgctgtccccctggcgcgctcggggccgcgggacgggcgcacgccgccttctcctagtcaagtatccgagccgccccgaaactcgggcggcgagtcggccacgggaagtttattctccggctccttttctaaaaggaagaaacagaagtttctcccagcggacagcttttctttccgcctttttggccctgtctgaaatcgggggtccccagggctggcaggccaggctcgctgggctcctaatcttttttttaatttccaatttttgattgggccgtgggtccccgctgagctccggctgcgcgcgggggcgggagggcgcgcgcaggggagggaccgagagacgcgccgactttttagagggagggatcgggtggacaactggtcccgcggcgctcgcagagccggaaagaagtgctgtaagggacgctcgggggacgctgttcctgaggtgtcgccgcctccctgtcctcgccctccgcggtgggggagaaacccaggagcgaagcccagagcccgcggcgcggccggcggacgaacgagcgcgcagcagccggtgcgcggccgcggcgagggcgggggaagaaaaacaccctgtttcctctccggcccccaccgcggatcatgtaccaggattatcccgggaactttgacacctcgtcccggggcagcagcggctctcctgcgcacgccgagtcctactccagcggcggcggcggccagcagaaattccgggtagatatgcctggctcaggcagtgcattcatccccaccatcaacgccatcacgaccagccaggacctgcagtggatggtgcagcccacagtgatcacctccatgtccaacccataccctcgctcgcacccctacagccccctgccgggcctggcctctgtccctggacacatggccctcccaagacctggcgtgatcaagaccattggcaccaccgtgggccgcaggaggagagatgagcagctgtctcctgaagaggaggagaagcgtcgcatccggcgggagaggaacaagctggctgcagccaagtgccggaaccgacgccgggagctgacagagaagctgcaggcggagacagaggagctggaggaggagaagtcaggcctgcagaaggagattgctgagctgcagaaggagaaggagaagctggagttcatgttggtggctcacggcccagtgtgcaagattagccccgaggagcgccgatcgcccccagcccctgggctgcagcccatgcgcagtgggggtggctcggtgggcgctgtagtggtgaaacaggagcccctggaagaggacagcccctcgtcctcgtcggcggggctggacaaggcccagcgctctgtcatcaagcccatcagcattgctgggggcttctacggtgaggagcccctgcacacccccatcgtggtgacctccacacctgctgtcactccgggcacctcgaacctcgtcttcacctatcctagcgtcctggagcaggagtcacccgcatctccctccgaatcctgctccaaggctcaccgcagaagcagtagcagcggggaccaatcatcagactccttgaactcccccactctgctggctctgtaacccagtgcacctccctccccagctccggagggggtcctcctcgctcctccttcccagggaccagcaccttcaagcgctccagggccgtgagggcaagagggggacctgccaccagggagcttcctggctctgggggacccaggtgggacttagcagtgagtattggaagacttgggttgatctcttagaagccatgggacctcctccctcattcatcttgcaagcaaatcccatttcttgaaaagccttggagaactcggtttggtagacttggacatctctctggcttctgaagagcctgaagctggcctggaccattcctgtccctttgttaccatactgtctctggagtgatggtgtccttccctgccccaccacgcatgctcagtgccttttggtttcaccttccctcgacttgaccctttcctcccccagcgtcagtttcactccctcttggtttttatcaaatttgccatgacatttcatctgggtggtctgaatattaaagctcttcatttctggagatggggcagcaggtggctcttctgctggggctgacttgtccagaaggggacaaagtgcaatacagagccttccctaccctgacgcctcccagtcatcatctccagaactcccagcggggctccctgagctctcaaggagatgctgccatcactgggaggctcagaggacccttcctgcccaccttcggagacggcttctggaggaacggcttggccagaagacagggtgtgagtgagacagtggggcacaggttgggtttgccaaacgcctaattaccaggccaggaagcatgccaacaaagccacacgggtgtcctagccagcttcccttcacctggtgtcttgagtagggcgtctcctgtaattactgccttgccattctgcccctggacccttctctccggaccagggaggcgtccctccctaggagccacacattatactccaagtccctgccgggctccgcctttcccccaccctggctctcagggtgacgccacccacagagatttaatgagcgtgggcctggaccttccccagatgctgccaggcagcccctccccaagcctcaaagaagcatttgctgaggatggagaggcaggggagggaggcgggaggccgtcactggagtggcgtctgcagcagctgctgccccagcacccgctcagcctgtcctggctgctcacctccccgcagggcaccgggcctttcctgccctctgtggtcatctgccacctgctggatcaagtgctttctcttttacactcccctgtccccaccccagtgcactcttctggcccaggcagcaagcaagctgtgaacagctggcctgagctgtcgctgtggcttgtggctcatgcgccattcctggttgtctgttgaatctttctggctgctggaattggagataggatgttttgcttcccactgcaggagagctgccccctttcacggggttggggaagggtccccctggcctccagcaggagcacagctcagcagggtccctgctgcccacccctctgagccttttctccccagggtatggctcctgctgagtttcttgtccagcagggccttgacaggaatccagggagtagctcctggccagaaccagcctctgcggggcttgtgctctgcaaagactctgctgctggggattcagctctagaggtcacagtatcctcgtttgaaagataattaagatcccccgtggagaaagcagtgacacattcacacagctgttccctcgcatgttatttcatgaacatgacctgttttcgtgcactagacacacagagtggaacagccgtatgcttaaagtacatgggccagtgggactggaagtgacctgtacaagtgatgcagaaaggagggtttcaaagaaaaaggattttgtttaaaatactttaaaaatgttatttcctgcatcccttggctgtgatgcccctctcccgatttcccaggggctctgggagggacccttctaagaagattgggcagttgggtttctggcttgagatgaatccaagcagcagaatgagccaggagtagcaggagatgggcaaagaaaactggggtgcactcagctctcacaggggtaatcatctcaagtggtatttgtagccaagtgggagctattttcttttttgtgcatatagatatttcttaaatgaaaaaaaaaaaaaaaaaaaaaaaaaa

SEQ ID NO: 2593 - DNA, 4549 bp, Homo Sapiens
  NM_005255
gaggccgcggcggaggggacggggctaggccgggtcgccgcctgacgcgacgcgtcctcacgggcgcctacgtcacggcgtcgaggcggaagatggtgcacctccgggccggcggttgctgagctgacccggacggcgagggagcgggagcccgagcccgaccactccggctgccgcggggtgcggcgcagccaccgccatgtcgctgctgcagtcggcgctcgacttcttggcgggtccaggctccctgggcggtgcttccggccgcgaccagagtgacttcgtggggcagacggtggaactgggcgagctgcggctgcgggtgcggcgggtcctggccgaaggagggtttgcatttgtgtatgaagctcaagatgtggggagtggcagagagtatgcattaaagaggctattatccaatgaagaggaaaagaacagagccatcattcaagaagtttgcttcatgaaaaagctttccggccacccgaacattgtccagttttgttctgcagcgtctataggaaaagaggagtcagacacggggcaggctgagttcctcttgctcacagagctctgtaaagggcagctggtggaatttttgaagaaaatggaatctcgaggccccctttcgtgcgacacggttctgaagatcttctaccagacgtgccgcgccgtgcagcacatgcaccggcagaagccgcccatcatccacagggacctcaaggttgagaacttgttgcttagtaaccaagggaccattaagctgtgtgactttggcagtgccacgaccatctcgcactaccctgactacagctggagcgcccagaggcgagccctggtggaggaagagatcacgaggaatacaacaccaatgtatagaacaccagaaatcatagacttgtattccaacttcccgatcggcgagaagcaggatatctgggccctgggctgcatcttgtacctgctgtgcttccggcagcacccttttgaggatggagcgaaacttcgaatagtcaatgggaagtactcgatccccccgcacgacacgcagtacacggtcttccacagcctcatccgcgccatgctgcaggtgaacccggaggagcggctgtccatcgccgaggtggtgcaccagctgcaggagatcgcggccgcccgcaacgtgaaccccaagtctcccatcacagagctcctggagcagaatggaggctacgggagcgccacactgtcccgagggccaccccctcccgtgggccccgctggcagtggctacagtggaggcctggcgctggcggagtacgaccagccgtatggcggcttcctggacattctgcggggtgggacagagcggctcttcaccaacctcaaggacacctcctccaaggtcatccagtccgtcgctaattatgcaaagggtgacctggacatatcttacatcacatccagaattgcagtgatgtcattcccagcagaaggtgtggagtcagcgctcaaaaacaacatcgaagatgtgcggttgttcctggactccaagcacccagggcactatgccgtctacaacctgtccccgaggacctaccggccctccaggttccacaaccgggtctccgagtgtggctgggcagcacggcgggccccacacctgcacaccctgtacaacatctgcaggaacatgcacgcctggctgcggcaggaccacaagaacgtctgcgtcgtgcactgcatggacgggagagccgcgtctgctgtggccgtctgctccttcctgtgcttctgccgtctcttcagcaccgcggaggccgccgtgtacatgttcagcatgaagcgctgcccaccaggcatctggccatcccacaaaaggtacatcgagtacatgtgtgacatggtggcggaggagcccatcacaccccacagcaagcccatcctggtgagggccgtggtcatgacacccgtgccgctgttcagcaagcagaggagcggctgcaggcccttctgcgaggtctacgtgggggacgagcgtgtggccagcacctcccaggagtacgacaagatgcgggactttaagattgaagatggcaaagcggtgattcccctgggcgtcacggtgcaaggagacgtgctcatcgtcatctatcacgcccggtccactctgggcggccggctgcaggccaagatggcatccatgaagatgttccagattcagttccacacggggtttgtgcctcggaacgccaccactgtgaaatttgccaagtatgacctggacgcgtgtgacattcaagaaaaatacccggatttatttcaagtgaacctggaagtggaggtggagcccagggacaggccgagccgggaagccccaccatgggagaactcgagcatgagggggctgaaccccaaaatcctgttttccagccgggaggagcagcaagacattctgtctaagtttgggaagccggagcttccccggcagcctggctccacggctcagtatgatgctggggcagggtccccggaagccgaacccacagactctgactcaccgccaagcagcagcgcggacgccagtcgcttcctgcacacgctggactggcaggaagagaaggaggcagagactggtgcagaaaatgcctcttccaaggagagcgagtctgccctgatggaggacagagacgagagtgaggtgtcagatgaagggggatccccgatctccagcgagggccaggaacccagggccgacccagagccccccggcctggcagcagggctggtgcagcaggacttggtttttgaggtggagacaccggctgtgctgccagagcctgtgccacaggaagacggggtcgacctcctgggcctgcactccgaggtgggcgcagggccagctgtacccccgcaggcctgcaaggccccctccagcaacaccgacctgctcagctgcctccttgggccccctgaggccgcctcccaggggcccccggaggatctgctcagcgaggacccgctgctcctggcaagcccggcccctcccctgagcgtgcagagcaccccaagaggagggccccctgccgctgctgacccctttggcccgcttctgccgtcttcaggcaacaactcccagccctgctccaatcctgatctcttcggcgaatttctcaattcggactctgtgaccgtcccaccatccttcccgtctgcccacagtgctccgcccccatcctgcagcgccgacttcctgcacctgggggatctgccaggagagcccagcaagatgacagcctcgtccagcaacccagacctgctgggaggatgggctgcctggaccgagactgcagcatcggcagtggcccccacgccagccacagaaggccccctcttctctcctggaggtcagccggccccttgtggctctcaggccagctggaccaagtctcagaacccggacccatttgctgaccttggcgacctcagctccggcctccaaggctcaccagctggattccctcctgggggcttcattcccaaaacggccaccacgcccaaaggcagcagctcctggcagacaagtcggccgccagcccagggcgcctcatggccccctcaggccaagccgccccccaaagcctgcacacagccaaggcctaactatgcctcgaacttcagtgtgatcggggcgcgggaggagcggggggtccgcgcacccagctttgctcaaaagccaaaagtctctgagaacgactttgaagatctgttgtccaatcaaggcttctcctccaggtctgacaagaaagggccaaagaccattgcagagatgaggaagcaggacctggctaaagacacggacccactcaagctgaagctcctggactggattgagggcaaggagcggaacatccgggccctgctgtccacgctgcacacagtgctgtgggacggggagagccgctggacgcccgtgggcatggccgacctggtggctccggagcaagtgaagaagcactatcgccgcgcggtgctggctgtgcaccccgacaaggctgcggggcagccgtacgagcagcacgccaagatgatcttcatggagctgaatgacgcctggtcggagtttgagaaccagggctcccggcccctcttctgaggccgcagtggtggtggctgcgcacacagctccacaggttgggagccgtcgtgggacctgggtccccaccgtgaggaccccgtgggcgacagcaggtgtggccagggtggggctccgagccccgggtcaccgcccgcccagcgttccaggcacatgaagagaaagcattccaaagcctctgattgttgtttcctttttctcctcccgaaggaacagctgattcatgctcctcccgcaattgtcacgtctgtgatttatttggtgtttcgggcgtggcctctggagccccggcacgtggtgggccacgctgctggcgctcatgggccctggtgtttgcaccgcactttgtaatcagtcccgtggttgtctgtacagaattaaactattttccgatgaaaaaaaaaaaaaaaaaaa

SEQ ID NO: 2594 - DNA, 2431 bp, Homo Sapiens
  NM_005265
gaccagaccgggcgtcgggtgagcccagaagtgagagcagttggctgtgccccagtgctgtgtgacccagaggcgccgctcaccctctctgagctggtggacatcatagcgggtgcagcccagaactgtcttctgaggaagaggtgctctcctgggcccccactgtccccaggcctcagcaaggcaagtgaggtgctgccgtcatccaggctggacagttcagtgatttgcctgaggccccacagcagagttcaactggagacagagaaaccagctagaggcagagggaggtaacacggagtcccccagaaaggtctgggctgcgcgtgcttcaggtaacctcccttgaccttcaggagaacgagaaggctgcctgatcagagagtccctgaagaagattctgtggctacaggcttcagcagagtgtgagggagaccccggttatttcctcagctatttccaccaaatcctcctgtctttcgtggccaacaccccaggcaaggcttggggcccccgtctgctgctggacgcagagccatgaagaagaagttagtggtgctgggcctgctggccgtggtcctggtgctggtcattgtcggcctctgtctctggctgccctcagcctccaaggaacctgacaaccatgtgtacaccagggctgccgtggccgcggatgccaagcagtgctcgaagattgggagggatgcactgcgggacggtggctctgcggtggatgcagccattgcagccctgttgtgtgtggggctcatgaatgcccacagcatgggcatcgggggtggcctcttcctcaccatctacaacagcaccacacgaaaagctgaggtcatcaacgcccgcgaggtggcccccaggctggcctttgccaccatgttcaacagctcggagcagtcccagaagggggggctgtcggtggcggtgcctggggagatccgaggctatgagctggcacaccagcggcatgggcggctgccctgggctcgcctcttccagcccagcatccagctggcccgccagggcttccccgtgggcaagggcttggcggcagccctggaaaacaagcggaccgtcatcgagcagcagcctgtcttgtgtgaggtgttctgccgggatagaaaggtgcttcgggagggggagagactgaccctgccgcagctggctgacacctacgagacgctggccatcgagggtgcccaggccttctacaacggcagcctcacggcccagattgtgaaggacatccaggcggccgggggcattgtgacagctgaggacctgaacaactaccgtgctgagctgatcgagcacccgctgaacatcagcctgggagacgtggtgctgtacatgcccagtgcgccgctcagcgggcccgtgctggccctcatcctcaacatcctcaaagggtacaacttctcccgggagagcgtggagagccccgagcagaagggcctgacgtaccaccgcatcgtagaggctttccggtttgcctacgccaagaggaccctgcttggggaccccaagtttgtggatgtgactgaggtggtccgcaacatgacctccgagttcttcgctgcccagctccgggcccagatctctgacgacaccactcacccgatctcctactacaagcccgagttctacacgccggatgacgggggcactgctcacctgtctgtcgtcgcagaggacggcagtgctgtgtccgccaccagcaccatcaacctctactttggctccaaggtccgctccccggtcagcgggatcctgttcaataatgaaatggacgacttcagctctcccagcatcaccaacgagtttggggtacccccctcacctgccaatttcatccagccagggaagcagccgctctcgtccatgtgcccgacgatcatggtgggccaggacggccaggtccggatggtggtgggagctgctgggggcacacagatcaccacggccactgcactggccatcatctacaacctctggttcggctatgacgtgaagcgggccgtggaggagccccggctgcacaaccagcttctgcccaacgtcacgacagtggagagaaacattgaccaggcagtgactgcagccctggagacccggcaccatcacacccagatcgcgtccaccttcatcgctgtggtgcaagccatcgtccgcacggctggtggctgggcagctgcctcggactccaggaaaggcggggagcctgccggctactgagtgctccaggaggacaaggctgacaagcaatccagggacaagatactcaccaggaccaggaaggggactctgggggaccggcttcccctgtgagcagcagagcagcacaataaatgaggccactgtgccaggctccaggtggcctccctggcctgtctccccactcaaaaaaaaaaaaaaaaaa

SEQ ID NO: 2595 - DNA, 3486 bp, Homo Sapiens
  NM_005271
gcgctgccgccagcgaggcccggggaggccgcggcggaggcggaggcccggcgccctgggcggcgccctgtccccgaagtccgtcctccccgttaggtggcgagcgcccgaggggaggggacagccgggcaagcaggaagctgcggcttaaaagggcaacccgcgcgggacccttcctccctagtcgcggggagtctgagaaagcgcgcctgtttcgcgaccatcacgcacctcccctccgcttgtggccatgtaccgctacctgggcgaagcgctgttgctgtcccgggccgggcccgctgccctgggctcggcgtccgccgactcggccgcgttgctgggctgggcccggggacagcccgccgccgccccgcagccggggctggcattggccgcccggcgccactacagcgaggcggtggccgaccgcgaggacgaccccaacttcttcaagatggtggagggcttcttcgatcgcggcgccagcatcgtggaggacaagctggtggaggacctgaggacccgggagagcgaggagcagaagcggaaccgggtgcgcggcatcctgcggatcatcaagccctgcaaccatgtgctgagtctctccttccccatccggcgcgacgacggctcctgggaggtcatcgaaggctaccgggcccagcacagccagcaccgcacgccctgcaagggaggtatccgttacagcactgatgtgagtgtagatgaagtaaaagctttggcttctctgatgacatacaagtgtgcagtggttgatgtgccgtttgggggtgctaaagctggtgttaagatcaatcccaagaactatactgataatgaattggaaaagatcacaaggaggttcaccatggagctagcaaaaaagggctttattggtcctggcattgatgtgcctgctccagacatgagcacaggtgagcgggagatgtcctggatcgctgatacctatgccagcaccatagggcactatgatattaatgcacacgcctgtgttactggtaaacccatcagccaagggggaatccatggacgcatctctgctactggccgtggtgtcttccatgggattgaaaatttcatcaatgaagcttcttacatgagcattttaggaatgacaccagggtttggagataaaacatttgttgttcagggatttggtaatgtgggcctacactctatgagatatttacatcgttttggtgctaaatgtattgctgttggtgagtctgatgggagtatatggaatccagatggtattgacccaaaggaactggaagacttcaaattgcaacatgggtccattctgggcttccccaaggcaaagccctatgaaggaagcatcttggaggccgactgtgacatactgatcccagctgccagtgagaagcagttgaccaaatccaacgcacccagagtcaaagccaagatcattgctgaaggtgccaatgggccaacaactccagaagctgacaagatcttcctggagagaaacattatggttattccagatctctacttgaatgctggaggagtgacagtatcttactttgagtggctgaagaatctaaatcatgtcagctatggccgtttgaccttcaaatatgaaagggattctaactaccacttgctcatgtctgttcaagagagtttagaaagaaaatttggaaagcatggtggaactattcccattgtacccacggcagagttccaagacaggatatcgggtgcatctgagaaagacatcgtgcactctggcttggcatacacaatggagcgttctgccaggcaaattatgcgcacagccatgaagtataacctgggattggacctgagaacagctgcctatgttaatgccattgagaaagtcttcaaagtgtacaatgaagctggtgtgaccttcacatagatggatcatggctgacttcctcactatcctcttcacatgtaacttctgcagacctatcacaagtttacatgtaaccacagaaatccctttctctcctgactcattaataatggataccattctcaacaagtcaatccaagtcagcccgttaaggagaaagaaattaaggttagcggatcatgtacaagctgagtgtgaaagtagaaatcacctacaccagagagccattttggtattttgcctttaaataaaaagcctcctttatctggctgtgcagccttgctctgtggcttttcccaacacaatcagtgctagtgctggggaggaacagtcaagagcagtcagttgcttgcttattttttctggatgagtctgggacacactgtaactttaacacatttaagaagtaggtgtgtggccttttcagaaggtggcatggtcctcaagtgagttcttagtattttatatcagcaaaataattcaattttgcaggttgcaaacaaatataaaacctgtttctgtttatgaatattattcttttagaatagaataagtacatgctgctgtaataaaattgcctttaatcacttaacaagcctaaccttgactcaaacagtgaatgcctatagaaataataaatgaaaaaaactagtatttttatatcataaaacaatgtcatttatagcttatcattcatgtattgtccagcagacattaaaagccctgtggataattaagttatcttcatacctgcaaaatggtggaggctattttcattaaaactgtcagaatttgcttactataattatgatacagtccaaagaatgcagtcactttttatcatgttaactaattgttctcttttgaagatctatggttgactaattaaacaataattcaagtagagtgtcccagaaaaaaaccacttgggctccctgtttggagtctggctggctctgagcattgccaatggcccctactcacctgactttgtatcctctccttttagaggctttgcattctgcacccagcttcactaacagtgggctgaaaacatccttgggttgagtgtttcatttgggagttatttggccagggccttttgaacagtagtgtccccatgaagtgctagataatatatgtgtaagagtcagctttttttttttttttaactctaacacccttcagaaatttctaactactttgtaactgcatggcttaacctggtgataaaagcagttattaaaagtctacgttttccaaaacttacgtttcttttctgtgtttttacatgtggtagtttctcttttcataagttataatactgcaattggatttctgaaatgtttatagcgaccacctgtataacatttccttccactttattgtgagctgcccagattttattcttgaattgttttttttttttttgttcggtgctttacacgttcagagaaacttcccgagtaacgaactatagaaatgatccctgaaagcatagtctttattctcgaattattttgtattttattaaataatatgaacagctaaaaaaaaaa

SEQ ID NO: 2596 - DNA, 1681 bp, Homo Sapiens
  NM_005273
actggcgggcgggatccctccgctctggggaggcagcgctggcggcggggctggggccactgaggaaatccatccgcgccgccgccgccgccgccgccgccgccgccgccgcctccgccgcggaggaagacagcgccgcccgcgcaccgccagcgacctccgccgcagagtcccaccgccacaggcctcgggccagcggccaggagctgcctcccccagcccccgtcccgcggcccccagccgcccccaaccctgccccacgggcccggcgccatgagtgagctggagcaactgagacaggaggccgagcagctccggaaccagatccgggatgcccgaaaagcatgtggggactcaacactgacccagatcacagctgggctggacccagtggggagaatccagatgaggacccggaggaccctccgtgggcacctggcaaagatctatgccatgcactgggggaccgactcaaggctgctggtcagcgcctcccaggatgggaagctcatcatctgggacagctacaccaccaacaaggtccacgccatcccgctgcgctcctcctgggtaatgacctgtgcctacgcgccctcagggaactttgtggcctgtggggggttggacaacatctgctccatctacagcctcaagacccgcgagggcaacgtcagggtcagccgggagctgcctggccacactgggtacctgtcgtgttgccgcttcctggatgacaaccaaatcatcaccagctctggggataccacctgtgccctgtgggacattgagacaggccagcagacagtgggttttgctggacacagtggggatgtgatgtccctgtccctggcccccgatggccgcacgtttgtgtcaggcgcctgtgatgcctctatcaagctgtgggacgtgcgggattccatgtgccgacagaccttcatcggccatgaatccgacatcaatgcagtggctttcttccccaacggctacgccttcaccaccggctctgacgacgccacgtgccgcctcttcgacctgcgggccgatcaggagctcctcatgtactcccatgacaacatcatctgtggcatcacctctgttgccttctcgcgcagcggacggctgctgctcgctggctacgacgacttcaactgcaacatctgggatgccatgaagggcgaccgtgcaggagtcctcgctggccacgacaaccgcgtgagctgcctcggggtcaccgacgatggcatggctgtggccacgggctcctgggactccttcctcaagatctggaactaatggccccacccccactgggcccaggccaggaggggccctgcccatgcccacactacaggccagggctgcggggctggcgcaatcccagcccccttccccgggccacggggccttgggtccctgccctcccacccaggtttggttcctcccggggcccccactgtggagataagaaggggatggaatgggggaagaggaggagcaggaggccctcatccttctgctgccctggggttggggcctcacccctctggagggccggaggcaggaggtggaaaccccaggggctggcttttttaaaactggttttattttaatttttattatattttcagtttttccataaaggagccaattccaactctgtaaaaaaaaaaaaaaaaaa

SEQ ID NO: 2597 - DNA, 823 bp, Homo Sapiens
  NM_005274
cacttccctcaacccttcccacaaactgggaggaaaactgagacctcctggtcacccgccgccgggccttttagaaactcccacaagctctgccttccctccctggtcctcttcagaccccctcttagttcttcgcggctaacggctcgcgctcggggccgggtgtggagctggaacagagggctggcaaggcgcgcatgcgcaccgagggtggagccgctgagcacagaaccggaaacttagagacaaagttcggagccccgcccccgccgcgcgccgctgagttgtctggccccgccgacccacggcccacgacccaccgacccacgaatcggcccggccgtcgcgtgcaccatgtctggctcctccagcgtcgccgctatgaagaaagtggttcaacagctccggctggaggccggactcaaccgcgtaaaagtttcccaggcagctgcagacttgaaacagttctgtctgcagaatgctcaacatgaccctctgctgactggagtatcttcaagtacaaatcccttcagaccccagaaagtctgttcctttttgtagtaaaatgaatctttcaaaggtttcccaaaccactccttatgatccagtgaatattcaagagagctacatttgaagcctgtacaaaagcttatccctgtaacacatgtgccataatatacaaacttctactttcgtcagtccttaacatctacctctctgaattttcatgaatttctatttcacaagggtaattgttttatatacactggcagcagcatacaataaaacttagtatgaaacttttaaaaaaaaaaaaaaaaaa

SEQ ID NO: 2598 - DNA, 7925 bp, Homo Sapiens
  NM_005275
tgggagagccccacttccatccctccccagcgcgtgcgcccttcctccttccgttacagccccctccttcgcaccttattagcccctagccccttgcccggacgggcttgacaggcatgtgcacatccctcccagacccctcaccgatgggactcccatcctcctcatctccagtctcttcccgctcgggcagcgggggctgctgctgtgtcggtggctggtgatgattctgcttctttcgtttcggcatcgtgtctgcggcaatggctgcagcgggatttggagggtagtgaggaaggggcacgcggggattctgtttccgcttccggggggtcggtgggcagcaatgctgaggctcccgccattccacttccggaaggttgcggagaacatctgcggcggccgcattccggagccaactgcctccctccgtctctgccaggcatggcggcaacctcacaccttccctttgctgcgtttctataaatgctttgaaaaaattactcttttcttccctcgctggaaaacaccacaaccagctcctcagagtgtgtcacagagtcaacaggctctcgggccagagggcctgagaagaggactgtcgcaccgtaagatcgccacatccggtcctcggttactatggtaacagctgcaggcacaacttcgtgccctttgacctccccccaaaagtccttgtcccgcttgggtttcccttctcgcccgcttttgcacttatgatctgtaaacctgctccttatcatcgttcccacaaggaatttgggtcccaacaggtcggcacccaggactctcagaccgccgccctcccctaaagacctctgaccgtgcccccggtgtagtccagcaacctggacgcagtctcggctttccactaaggtcaagcccggggctttgtagtatagcctcagcgtgtccacgccccctctcccctaggtagtaggccccgccctccgctccgccgccccctccaggtgagtggtaggttctcccgggagcgcaaggtagtgatgacacgcgccccccctcctccgaacgcgagttggtagcgtccgtgacggagttagcctggtcctcccacgcgcgcctccttcctcgccgccggggcgccctctcggtgccactggctctcacgtgccagtagcccaccccgcatcatcctctcgcctcgctcctggagggaagtgactatatctcccccgtccgccttccatcgccgccgcggcggtaattctgtcgggcccgcccgctgacgtcacctgctagccccgcctcctctagggtcccgggcccctgcggcgggggctgccccggggggcagtcagttgaggcggcgggagctcggcggagggcgggccaggtgactggtccgggccatgccgaggaagaagccattcagcgtgaagcagaagaagaagcagttgcaggacaaacgggagcggaagagagggcttcaagatgggctgcgctccagttccaacagccgcagcgggagccgggagcggcgagaggaacagaccgacacctcggacggggagtctgtgacccatcatatccgcaggcttaaccagcagccttctcaggggctgggtccacgaggctacgacccaaatcgataccgactgcattttgagagagacagcagggaggaggtagagaggagaaagagagcagcccgggagcaagttctacagccggtcagtgctgagttgttggagctggacatccgggaggtgtatcagcctggctcagttctggactttcctcgacgtcctccttggagctatgagatgtccaaggagcaactaatgagccaagaggaacggagcttccaagactatcttgggaagattcatggggcttactcctctgagaaactcagctactttgagcacaatctggagacatggaggcagctgtggcgggtgttagagatgtctgacatcgtcctgcttatcactgatatccgacatccagttgtgaatttcccgccagcactttatgagtatgtgactggagaacttggactggccctggtgctggttttgaacaaggtggatctggccccgccagctcttgtggttgcctggaagcattatttccatcaacactatccccagctccacgtcgtccttttcacctcttttcctcgggacccccgcaccccacaggaccctagtagtgtcttgaagaagagtcggaggcgggggagaggatggactcgggccctggggccagagcagttgctgagagcctgtgaagccatcactgtggggaaagtggacttgagcagctggcgggagaagattgctcgggatgtggctggggccacctggggtaatggctctggggaggaggaggaagaggaggatggcccagcagtcctggtggagcagcagactgattcagcaatggagccaactggcccaacccaagagcgctacaaggatggggtggtgaccatcggctgtgtgggtttccctaatgtgggaaagtcctcgctgatcaatgggctggtggggcggaaagtcgtgagtgtctccagaaccccgggccatacccgatactttcagacctactttcttaccccctctgtgaagctctgtgactgcccaggcctcatcttcccatctcttctgcctaggcagttgcaggttctggcagggatctaccctatcgcccagatccaggagccctacactgctgtgggctacctggcctcccgaattcccgtgcaggccctgctccacctgcgccacccagaggctgaggacccctcagcggaacacccctggtgtgcctgggacatctgtgaagcctgggcagagaaacgtggttacaagacagccaaggcggctcggaatgatgtgtacagagcagccaacagtctcttgcggctggcagtggacggccgcctcagcctgtgttttcatcccccaggctacagtgaacagaaaggcacctgggagtcccatccagagaccacggagctggtggttttgcagggcagggtggggccagcaggtgacgaggaggaggaggaagaggaagagctgagcagctcctgtgaggaggagggagaggaggaccgggatgcggatgaggagggagaaggggatgaggagaccccaacctcggctccagggtccagcctggctggccgaaacccttatgccctgctgggtgaggatgagtgctgagttcctcgcccagcgccatcttccctcccagtatctttgcttttggactgacctgggggtatctcccctctgccaccccaattgtgaataaagattgtttgctttgtagccccttccccagatgaactgaggtgagagcggctgttccaggctaacagctgtgggaggcttctctcctcttctcccttcttttttcatgcattctctttgcaagggaaagttctcttaggagtttagtaggttctcagtctctgaaacctgcttcctctacccattctcccactctgcaccttaggaatcccgttatctacatggggaggggaggtctaaatccagctcccttttggagtttgtgccattctccgatttgagcagcagccctgtgtgccccctgccgccagacctgctcattccaggagcttctgggagaaggaacagtaagagaggaactgtgtcccaagctgatgtctcttaatgagatttttacaggaattgttcaaattcagcaaatatttattgagggtctattgtgtgtcttgacctgtgctgagcaccaagcatataaggatgtaccaccagagcctgacctaaatttgaagcctggccatgatcaaaaccccaccttcaggcacccaagtttttggattaagaagggtgaatgatgttctccaaatcctgggggctcatgcagtataattctaggacttcatgttgatacaaatttttagttaaggcaaaacgcttgtgaaaatgttgattaaatgtgtacgagtagttttaattactggtgaacaactagcgtgcacatttatgatttgagcagaacagccctttaagtacagtgttaagtttcattgtttaaaagcttggcagctacgagtatttgaggtacataggggcgggcacagaaccagcctcctgaattccatttactctggtttgggggtggaacaaagatgatccagtgcagggtctgagctagaacctagcaggtggccagaaccattttagggtttcacctcagcatttcggcagaaatcagctctctcgtgagtcagggcaccttaggctttgctgtatatccctttgttaagccagcagctagactcctagattgaattcttttagaaatgggagaatgagcttttttattgactgccagtgttgtctgtattggatgatagcaaaaagtgtagttggacaggttgcccactagatggagtgagaagtaccagactccttttttctctaaagcagatcctttcaggatctgagtcactgggcagtttctctaatgcgagcagacagaccctgttaaccaaggagcaaaggaaagtatatttaaagaggctaaggtgtttggccacatattgctttaggttcatctccattggtctcagtgtggacataactcctggaattcactccagtgcaaagtttaaataataccagcatgagaatgtacttgaaggtttcccaaaatgtgctagacaagaaagagaaaaggtcccagctgagagaaaaatccacctgtctcccatctggggctctttggcctcactgatagaaaaggaaaaggggcccaagctaagcttactttgagggttcatgatgttcagagatgctcaggggacttctccgctgcaggaggtggggtgaggacattggattcatttcctcaaaatatggagagaaaggagaaaaatcagaattctatttgtacctctgcttcctgtgctgtttatctttgcttgtctttatctttttccacctcaggggtttcatcaggggtatttgggagagtctaggggtggggatgaagaattgactgggagctgaggaggggggatttttatgctgaagacctggcaggaggcaactcctgacacccccacagggttagactgtaaaacctcttccatgacttgctgactctataggataatagcaacaggaaaagaactgagggacgtgcagatgaggatgaatagggccccaacaccagtgcctgaggctgaggttagaactgactacaaagacacaggaaaccaagggcccagtctcccctccacgctgaaatacgcaccctcttgtctgggtcatgtctactatgtgaatacttgaccatggaggtctggggctctggtggcttccatagctggctagtctcttgatggagagaaatcagggcttctctcatccatgctggaatttcatttagatgtcaacttccaagtttccctttttccagatgggattatagtcctgcttctggaacagggtagctgtgtgtggtccaggatagttcaattatctggccctttgttcacttcttacaatcattgatacagtcaacaaaaattggttaaaaacaatatatgccagacatatatccctgagttctgggacaataaccaaaattgaataaggcaatatcctactctcaagcaatagagggtaggaatagaataataataatataatacaatagctctatagcagtatgtaaactataaaagcattattttacgtgtttctattgaactgtcataactaaataagatggttagtactataattatcccaaggattcattcactcatagaacatttgttgagcaattactacctgccagtcacttccaagtggtaagtgagatagaaatggttctttgtggcgctcacaatttattggagaatggaaacacaattacaaaaaaaaagtgtgataagttctgggagaagggtggtacaggatcctgtggggtagtggtggctccatataggagggacattgggatactgatcaggaaggagtgggggacagggctagaagctgcattagtataaagttatgtcagactgccaaaacaaaacaaacacaaaaaatcagtagtctgtggtaaagaattgctataggaacagccagtaggggcagttaagctggtcttggtgaatcaggggaagcgtcctagaggaacagatgtccatgctgaggccaaatgctggacaggagttagccagacagggaaattgcattctgggcagaggagacagcaaaggtcaagaaacatgacaactttggaagactgtaacttgttcagaggcagagggtgcaaaggagaaatgaggaaaggtgaagctggagaggtgggcttggtccagctcttgctgggccttttcagccgtgttaaagatttagactgtatccagagggatgttgaactttaagcctaagactgaaaaggtgagaattgtgccttagatcactatggttgcagtgtggagactggtttggaaaggggagaaatcagaggcttttacagccatcccagggagagagaatgaacaccagaattagggtaatggaagatggaaagaagagaaatcgttttatgggttgctcaggagatagaattgacatgtcttgggattgttttgctgtgtaggggagagagacaagtcaagagtatacatcctgtttctgacttggcaactgggtgggtcatgggtctgtttcctgagacagttgtctacagccataccaccgtaagcgccctaaatctcatcagagacagtttatgcaaatggagcttggggaaagagaggtcgtggctggagacagagatttgggcatcatcaacatataggtgtggggagcagagaaggctgaggaagaaagcaggaaacatataaaaaggagagcagggaaaggagccagtgagacaggaaaaacctagtaacgtggtgtgatgaagctaggggaggaaggaaggaaggaagggcggcgtggaacgctgctgatgggtggtggcggggaaaatgaacgagtatccaccagcaacgagaggggcctccatggtcttggtgggagcatttctttggagaggtggaatcagaagccccagatgtcagagggttaaggaataatttggaggaaaagcgtaaaggcagtggaggtgaggagagaattttcaaaatgtttggcagtgattgcaatgaaagaaaaaaatggagggagcagagtatatgcagttgaggaacttttttagtttggagtgtgttaacacgatgttaggaagaaggatcaagtgaaggagaaaggtgaaaatgctggaaggtggggcttagtgatgaaacaaaccttggggacaggtgggcgtggtactgagagtcccagtgaggggagtgccctcaggcaggcgccggtggcttctgtcacaggagggaacagcgctgacattcagctggttcgcactgatacggctcaaccagtttgttaaaacatgtctgttccagtgtcagtaatatacgagtaactgcaatatgcagtaaaaattataaattctaatacaaactcagttcaagctaattaagagatcgcaacagccgttggtaaatggacttcccgctgcatttgagaagctttgcagcgccatctgccggtgtcgtagcatcactgcaggctgagaggctgctttgcgccttcatcttgaagcactctgaaattgcctgtttaaattaccttggaatcatggagttgctactgcttctgaatagtttagcttctactttgattttattgttagtgcattgtcgttcttgtgtcagtagcaagtttcagtgttttaatatttacaaatacaaaaatttttaataaaatattaaagccaaacttgaatgaagagacaacaaaaaaaaaaaaaaaaaa

SEQ ID NO: 2599 - DNA, 1709 bp, Homo Sapiens
  NM_005304
gcactaggtctggagagacagcaaggtgctgtgcggcagagcatttggggtctcaaagaagcagtggccaccaccatggatacaggccccgaccagtcctacttctccggcaatcactggttcgtcttctcggtgtaccttctcactttcctggtggggctccccctcaacctgctggccctggtggtcttcgtgggcaagctgcagcgccgcccggtggccgtggacgtgctcctgctcaacctgaccgcctcggacctgctcctgctgctgttcctgcctttccgcatggtggaggcagccaatggcatgcactggcccctgcccttcatcctctgcccactctctggattcatcttcttcaccaccatctatctcaccgccctcttcctggcagctgtgagcattgaacgcttcctgagtgtggcccacccactgtggtacaagacccggccgaggctggggcaggcaggtctggtgagtgtggcctgctggctgttggcctctgctcactgcagcgtggtctacgtcatagaattctcaggggacatctcccacagccagggcaccaatgggacctgctacctggagttccggaaggaccagctagccatcctcctgcccgtgcggctggagatggctgtggtcctctttgtggtcccgctgatcatcaccagctactgctacagccgcctggtgtggatcctcggcagagggggcagccaccgccggcagaggagggtggcggggctgttggcggccacgctgctcaacttccttgtctgctttgggccctacaacgtgtcccatgtcgtgggctatatctgcggtgaaagcccggcgtggaggatctacgtgacgcttctcagcaccctgaactcctgtgtcgacccctttgtctactacttctcctcctccgggttccaagccgactttcatgagctgctgaggaggttgtgtgggctctggggccagtggcagcaggagagcagcatggagctgaaggagcagaagggaggggaggagcagagagcggaccgaccagctgaaagaaagaccagtgaacactcacagggctgtggaactggtggccaggtggcctgtgctgaaagctaggtcctccgggggaggagggtgtagctggcatgtcatcctcagggcgcttcctcgctcacgccaggagggacttggagtggcgagctggggcccgatggggcttgggggcagagtagacatctagcctccctaagggtatgcgcgctaaagcccagctctcgatctcacctccatccccatccacccacacactatggattgggctctgggaaggggtcagggtgagaggctgctctggagaacaatgaggtcctcatagcagcaggcagctcctgtgttttcttgagggtggcagaggagctaagagcagtgcccagggtctgagggggctgcccagtgagtggcaggggcaggagaggggagaaccccatcctcagagctgctcccagccagcgagtcaggagcgggggagacagggctccagggatgaggccgcattctgctcccacagcgccttttccagaaagttcccattgctcaataaatgtggatcatcagagacatttatgaacaatgacagaagaaaaattacccaaataaatgtggaagcaagcaaaaaaaaaaaaaaaaaaaaaaaaaaaaaaaaaaaaaaa

SEQ ID NO: 2600 - DNA, 1041 bp, Homo Sapiens
  NM_005305
atggatacaggccccgaccagtcctacttctccggcaatcactggttcgtcttctcggtgtaccttctcactttcctggtggggctccccctcaacctgctggccctggtggtcttcgtgggcaagctgcggtgccgcccggtggccgtggacgtgctcctgctcaacctgaccgcctcggacctgctcctgctgctgttcctgcctttccgcatggtggaggcagccaatggcatgcactggcccctgcccttcatcctctgcccactctctggattcatcttcttcaccaccatctatctcaccgccctcttcctggcagctgtgagcattgaacgcttcctgagtgtggcccacccactgtggtacaagacccggccgaggctggggcaggcaggtctggtgagtgtggcctgctggctgttggcctctgctcactgcagcgtggtctacgtcatagaattctcaggggacatctcccacagccagggcaccaatgggacctgctacctggagttctggaaggaccagctagccatcctcctgcccgtgcggctggagatggctgtggtcctctttgtggtcccgctgatcatcaccagctactgctacagccgcctggtgtggatcctcggcagagggggcagccaccgccggcagaggagggtggcggggctggtggcggccacgctgctcaacttccttgtctgctttgggccctacaacgtgtcccatgtcgtgggctatatctgcggtgaaagcccggtgtggaggatctacgtgacgcttctcagcaccctgaactcctgtgtcgacccctttgtctactacttctcctcctccgggttccaagccgactttcatgagctgctgaggaggttgtgtgggctctggggccagtggcagcaggagagcagcatggagctgaaggagcagaagggaggggaggagcagagagcggaccgaccagctgaaagaaagaccagtgaacactcacagggctgtggaactggtggccaggtggcctgtgctgaaaactag

SEQ ID NO: 2601 - DNA, 4713 bp, Homo Sapiens
  NM_005311
aaatgtaatttgaagaaggcagaaggaacccatggctttagccggctgcccagattcctttttgcaccatccgtactaccaggacaaggtggagcagacacctcgcagtcaacaagacccggcaggaccaggactccccgcacagtctgaccgacttgcgaatcaccaggaggatgatgtggacctggaagccctggtgaacgatatgaatgcatccctggagagcctgtactcggcctgcagcatgcagtcagacacggtgcccctcctgcagaatggccagcatgcccgcagccagcctcgggcttcaggccctcctcggtccatccagccacaggtgtccccgaggcagagggtgcagcgctcccagcctgtgcacatcctcgctgtcaggcgccttcaggaggaagaccagcagtttagaacctcatctctgccggccatccccaatccttttcctgaactctgtggccctgggagcccccctgtgctcacgccgggttctttacctccgagccaggccgccgcaaagcaggatgttaaagtctttagtgaagatgggacaagcaaagtggtggagattctagcagacatgacagccagagacctgtgccaattgctggtttacaaaagtcactgtgtggatgacaacagctggacactagtggagcaccacccgcacctaggattagagaggtgcttggaagaccatgagctggtggtccaggtggagagtaccatggccagtgagagtaaatttctattcaggaagaattacgcaaaatacgagttctttaaaaatcccatgaatttcttcccagaacagatggttacttggtgccagcagtcaaatggcagtcaaacccagcttttgcagaattttctgaactccagtagttgtcctgaaattcaagggtttttgcatgtgaaagagctgggaaagaaatcatggaaaaagctgtatgtgtgtttgcggagatctggcctttattgctccaccaagggaacttcaaaggaacccagacacctgcagctgctggccgacctggaggacagcaacatcttctccctgatcgctggcaggaagcagtacaacgcccctacagaccacgggctctgcataaagccaaacaaagtcaggaatgaaactaaagagctgaggttgctctgtgcagaggacgagcaaaccaggacgtgctggatgacagcgttcagactcctcaagtatggaatgctcctttaccagaattaccgaatccctcagcagaggaaggccttgctgtccccgttctcgacgccagtgcgcagtgtctccgagaactccctcgtggcaatggatttttctgggcaaacaggacgcgtgatagagaatccggcggaggcccagagcgcagccctggaggagggccacgcctggaggaagcgaagcacacggatgaacatcctaggtagccaaagtcccctccacccttctaccctaagtacagtgattcacaggacacagcactggtttcacgggaggatctccagggaggaatcccacaggatcattaaacagcaagggctcgtggatgggctttttctcctccgtgacagccagagtaatccaaaggcatttgtactcacactgtgtcatcaccagaaaattaaaaatttccagatcttaccttgcgaggacgacgggcagacgttcttcagcctagatgacgggaacaccaaattctctgacctgatccagctggttgacttttaccagctgaacaaaggagtcctgccttgcaaactcaagcaccactgcatccgagtggccttatgaccgcagatgtcctctcggctgaagactggaggaagtgaacactggagtgaagaagcggtctgtgcgttggtgaagaacacacatcgattctgcacctggggacccagagcgagatgggtttgttcggtgccagccgaccaagattgactagtttgttggacttaaacgacgatttgctgctgtgaacccagcagggtcgcctccctctgcgtcggccaaattggggagggcatggaagatccagcggaaagttgaaaataaactggaatgatcatcttggcttgggccgcttaggaacaagaaccggagagaagtgattggaaatgaactcttgccctggaataatcttgacaattaaaactgatatgtttactttttttgtattgatcacttttttgcactccttctttgttttcaatattgtattcagcctattgtaggagggggatgtggcgtttcaactcatataatacagaaagagttttgaatgggcagatttcaaactgaatatgggtccccaaatgttcccagagggtcctccacaccctctgccgactaccacggtgtggattcagctcccaaatgacaaacccagcccttcccagtatacttgaaaagctttcttgttaaaataaaaggtgtcactgtggtaggcatttggcatattttgtggactcagtcaagcaaccacagtctgttaatcatttctctatgctcagatgtcagatcctcttgttattagtgtgtcttgttctgcacagtgcaggagactttattcctttggaaaattcactgttccacaaacagcaggctgaatggcctcgcctctagattgacgtgggccagcctccttgagacacacctggcacccgtcatcggccagcggtggatgctgcataatccacctgggtacttcagccttgcgtttccacagccttcagcctgttctagaacgatcactgccttacccctgctgctgcagtggtgtgagtcgtttcacggctgatgtccctcgggggattaaaggatctaaagagaaaatggcacctggttgtcttcgtgctgtgtctcatgggtttccatagtgataaagacaaggaaacgctgcaggggccacaggcacaggctgatatttaaagatctttgcttgcagccctccgtcctgctgaaaacccccataagccagtgaacacagagcagctagaggctcctcctctgctggcttagggtcagaagtacctcacagtggttgtggacatggaagagttttgtcaacacaacactttgtccccgctccgggagatgagtcagatggtggcttgagttgtcacttggtcccctccgcccctcgggtggccccctttgccacgtccccttagcttagtgatcaggtgtgagagtggccatttccttacctttgatccctgtaaagcagaaaggactcctttgacaggcgacaaactactgtggtgagcagaatgatttcctttttcaagacaacacctgcctggcttctattaatgtgtgctggccatgatattgccccaaatccgccccactgaagtgttccctaaggaacagcatttctctgctcctcagtcaacccccgtagcctagagcagtgtcacaagcttcagtaaggccagtcagctggaagtcagtctaccgtatagtaacactgtatttcagtctacagaccacactctagttgttttccatgaaaggtatacaaatgaagaattttctagcaaaacatgtttttaaccatcagtgctcaattgcattttcttcctttcgcagccagtcagtctttcaaactattgacagtaagataattctcacgttcacacctggtggcaggcttcactgtagggacggacattgcagttacaccacgattccttcctcttcactggctcgaggtaaacccttttcaaggaaaaacaactctaggatttcttttttctgtgtacgtagaccagtcccatcagtgtataatctctctctcacacgcctctctccaatagacagcttgtatttgcagtatttcatatttataaatatgcgtttatttaaaaggagaacaaaagcttgactctgattcacagttttgtatgtagctggtttgacgtagtcttttgtattttccctgccgaagtgaattgttggagaatgtaaaccgcctccacgtggcggcagacttcctaaggccccagctcgctggcctcgcgctgggcggctgggaattccacctgagaacaagtcccgcaaaccggggacggaaggacatttgacttttatttttgtatttaattgacatgaatgtaaaggggacagctcagggttgttttggagcctgttgactttgtatctctgcctgtgattttcttttctaaatgaaactccatgtagcaaccaggacgaagttgagaaggaaaacgccaaatgctttggttattagagtttaataggtaagctctgttacactaggtgttagagttccagaatgttcttttgtttgctaaaccttgaagaaacatgtgcctcagcctagatgttttgtcttctcttttctgcacttaatacctgacagtatgaccgatctctgcgcctttctgggggcgggcaagctggcggtagatttgtgatgtcacagtgcaaactgcagtgactgtaaattggcctggcgtgtataaacgttttcagggaatgcagaaggtattaatgaagagacaaaacctttattccatgtgctttgcttcattctgtacatagctctttggctcgtgaacctaattgtaaactttcaggtatttttgtacaaataagggactgatgttctgtttcttgtaattagaaataaacattaatacagtgttcttcattttcaaaaaaaa

SEQ ID NO: 2602 - DNA, 3308 bp, Homo Sapiens
  NM_005316
ctccttccgcgtggtccctccccctcaggccgcggtcgcgattacgctctctacggcctgcgaccgcagggccgttgcgggctggagacacggcgccgactggaaccggaggagctctaggccaaatggttgggccagccaggatcccaggacccttcgccgctcgagaccggagagaggaaacgaaacaggcgggaacccgtgggggagggagggaactagcggaaggtgtcatggcggccgcgctcttgagtcacgtgcccagggcccgccttgctacttccggtcacgtgccctcagactcctcgcagccagcgatggaggcgagaccccctagtaacagaggcggtggctactgctgcggccactgggtttcggcctcttcccagcagcggctctaagaagcgcagcggaactcgaccggatccaacccagttagttacttcctgtctagagttgtagcttccacctgcaccttctagccaccatggcaacctcatctgaagaagttttgctgattgtaaagaaagtgcgtcaaaagaagcaggatggagctctgtacctcatggcagaaagaattgcttgggcacctgaaggcaaagatagatttacaatcagccatatgtatgcagatattaaatgccagaaaattagtccagaaggaaaagctaaaattcagcttcagctggtcctacatgcaggggacacaactaacttccatttttccaatgaaagcacagcagtgaaagagcgagatgcagtaaaagaccttcttcagcagctgctgcccaaattcaagaggaaagcaaataaagaactggaagagaagaacagaatgctgcaagaagatcctgttttgtttcagctttataaagaccttgttgtgagtcaagtgatcagtgctgaggaattctgggccaatcgtttaaatgtgaatgcaacagatagttcttccacatccaatcataagcaggatgttggcatttctgctgcatttctggctgatgtccggccccaaactgatggctgtaacggtctaagatataatttaacttctgatatcattgagtccatatttaggacctatccagcagtaaaaatgaaatatgcagaaaatgttccccacaacatgacagagaaggaattctggacacgttttttccagtcccattattttcacagggatcggctgaatacagggtcaaaggatctctttgcagaatgtgccaaaatagatgaaaaaggcctaaaaacaatggtttcattaggagtgaaaaacccactactagatttaacagctttggaagataaaccattagatgagggctatggcatttcctctgtgccatctgcttccaattctaaatccataaaagagaatagtaatgctgccatcatcaagagatttaaccatcacagtgccatggtcctggcagctggactcagaaaacaagaagcacaaaatgaacaaactagtgagcccagcaacatggatggaaattccggagatgcagactgctttcagccagcagtcaaaagggcgaaattacaagagtccattgaatatgaagacttggggaaaaataattctgtaaaaacgattgcactaaacctcaagaagtcagataggtattatcatggtccaactccaatccagtcactacagtatgcaacaagtcaggacattattaattcttttcaaagtattagacaagaaatggaagcttatacacccaagttaactcaggttctctcaagtagtgctgccagtagtaccatcacagcactgtcacctggaggggcacttatgcagggaggaacacagcaagccataaaccagatggtgccaaatgatattcaatctgaattgaaacacttatatgtagctgttggagaacttctacgacatttctggtcctgctttcctgttaatacgccattcctagaagaaaaggtagtgaaaatgaaaagtaatttggaacgattccaagttacgaagctctgtccattccaagaaaagattcggagacagtatttaagcacaaatttggtaagtcacatagaagagatgctccagacagcctacaacaagctccacacatggcagtcacggcgtctgatgaagaaaacgtgaggtggccatgatgcttacaggttttgtgagattgagagaactatgacctgcagcaactctggaaacctggcctgacagacaagcagatgacctcacaggagtgataagaaacatctgctccacgccaactcccagagctgatgctattgtacttgcacattggagactgaaaggaaagaagggactaaatgctggggaggtaaattaagacagaaccaaatgagctaagttgcaaatatatatatatacacacacacacatatatgtacatgtgtatgtacatatatattttaaaagactgtttactgcagttgctcaggaactgcttttgattcacattaagctgctttcagaaattaaaaaaacactttttaaagggtgcattgataaaatctgaggttttttggttgtcgtttttttctgtgtacatttttttcctaagtttatggcacagggtagaccttaagtattcctcctccatccttcattcttcaccctccattggatcctcaagttttaatgaattccaattataccttacatcagcaagttaaaaaaagtactttaaaataaagcaaagggagactgttgctcaaccatcaggaaacagttgtcagaagacatcattggttctgtgtttcctacggaaataagaaacgataaatattgcactgaatgtttgtggtttggagtccctgaataataaagagggaatatatttgcagaaagtcgcatagggttttttaatgcagaattttgtcagaagacaatggcgctgcatgtttttctttgagtgcaaatgtacattgctaagatttttttaagatggcatgtgctttgaaaagaagatattgcatttttaagagtttaaaaatcttatgagtgagaaatattaaaaaaatcttattttcacctctttagaagaaataaaagatgtttctcctatctccttttctctagtatttgactgttactgtccttggcgaatcgataatcattgcatagtgactgaaaagcctaagtgcaaaaaaaaaaaaaaaagatgttcttgtttctgaacttcgtgccatattttgttcctgatgggatcaacttaatgtttaagactttagatgtcttgtattaaaaattacacaaaaaaagtaaaactttttatacttacccttttaactct

SEQ ID NO: 2603 - DNA, 947 bp, Homo Sapiens
  NM_005317
ggctcggggccggggccagcacccacactgggtctccacagcggcatggaggcctgcgtgtcttcactgctggtgctggccctgggggccctgtcagtaggcagctcctttgggacccagatcatcgggggccgggaggtgatcccccactcgcgcccgtacatggcctcactgcagagaaatggctcccacctgtgcgggggtgtcctggtgcacccaaagtgggtgctgacggctgcccactgcctggcccagcggatggcccagctgaggctggtgctggggctccacaccctggacagccccggtctcaccttccacatcaaggcagccatccagcaccctcgctacaagcccgtccctgccctggagaacgacctcgcgctgcttcagctggacgggaaagtgaagcccagccggaccatccggccgttggccctgcccagtaagcgccaggtggtggcagcagggactcggtgcagcatggccggctgggggctgacccaccagggcgggcgcctgtcccgggtgctgcgggagctggacctccaagtgctggacacccgcatgtgtaacaacagccgcttctggaacggcagcctctcccccagcatggtctgcctggcggccgactccaaggaccaggctccctgcaagggtgactcgggcgggcccctggtgtgtggcaaaggccgggtgttggccggagtcctgtccttcagctccagggtctgcactgacatcttcaagcctcccgtggccaccgctgtggcgccttacgtgtcctggatcaggaaggtcaccggccgatcggcctgatgccctggggtgatggggaccccctcgctgtctccacaggacccttcccctccaggggtgcagtggggtgggtgaggacgggtgggagggacagggagggaccaataaatcataatgaagaaacgctc

SEQ ID NO: 2604 - DNA, 2336 bp, Homo Sapiens
  NM_005318
ggaagaaacacagatggcggcggcgcagcgccattccgggccgggagcaggcagccagcagccctgtcctcaccgcggtccgcccgccgccgctaaatacccggatgcgccgcccaagcgccagacgcggagctgggaaaagggaggcagaggaggcggaggcagaggcagaggcagaggcagagcccgagcccggtgccgagaccaagcgacagaccggcggggctgggcctcgcaaagccggctcggcgagctctcccgacacccgagccggggaggaaaagcagcgactcctcgctcgcatccccgggagccgcactccagactggcccggtagtcaggggctcaggagcagatcccgaggcaggctttgctcagcctccgacgagggctggccctttggaaggcgccttcaacagccggaccagacaggccaccatgaccgagaattccacgtccgcccctgcggccaagcccaagcgggccaaggcctccaagaagtccacagaccaccccaagtattcagacatgatcgtggctgccatccaggccgagaagaaccgcgctggctcctcgcgccagtccattcagaagtatatcaagagccactacaaggtgggtgagaacgctgactcgcagatcaagttgtccatcaagcgcctggtcaccaccggtgtcctcaagcagaccaaaggggtgggggcctcggggtccttccggctagccaagagcgacgaacccaagaagtcagtggccttcaagaagaccaagaaggaaatcaagaaggtagccacgccaaagaaggcatccaagcccaagaaggctgcctccaaagccccaaccaagaaacccaaagccaccccggtcaagaaggccaagaagaagctggctgccacgcccaagaaagccaaaaaacccaagactgtcaaagccaagccggtcaaggcatccaagcccaaaaaggccaaaccagtgaaacccaaagcaaagtccagtgccaagagggccggcaagaagaagtgacaatgaagtcttttcttgcggacactccctcctgtctcctattttctgtaaataattttctccttttttctctcttgatgctcaccaccaccttttgcccccttctgttctgactttataagagacaggatttggattcttcagaaattacagaataattcatttttccttaaccagttgtgcaaggacagcaacaaccaatctaatgatgagaatgtacttatattttgttttgctattaacctacttacggggttagggatttgcggggggggcttgtgtgttttgttggcttgtttgccatgaaggtagatgtgggtggggagaagacacaaggcagtttgttctggctagatgagagggaacccaggaattgtgaggttagcaggaatatctttagggtgagtgagttttctttgagttgggcacccgttgtgagagtttcagaacctttggccagcaggagagaggtggtagggagcagccagccggcaaaggaaggagggggaaaaaaaccgccaccgggctgacttccacctcccagtggtgagcagtgggggcccaaacccagtttccttctcatttttgttagtttgcgctttcggcctccctattttcttagggaaggggagtggggtccaagtgacagctggatgggagaagccatagtttctcccagtcagctaggatgtagccattgggggatctttgtggcttcagcaaattctcttgttaaaccggagtgaaaacttcaggggaagggtggggagtcagccaagtgcctcagtgtgccctgttgaaacttaggtttttccacgcaatcgatggattgtgtcctaggaagacttttcttttcctctggatttttgttcctcctgtacaagaggtgtctttgcttggtttggtggggctgcggccacttaaaacctcccgatctctttttgagtcctttattataagtagttgtagctgcgggagggggagggggagtgggcgggcagtggatagtaagacttactgcagtcgatttgggatttgctaagtagttttacagagctagatctgtgtgcatgtgtgtgtttgtgtatatatacatatctagggctagtacttagtttcacacccgggagctgggagaaaaaacctgtacagttgtctttctcttatttttaataaaatagaaaaatcgcgcacttgcgcgtcccccccccacccccttttttaaacaagtgttacttgtgccgggaaaattttgctgtctttgtaattttaaaactttaaaataaattggaaaagggagaaactgaaaaaaa

SEQ ID NO: 2605 - DNA, 732 bp, Homo Sapiens
  NM_005319
catcggcgctttgccacttgtacccgagtttttgattctcaacatgtccgagactgctcctgccgctcccgctgccgcgcctcctgcggagaaggcccctgtaaagaagaaggcggccaaaaaggctgggggtacgcctcgtaaggcgtctggtcccccggtgtcagagctcatcaccaaggctgtggccgcctctaaagagcgtagcggagtttctctggctgctctgaaaaaagcgttggctgccgccggctatgatgtggagaaaaacaacagccgtatcaaacttggtctcaagagcctggtgagcaagggcactctggtgcaaacgaaaggcaccggtgcttctggctcctttaaactcaacaagaaggcagcctccggggaagccaagcccaaggttaaaaaggcgggcggaaccaaacctaagaagccagttggggcagccaagaagcccaagaaggcggctggcggcgcaactccgaagaagagcgctaagaaaacaccgaagaaagcgaagaagccggccgcggccactgtaaccaagaaagtggctaagagcccaaagaaggccaaggttgcgaagcccaagaaagctgccaaaagtgctgctaaggctgtgaagcccaaggccgctaagcccaaggttgtcaagcctaagaaggcggcgcccaagaagaaataggcgaacgcctacttctaaaacccaaaaggctcttttcagagccacca

SEQ ID NO: 2606 - DNA, 2753 bp, Homo Sapiens
  NM_005324
gagcgcagagcggtttggtcgttcgttgggcggtgctggtttttcgctcgtcgactgcggctcttcctcgggcagcggaagcggcgcggcggtcggagaagtggcctaaaacttcggcgttgggtgaaagaaaatggcccgaaccaagcagactgctcgtaagtccaccggtgggaaagccccccgcaaacagctggccacgaaagccgccaggaaaagcgctccctctaccggcggggtgaagaagcctcatcgctacaggcccgggaccgtggcgcttcgagagattcgtcgttatcagaagtcgaccgagctgctcatccggaagctgcccttccagaggttggtgagggagatcgcgcaggatttcaaaaccgacctgaggtttcagagcgcagccatcggtgcgctgcaggaggctagcgaagcgtacctggtgggtctgttcgaagataccaacctgtgtgccatccacgctaagagagtcaccatcatgcccaaagacatccagttggctcgccggatacggggagagagagcttaagtgaaggcagtttttatggcgttttgtagtaaattctgtaaaatactttggtttaatttgtgactttttttgtaagaaattgtttataatatgttgcatttgtacttaagtcattccatctttcactcaggatgaatgcgaaaagtgactgttcacagacctcagtgatgtgagcactgttgctcaggagtgacaagttgctaatatgcagaagggatgggtgatacttcttgcttctcatgatgcatgtttctgtatgttaatgacttgttgggtagctattaaggtactagagttgataaatgtgtacagggtccttttgcaataaaactggttatgacttgatccaagtgtttaacaattggggctgttaagtctgaccatacatcactgtgatagaatgtgggctttttcaagggtgaagatacaagtcttaaccacagtgtaacttacagtttcctttaaaaaaaaaaaaagtaaacctggcagctatagaatacactatgtgcatttataatagctattttatatattgtagtatcaacatttttaaattaaatgttttacattcacaagtggtggggagtcttgtcattaaggtgtgtgtaatttagagtccagttggttttcttctgactgcacttgttctcatagtagtaaaatgctatgcgcatttataccttgcataagtcctcattctaccacatgttaaccctctagctgataatgcaaacactaactgggggattttatttataagggctctagaaaaaacgagttattcacaccagcatcatcttaactaacattctgaactagttagtgcagcttttcattgtgttgtgtggttggtctcataactaggttgagtttttctcctctgctgaggaaacagtaccgaagttctttttcttgtggcatttgtattataaaaacttggtgtgggggaggagcacaaaactccagcccactgaacctctgccaattaagatggtgttgggttaggttacatctggttactgtcctgggaaaatcatttttatagagatggccttccaagtggttttaaaatttactgaagtttttaggtcaattatgtatgttgactaaatttacaaataaacttgtttatccaactaagtgtccaaaacctaaattgaatgtactaagttttcacatgtcccattatctaggtccttgtatactaatgttttgaacttagatcatttcaggtgttgtttggtggataaaggaaccttttatttataaagatactgtagaaagcatgtgaacagctctctgcttgattaagatgccataatagtgctgtatttgcagtgtgggctaagacaaagtatattaataagcttttcagcccccccactcccgttccgtagtgtagaagcccacaggtgtagaactcagtcttaaacttcagtatgaaaccagtttccttgtgcgatgatggccactaaagcatagtacgtggatgtcagtgagacagcatgagagccagcagtcatcaaagcgttccacgtttgaagttagcaactgcttaaagttatgccctattaaaattgctttctcaaaagtttgggttagtttcaaatgtgatattttggagggaaggtaaagtaggtatctttcaggtcgtgataatgagctcctatgaaaggatgcaatataatgacccgcttttctagaaagttcataatcagctctggaacaagcacacttgattcctcactgtgcttcagaatgagattaagatcagatgttggaacgtgctatgctgtagcgtgtctggaaacaaagtacacaaacctggctacggtgatgagttagcttctgcttactacctgtgacaacccaagtgggtgacactagtgaaccttctccagtctgcaggctggcatagaaggctcttagattatattgggcagcttgcaatctgccgaagcagtgacttgcatttccacacttggcttgagcactcaacccagaaggcgaagatagcttttggttgtaggcggcttcctgtatgggatatccctcggtaagggtaaaggagcagaggcaaaggagaaaagcagaagttgcagctgatgcaggtatcctatgcccttgatggatgagactaaaataaaatttttgaagttaaaaaaaaaaaaaaaaaaaaaaaaaaaaaaaaaaaaaaaaaaaaaaaaaa

SEQ ID NO: 2607 - DNA, 1986 bp, Homo Sapiens
  NM_005327
cgtgtatacccgctcaacgctgggacgttacagccagggccaatgggcagagcgggactcgaggccccgcccccgccttgtggcgtcacggggacgccgggggcgcgcgggctgcagggccgcgtaggtccccgcccccagagtctggctttccgcggctgcccgcctcgcgcgtcttccctgcccgggtctcctcgctgtcgccgccgctgccacaccatggccttcgtcaccaggcagttcatgcgttccgtgtcctcctcgtccaccgcctcggcctcggccaagaagataatcgtcaagcacgtgacggtcatcggcggcgggctgatgggcgccggcattgcccaggttgctgcagcaactggtcacacagtagtgttggtagaccagacagaggacatcctggcaaaatccaaaaagggaattgaggaaagccttaggaaagtggcaaagaagaagtttgcagaaaaccctaaggccggcgatgaatttgtggagaagaccctgagcaccatagcgaccagcacggatgcagcctccgttgtccacagcacagacttggtggtggaagccatcgtggagaatctgaaggtgaaaaacgagctcttcaaaaggctggacaagtttgctgctgaacatacaatctttgccagcaacacttcctccttgcagattacaagcatagctaatgccaccaccagacaagaccgattcgctggcctccatttcttcaacccagtgcctgtcatgaaacttgtggaggtcattaaaacaccaatgaccagccagaagacatttgaatctttggtagactttagcaaagccctaggaaagcatcctgtttcttgcaaggacactcctgggtttattgtgaaccgcctcctggttccatacctcatggaagcaatcaggctgtatgaacgaggtgacgcatccaaagaagacattgacactgctatgaaattaggagccggttaccccatgggcccatttgagcttctagattatgtcggactggatactacgaagttcatcgtggatgggtggcatgaaatggatgcagagaacccattacatcagcccagcccatccttaaataagctggtagcagagaacaagttcggcaagaagactggagaaggattttacaaatacaagtgatgtgcagcttctccggctctgagaagaacacctgagagcgctttccagccagtgccccgagtgcctgtgggaatgctctttggtcagacattccctcacacagtacagtttaataaatgtgcattttgattgtaatctatcgaagtgattattacaccagttacagcagtaatagattctccattaagaaataattcccttttttagtctgttcatttctgtgtattttctaaacagctttacacccttggtgccttggagcaaacatgttttttgaaccttgtcatttttgtgaagaattgcctagattccttctctcatcaacgggaaagtacttcctctgagagtgcgagtgcaccatgctcactgttgctgcgtgggagagtcacaagccactggcaagcaagtggtatagtctgtgaagcactgcagcgagcagcacctggatcttgcctttataagaacattttactacctgcagctttgagtcttgccctacattttgggcatgacataagatgtgtctttattcagctcgtcgtgaagatgctgctgctgaatgggtcagcatatctctgtttgcatggtttgcaggaggtcggttttcatggtcattcagttccacagatctgaatgattactgtctgtctgtgtcttttttccatgagaaatcactgttgcaaattgcctataaattgactctactaaaataacaatgtttcagtctgaaaatttgaattgaaaaaaatgtataatataaaattgtaatacactcaaatgattataaaagtaaaagttggtaatttaggcagaagctaaaaa

SEQ ID NO: 2608 - DNA, 816 bp, Homo Sapiens
  NM_005330
caacaaaaaagagcctcaggatccagcacacattatcacaaacttagtgtccatccatcactgctgaccctctccggacctgactccacccctgagggacacaggtcagccttgaccaatgacttttaagtaccatggagaacagggggccagaacttcggcagtaaagaataaaaggccagacagagaggcagcagcacatatctgcttccgacacagctgcaatcactagcaagctctcaggcctggcatcatggtgcattttactgctgaggagaaggctgccgtcactagcctgtggagcaagatgaatgtggaagaggctggaggtgaagccttgggcagactcctcgttgtttacccctggacccagagattttttgacagctttggaaacctgtcgtctccctctgccatcctgggcaaccccaaggtcaaggcccatggcaagaaggtgctgacttcctttggagatgctattaaaaacatggacaacctcaagcccgcctttgctaagctgagtgagctgcactgtgacaagctgcatgtggatcctgagaacttcaagctcctgggtaacgtgatggtgattattctggctactcactttggcaaggagttcacccctgaagtgcaggctgcctggcagaagctggtgtctgctgtcgccattgccctggcccataagtaccactgagttctcttccagtttgcaggtgttcctgtgaccctgacaccctccttctgcacatggggactgggcttggccttgagagaaagccttctgtttaataaagtacattttcttcagtaatc

SEQ ID NO: 2609 - DNA, 589 bp, Homo Sapiens
  NM_005332
accaaggccagtcctgagcaggcccaactccagtgcagctgcccaccctgccgccatgtctctgaccaagactgagaggaccatcattgtgtccatgtgggccaagatctccacgcaggccgacaccatcggcaccgagactctggagaggctcttcctcagccacccgcagaccaagacctacttcccgcacttcgacctgcacccggggtccgcgcagttgcgcgcgcacggctccaaggtggtggccgccgtgggcgacgcggtgaagagcatcgacgacatcggcggcgccctgtccaagctgagcgagctgcacgcctacatcctgcgcgtggacccggtcaacttcaagctcctgtcccactgcctgctggtcaccctggccgcgcgcttccccgccgacttcacggccgaggcccacgccgcctgggacaagttcctatcggtcgtatcctctgtcctgaccgagaagtaccgctgagcgccgcctccgggacccccaggacaggctgcggcccctcccccgtcctggaggttccccagccccacttaccgcgtaatgcgccaataaaccaatgaacgaagc

SEQ ID NO: 2610 - DNA, 2365 bp, Homo Sapiens
  NM_005333
aaaaaggaagtaggggtgcgtgagaacgccggcggtgaccgcagccacagcggtgaccgagtgagaggaaggcggcggcggcggcggcggcggcgtgaagtcactgctgctctgggttcgggttggcgactgaaggcggtaccggcctcccggaacagcccgggggagggcttaggtgcagaagggcaggctggccgcggccggtttggtctggggaccacgggctggagcaggtggaaatttaaaattgtttacagtcaacactgtttccagccatgggtttgtctccatctgctcctgctgttgcagttcaggcctcaaatgcttcagcgtccccaccttcaggatgcccgatgcatgaagggaaaatgaaaggctgtccagtgaatacagagccatctggcccaacctgtgagaagaaaacatactctgtgcctgcccaccaggaacgcgcctatgagtacgtggagtgtcccattaggggcactgcggctgagaataaggagaacctagatccttcaaatctgatgccaccaccaaatcaaacaccagctccagatcagccatttgcattgtctactgtcagagaagagtcatccattccgagagcagattcagagaaaaagtgggtttacccttctgagcagatgttctggaatgcaatgttaaagaaagggtggaagtggaaggatgaggatatcagtcagaaggatatgtataatatcattagaattcacaatcagaataacgagcaggcttggaaggagattttgaagtgggaagcccttcatgctgcagagtgtccttgtggtccatcattgatccggtttggagggaaagcaaaagagtattcaccaagggcacgaattcgttcctggatggggtatgagttgccttttgataggcacgattggatcataaaccgttgcgggacagaagttagatatgtgattgattattatgatggtggtgaagtcaacaaggactaccagttcaccatcctggacgtccgtcctgccttagattcactttcggcagtatgggacagaatgaaagtcgcttggtggcgttggacctcgtaaagcactgtttcagatggaaaaatataaactatttttttctgagcgatacattaaactattttccccagattgaattgcactcatgatgtaatgggaacttcaagtgggtaatcacactttttccttcacttaacgaaggatactatgcactgttcacttttgacttgtgttgtaccttgcagtttatagcagatcattttgttttcttcctacttagcttaagtgggaagcagtctctcagtttttcctttacctgcagtattgtctgtatatttcatctcgaaaagcctgaacaacctctgaaaaagagcttttaaaaagtgatgaaagttgcttttttttcttactattttctcaggaatactccagagatgtaaagcctgagagtccatggtgatgctcaagagctttcatctggccaaatattttaactaaagctgttcattataaataagaggtgattataccttttttaaaaaaagttaccattatttctaaagcccctatggtatgattgtgacctttaacaaaatgcaaaggtatacactggaaaggtactcagcaaaattctctccaaattctgatttatatgaatttcttggactggatagagtactttcaactataccttcctttggaacataccttttaaaaaatgttccctttaaatcctgttattctaatatgtaactctgctcccaacaaacaggtctcctcattgtccttggcatttgacaagttatcccaacttcgaatctcatttcttcctttgctggcagcctccacccttccccacatcagtcggcctaatccaaaccttgaaagcctggcttaagtcccagtatcagtgatggtccccctctaaaacatgattttatatttggctgagtgttaaaattcacaagatgagcatttttttcccagatggagaacgcttcaactcagtctagattttttttgtttgttttaaggaagctctaagtttgccattgaaactttttgtaccagtaatccataaactggttgttctatttatagcagcatgttacaaatgactgctttttttttttaactgtctatactattaaatcctttaatttatcctgaatgctgtagtgttaaattagtggatgaaattggcagtctgtgggtgattaatttggtatggatttgtcagttttgtgtggagtttaagaaatagaacagccttaaactctacatttcaaaatacttgtatattttaaaataaagctgattagttcacaggttttgaaaaaaaaaaa

SEQ ID NO: 2611 - DNA, 8436 bp, Homo Sapiens
  NM_005334
aagatggcggctcccacaattgtggtctgagcgccggcggggctgcgacgaccgcggcgcttgtggctcctttccacccgccccggaagccggccagtgctggggacttgggggtgtgggaaccgggccggggctccgccatttccggcgggggagggctacgactgaggaagggaggagagagaggcggctcaagatggcggctcccagggcctcccgcccgagcttgtaagcgggagcgcccggacaagtagtcggggcgacgggactcagcggcctccagcttcttgagcctaggcgctcgacagtttcgggcggctcttgcggagacggggtgagcgagaagaaagggaagagccaaagggaaggagggcagttaagatggcggcctccatggagtcgtctaccgctgtgtgagaaaccgcttctccgtgagagctgccttagacgaaagggggtgtgtgaaaggaattgaggggctcccttcccgcttgttgacttctccccaccgcaccctttcccggaactatggcttcggccgtgtcgcccgccaacttgccagcggtgcttctgcagccccgctggaagcgagtggtgggctggtcgggtccggtgccacggccccgccacggccaccgcgccgtggccatcaaggagctcatcgtggtgtttggcggcggcaacgagggaatagtggacgaactgcacgtgtacaacacggcaaccaaccagtggttcatcccagccgtgaggggggacattccccctgggtgtgcagcctatggcttcgtgtgtgacgggactcgcctcctggtgtttggtgggatggtggagtatgggaaatacagcaatgacctctacgaactccaggcgagccggtgggagtggaagagactcaaagcaaagacgcccaaaaacgggccccctccgtgtcctcgactcgggcacagcttctcccttgtgggcaacaaatgctacctgtttgggggtctggccaatgatagcgaggacccaaagaacaacattccaaggtacctgaatgacttatatatcctggaattacggccaggctctggagtggtagcctgggacattcccatcacttacggggtcctaccaccaccccgggagtcacatactgccgtggtctacaccgaaaaagacaataagaagtccaagctggtgatctacggcgggatgagtggctgcaggctgggggacctgtggaccctagatattgacaccctgacgtggaataagcccagtctcagcggggtggcgcctcttcctcgcagtctccactcggcaaccaccatcggaaataaaatgtacgtgtttggtggctgggtgcctctcgtcatggatgacgtcaaagtggccacacacgagaaggagtggaagtgtaccaacacgctggcttgtctcaacctggataccatggcctgggagaccatcctgatggatacactggaggacaacatcccccgtgctcgggctggccactgcgcagtcgccatcaacacccgcctgtacatttggagtgggcgtgacggctaccgcaaggcctggaacaaccaggtctgctgcaaggacctctggtacctagagacagaaaagccaccacccccagcccgagtacaactggtacgcgccaacaccaactccctggaggtgagctggggggcagtggcaacagccgacagctaccttctccagctccagaaatatgacattcctgccacggctgctactgccacctcccctacacccaatccggtcccatctgtgcctgccaaccctcccaagagccctgccccagcagcagccgcacctgctgtgcagccgctgacccaagtaggcatcacgctcctgccccaggctgcccccgcacccccgaccaccaccaccatccaggtcttgccaacggtgcctggcagctccatttctgtgcccaccgcagccaggactcaaggtgtccctgctgttctcaaagtgaccggtcctcaggctacaacaggaactccattggtcaccatgcgacctgccagccaggctgggaaagcccctgtcaccgtgacctcccttcccgccggagtgcggatggttgtgccaacacagagtgcccagggaacggtgattggcagtagcccacagatgagtgggatggccgcactggccgctgcggccgctgccacccagaagatccccccttcctcggcacccacggtgctgagtgtcccagcgggtaccaccatcgtgaagaccatggctgtgacacctggcactaccaccctcccagccactgtgaaggtggcctcctcgccagtcatggtgagcaaccctgccactcgcatgctgaagactgcagccgcccaggtggggacatcggtttcctccgccaccaacacgtctacccgccctatcatcacagtgcacaagtcaggcactgtgacagtggcccagcaagcccaggtggtgaccacagttgtgggcggggtcaccaagaccatcaccctggtgaagagccccatctctgtcccaggaggcagtgctctgatttccaatctgggcaaagtgatgtcggtggtccagaccaaaccagttcagacttcagcagtcacaggccaggcgtccacgggtcctgtgactcagatcatccagaccaaagggcccctgccagcgggaacaatcctgaagctggtgacctcagcagatggcaagcccaccaccatcatcactaccacgcaggccagtggggcggggaccaagcccaccatcctgggcatcagcagcgtctcccccagtaccaccaagcccggcacgaccaccatcatcaaaaccatccccatgtcggccatcatcacccaggcgggcgccacgggtgtgaccagcagtcctggcatcaagtcccccatcaccatcatcaccaccaaggtgatgacttcaggaactggagcacctgcgaaaatcatcactgctgtccccaaaattgccactggccacgggcagcagggagtgacccaggtggtgcttaagggggccccgggacagccaggcaccatcctccgcactgtgcccatggggggtgttcgcctggtcacacccgtcaccgtctccgccgtcaagccagccgtcaccacgttggttgtgaaaggcaccacaggtgtcacgaccctaggcacagtgacaggcaccgtctccaccagccttgccggggcggggggccacagcactagtgcttccctggccacgcccatcaccaccttgggcaccattgccaccctctcaagccaggtgatcaaccccactgccatcactgtgtcggccgcacagaccacgctgacagcggcaggcgggctcacaaccccaaccatcaccatgcagcccgtgtcccagcccacccaggtaactctgatcacggcacctagtggggtggaggcccagcctgtgcatgacctccctgtgtccattctggcctccccgactacagaacagcccaccgccacagttaccatcgccgactcaggccagggtgatgtgcagcctggcactgtcaccttggtgtgctccaacccaccctgtgagacccacgagactggcaccaccaacacggccaccactactgttgtggctaaccttgggggacacccccagcccacccaagtgcagttcgtctgtgacagacaggaggcagctgcttctcttgtgacctcgactgtgggccagcagaatggtagcgtggtccgagtctgttcgaacccgccctgcgagacccacgagacgggcaccaccaacaccgccaccaccgccacctccaacatggccgggcagcatggctgctcaaacccaccctgcgagacccacgagacgggcaccaccaacactgccactacagccatgtcgagcgtcggcgccaaccaccagcgagatgcccgtcgggcctgtgcagctggcacccctgccgtgatccggatcagtgtggccactggggcgctggaggcagcccagggctctaagtcccagtgccaaacccgccagaccagcgcgaccagcaccaccatgactgtgatggccaccggggccccgtgctcggccggcccactccttgggccgagcatggcacgggagcccgggggccgcagccctgcttttgtgcagttggcccctctgagcagcaaagtcaggctgagcagcccaagcattaaggaccttcctgcggggcgccacagccatgcggtcagcaccgctgccatgacccgttccagcgtgggtgctggggagccccgcatggcacctgtgtgcgagagcctccagggtggctcgcccagcaccacagtgactgtgacagccctggaggcactgctgtgcccctcggccaccgtgacccaagtctgctccaacccaccatgtgagacccacgagacaggcaccaccaacaccgccactacctcgaatgcaggcagcgcccagagggtgtgctccaacccgccatgcgagacccacgagacgggcaccacccacacggccaccaccgctacttcaaacgggggcacgggccagcccgagggtgggcagcagccccctgctggtcgcccctgtgagacacaccagaccacttccactggcaccaccatgtcggtcagcgtgggtgccctgcttcccgacgccacttcttcccacaggaccgtggagtctggcctagaggtggcggcggcacccagcgtcaccccccaggctggcaccgcgctgctggctcctttcccaacacagagggtgtgctccaaccccccctgtgagacccacgagacgggcaccactcacacggccaccactgtcacttccaacatgagttcaaaccaagaccccccacctgctgccagcgatcagggagaggtggagagcacccagggcgacagcgtgaacatcaccagctccagtgccatcacgacaaccgtgtcctccacactgacgcgggctgtgaccaccgtgacgcagtccacaccggtcccgggcccctctgtgccgcccccagaggaactccaggtgtcgccaggtcctcgccagcagctgccgccacggcagcttctgcagtcggcttccacagccctgatgggggagtccgccgaggtcctgtcagcctcccagacccctgagctcccggccgccgtggatctgagcagcacaggggagccatcttcgggccaggagtctgccggctctgcggtggtggccactgtggtggtccagccacccccacccacacagtccgaagtagaccagttatcacttccccaagagctaatggccgaggcccaagctggcaccaccaccctcatggtaacggggctcacccccgaggagctggcagtgacggctgctgcagaagcagctgcccaggccgcagccacggaggaagcccaggccctggccatccaggcggtgctccaggccgcgcagcaggccgtcatgggcaccggcgagcccatggacacctccgaggcagcagcaaccgtgactcaggcggagctggggcacctgtcggccgagggtcaggagggccaggccaccaccatacccattgtgctgacacagcaggagctggctgccctggtgcagcagcagcagctgcaggaggcccaggcccagcagcagcatcaccacctccccactgaggccctggcccctgccgacagtctcaacgacccagccattgagagcaattgcctcaatgagctggccggcacggtccccagcactgtggcgctgctgccctcaacggccactgagagcctggctccatccaacacatttgtggccccccagccggttgtggtggccagcccagccaagctgcaggctgcagctaccctgaccgaagtggccaatggcatcgagtccctgggtgtgaagccagacctgccgcccccacccagcaaagcccccatgaagaaggaaaaccagtggtttgatgtgggagtcattaagggcaccaatgtaatggtgacacactatttcctgccaccagatgatgctgtcccatcagacgatgatttgggcaccgtccctgactataaccagctgaagaagcaggagctgcagccaggcacagcctataagtttcgtgttgccggaatcaatgcctgtggccgggggcccttcagcgaaatctcagcctttaagacgtgcctgcctggtttcccaggggccccttgtgccattaaaatcagcaaaagtccggatggtgctcacctcacctgggagccaccctctgtgacctccggcaagattatcgagtactccgtgtacctggccatccagagctcacaggctgggggcgagctcaagagctccaccccggcccagctggccttcatgcgggtgtactgcgggcccagcccctcctgcctggtgcagtcctccagcctttccaacgcccacatcgactacaccaccaagcccgccatcatcttccgcatcgccgcccgcaatgagaagggctatggcccggccacacaagtgaggtggctgcaggaaaccagtaaagacagctctggcaccaagccagccaacaagcggcccatgtcctctccagaaatgaaatctgctccaaagaaatctaaggccgatggtcagtgagaggaagctgactagcccctggattcttctccagacccccctgcttcaggaacacccgccagggcccacccctcccaccccgtcccagcattcgcacttcaccctcgcgagccgctgttcactcctctcccctttctctttctctctgtttttaaaataatctaaagaaagcacattttaccattgctgttgggaggaagcagaggcagatgggaaagcagagagaggagcgcgcttcctttcctccccgctgccgcccaccctggggagagacttttgcggggagggaaggcggagctgaggacagccagctccgccctcccaaggctgtgcgttcctgagggccaggtcgggggcaggcatggaggggaggaaaggcgtccctcttggccctccccagagtggctttcctggcaccctggcctgggtgtctggttctgttttcttttcttccccttgtgtttccagtcacctaacttcccttcctcaggctcccccggcccaccctgctcagtgaccccacaggaagcttacacattttctcagaggcctttgtgctcccacctcttctaccctccccctcttctttcccattttaaaaaagaaaagaaggaaaaagaaaaaaggggcaaggagccccgcggcggcctgggcagcgcctgtgcagacctccctgcaggccgcactgccaactgctgcatttgttgtgttttttaggttgcaattggtgaagttcacactttcattgtaattttagcgtgtggggttttgtcccttttttgttgttgttagctgtgtacagaatgtgtaatcttttttcttttctcttttttttgttttgttttgttttgtttttgtttttttacttttttcttcttggctaattcttggcagggatctttctggaggaaaagctggggccagccagggcaggagaggtgtgaaatctgccacgaggggcctgctgtttgccacccagcccaacttcctgttgctggcccctgccctctgcccttttgcctgtcctcaggccgctggaacaaaggaaggacagctcattcctcatgggcgatcactccgcatctatagggtcgagcctaggggagcttgagggagggctggggcctccttgtcctggatttccagctctccccatgccccctccctgagcaccaccggcaccgcctcccaaacagggctgctggtttccgcagccactgctccacctcccccaaatcgtcatggaaagggtggagaatggaggggaaccaggcgtccttggaggcagcttgggagggtgactgtgtagtgtcacccacaagggaggctagggcaatggagcaggccaccagcagcagctgtgcagcatggaactcaggccaggctccgaggctgggggatctgcttggagttttctgccccccaccccaaacttctgtcgaggagcaaggcttgccagcaagtcagaaggatttgaaccgagcagccaatctttccagccctcccctaccgacctctgcctggagacgcagcagcctgtgtcctccagggcctctggtttgttgtattatagtatatttcgctgtggaaaatgtcacgtttagtcaccttggagcccactcacctggtcctgttgttttaccccatcccttctctcgcgcgcctattgatttgtttctgaggagagtacaccgttcactattgtagagtaacccctgtgactcaatattaccatagtgcgatgtcgttttgtgctattttgaacaattaaaagactttttttgaaataaaaaaaaaaaa

SEQ ID NO: 2612 - DNA, 7239 bp, Homo Sapiens
  NM_005338
cggggcagccgagggcccctgactcggctcctcgcggcgacatggatcggatggccagctccatgaagcaggtgcccaacccactgcccaaggtgctgagccggcgcggggtcggcgctgggctggaggcggcggagcgcgagagcttcgagcggactcagactgtcagcatcaataaggccattaatacgcaggaagtggctgtaaaggaaaaacacgccagaacgtgcatactgggcacccaccatgagaaaggggcacagaccttctggtctgttgtcaaccgcctgcctctgtctagcaacgcagtgctctgctggaagttctgccatgtgttccacaaactcctccgagatggacacccgaacgtcctgaaggactctctgagatacagaaatgaattgagtgacatgagcaggatgtggggccacctgagcgaggggtatggccagctgtgcagcatctacctgaaactgctaagaaccaagatggagtaccacaccaaaaatcccaggttcccaggcaacctgcagatgagtgaccgccagctggacgaggctggagaaagtgacgtgaacaactttttccagttaacagtggagatgtttgactacctggagtgtgaactcaacctcttccaaacagtattcaactccctggacatgtcccgctctgtgtccgtgacggcagcagggcagtgccgcctcgccccgctgatccaggtcatcttggactgcagccacctttatgactacactgtcaagcttctcttcaaactccactcctgcctcccagctgacaccctgcaaggccaccgggaccgcttcatggagcagtttacaaagttgaaagatctgttctaccgctccagcaacctgcagtacttcaagcggctcattcagatcccccagctgcctgagaacccacccaacttcctgcgagcctcagccctgtcagaacatatcagccctgtggtggtgatccctgcagaggcctcatcccccgacagcgagccagtcctagagaaggatgacctcatggacatggatgcctctcagcagaatttatttgacaacaagtttgatgacatctttggcagttcattcagcagtgatcccttcaatttcaacagtcaaaatggtgtgaacaaggatgagaaggaccacttaattgagcgactatacagagagatcagtggattgaaggcacagctagaaaacatgaagactgagagccagcgggttgtgctgcagctgaagggccacgtcagcgagctggaagcagatctggccgagcagcagcacctgcggcagcaggcggccgacgactgtgaattcctgcgggcagaactggacgagctcaggaggcagcgggaggacaccgagaaggctcagcggagcctgtctgagatagaaaggaaagctcaagccaatgaacagcgatatagcaagctaaaggagaagtacagcgagctggttcagaaccacgctgacctgctgcggaagaatgcagaggtgaccaaacaggtgtccatggccagacaagcccaggtagatttggaacgagagaaaaaagagctggaggattcgttggagcgcatcagtgaccagggccagcggaagactcaagaacagctggaagttctagagagcttgaagcaggaacttgccacaagccaacgggagcttcaggttctgcaaggcagcctggaaacttctgcccagtcagaagcaaactgggcagccgagttcgccgagctagagaaggagcgggacagcctggtgagtggcgcagctcatagggaggaggaattatctgctcttcggaaagaactgcaggacactcagctcaaactggccagcacagaggaatctatgtgccagcttgccaaagaccaacgaaaaatgcttctggtggggtccaggaaggctgcggagcaggtgatacaagacgccctgaaccagcttgaagaacctcctctcatcagctgcgctgggtctgcagatcacctcctctccacggtcacatccatttccagctgcatcgagcaactggagaaaagctggagccagtatctggcctgcccagaagacatcagtggacttctccattccataaccctgctggcccacttgaccagcgacgccattgctcatggtgccaccacctgcctcagagccccacctgagcctgccgactcactgaccgaggcctgtaagcagtatggcagggaaaccctcgcctacctggcctccctggaggaagagggaagccttgagaatgccgacagcacagccatgaggaactgcctgagcaagatcaaggccatcggcgaggagctcctgcccaggggactggacatcaagcaggaggagctgggggacctggtggacaaggagatggcggccacttcagctgctattgaaactgccacggccagaatagaggagatgctcagcaaatcccgagcaggagacacaggagtcaaattggaggtgaatgaaaggatccttggttgctgtaccagcctcatgcaagctattcaggtgctcatcgtggcctctaaggacctccagagagagattgtggagagcggcaggggtacagcatcccctaaagagttttatgccaagaactctcgatggacagaaggacttatctcagcctccaaggctgtgggctggggagccactgtcatggtggatgcagctgatctggtggtacaaggcagagggaaatttgaggagctaatggtgtgttctcatgaaattgctgctagcacagcccagcttgtggctgcatccaaggtgaaagctgataaggacagccccaacctagcccagctgcagcaggcctctcggggagtgaaccaggccactgccggcgttgtggcctcaaccatttccggcaaatcacagatcgaagagacagacaacatggacttctcaagcatgacgctgacacagatcaaacgccaagagatggattctcaggttagggtgctagagctagaaaatgaattgcagaaggagcgtcaaaaactgggagagcttcggaaaaagcactacgagcttgctggtgttgctgagggctgggaagaaggaacagaggcatctccacctacactgcaagaagtggtaaccgaaaaagaatagagccaaaccaacaccccatatgtcagtgtaaatccttgttacctatctcgtgtgtgttatttccccagccacaggccaaatccttggagtcccaggggcagccacaccactgccattacccagtgccgaggacatgcatgacacttccaaagactccctccatagcgacaccctttctgtttggacccatggtcatctctgttcttttcccgcctccctagttagcatccaggctggccagtgctgcccatgagcaagcctaggtacgaagaggggtggtggggggcagggccactcaacagagaggaccaacatccagtcctgctgactatttgacccccacaacaatgggtatccttaatagaggagctgcttgttgtttgttgacagcttggaaagggaagatcttatgccttttcttttctgttttcttctcagtcttttcagtttcatcatttgcacaaacttgtgagcatcagagggctgatggattccaaaccaggacactaccctgagatctgcacagtcagaaggacggcaggagtgtcctggctgtgaatgccaaagccattctccccctctttgggcagtgccatggatttccactgcttcttatggtggttggttgggttttttggttttgtttttttttttaagtttcactcacatagccaactctcccaaagggcacacccctggggctgagtctccagggccccccaactgtggtagctccagcgatggtgctgcccaggcctctcggtgctccatctccgcctccacactgaccaagtgctggcccacccagtccatgctccagggtcaggcggagctgctgagtgacagctttcctcaaaaagcagaaggagagtgagtgcctttccctcctaaagctgaatcccggcggaaagcctctgtccgcctttacaagggagaagacaacagaaagagggacaagagggttcacacagcccagttcccgtgacgaggctcaaaaacttgatcacatgcttgaatggagctggtgagatcaacaacactacttccctgccggaatgaactgtccgtgaatggtctctgtcaagcgggccgtctcccttggcccagagacggagtgtgggagtgattcccaactcctttctgcagacgtctgccttggcatcctcttgaataggaagatcgttccaccttctacgcaattgacaaacccggaagatcagatgcaattgctcccatcagggaagaaccctatacttggtttgctacccttagtatttattactaacctcccttaagcagcaacagcctacaaagagatgcttggagcaatcagaacttcaggtgtgactctagcaaggctcatctttctgcccggctacatcagccttcaagaatcagaagaaaggccaaggtgctggactgttactgacttggatcccaaagcaaggagatcatttggagctcttgggtcagagaaaatgagaaaggacagagccagcggctccaactcctttcagccacatgccccaggctctcgctgccctgtggacaggatgaggacagagggcacatgaacagcttgccagggatgggcagcccaacagcacttttcctcttctagatggaccccagcatttaagtgaccttctgatcttggaaaaacagcgtcttccttctttatctatagcaactcattggtggtagccatcaagcacttcccaggatctgctccaacagaatattgctaggttttgctacatgacgggttgtgagacttctgtttgatcactgtgaaccaacccccatctccctagcccacccccctccccaactccctctctgtgcattttctaagtgggacattcaaaaaactctctcccaggacctcggatgaccatactcagacgtgtgacctccatactgggctaaggaagtatcagcactagaaattgggcagtcttaatgttgaatgctgctttctgcttagtatttttttgattcaaggctcagaaggaatggtgcgtggcttccctgtcccagttgtggcaactaaaccaatcggtgtgttcttgatgcgggtcaacatttccaaaagtggctagtcctcacttctagatctcagccattctaactcatatgttcccaattaccaaggggtggccgggcacagtggctcacgcctgtaatcccagcactttgagaggctgaggtggtaggatcacctgaggtcaggagttcaagaccagcctgtccaacatggtgaaacccccatctctactaaaaataccaaaaattagccgagcgtagtgacgggtgcccgtaatcccagctactcaggaggctgagacaggagaatcacctgaaccccagaggcagaggttgcagtgagctgagatcacgccattgtactccagcctgggcaacaagagcaaaactccgtctcaaaaaaaaaaaaaaattacaaatggggcaaacagtctagtgtaatggatcaaattaagattctctgcccagccgggcacagtggcgcatgcctgtaatcccagaactttgggaggccaagacgggatgattgcttgagctcaggagtttgagaccaggctgggcatcatagcaagacctcatctctactaaaattcaaaaacaaaattagccgggcatgatggtgcatgcctgtagtctcagctagttggggagctaaggtgggagaattgcttgagcttgggaagtcgaggctgcagtcagccctgattgtgccagtgcactccggcctgggtgacagagtgagaccctgtctcaaaaaaaaaaagattctgtgtcagagcccagcccaggagtttgaggctgcaatgagccatgatttcccactgcactccagcctgagtgacagagcgagactccatctctttaaaaacaaacaaaaaattatctgaatgatcctgtctctaaaaagaagccacagaaatgtttaaaaacttcatcgacttagcctgagtcataacggttaagaaagcacttaaacagaagcagaggctaattcagtgtcacatgaggaagtagctgtcagatgtcacataattactttcgtaatagctcagattagaatggctaccccattctctagacaaaatcaaattgtcctattgtgactcttctaaaaatgaagatgaagagctatttaatgacacaccttggattaaaacgggaatcacatcttaaagctaaaaatgaacctgcaagccttctaaatgagtcactgagcatcactagtgacaagtctcgggtgagcgtaaatgggtcatgacaagatgggacagcaacaaaatcatggcttaggatcgacaagaagttaaaaaacagctgcatctgttacttaagtttgtaagacagtgccctgagacctctagagaaaagatgtttgtttacataagagaaagaggccagacatggtgtctcacacgtttaatcccagcactttgggaggcaggggcgggtggatcacctgaggtcaggagttcaagactagcctggccaacatggtgaaaccccgtctctactaaaaatacaaaaattagccgggcatggtggcaggcgcctataatcccagctactggggaggctgaggcaggagaatcacttgaacccgggggacagaggttgtagtgagccaagatcgcaccactgcactccagcctgggtcacagagtgagactccatctcaaaaaaaaaaaagagagagagagagaaagaaatagaagagaagagccatcttggcagggttattttatatctgagcaaggagtttaaatgagactagtttagattgtctgctgatgcagccgtccatagcagtacccctaaaatcccaccagaatacgggtccctctaacccagtggctggaagaaccactgtctagagcaacttttcttggaactgtcccagctaccaagtcagacaccaaggtttatgccaccaggtaacacgggaatcacaggtacatgtcgctccggtcagattagttggctttggcccctcgaccctgtgcaggagctagttctcagcttgcagctggaagttccctct

SEQ ID NO: 2613 - DNA, 3556 bp, Homo Sapiens
  NM_005342
ggctctcgtggaggcagctagcgcgaggctggggagcgctgagccgcgcgtcgtgccctgcgctgcccagactagcgaacaatacagtcaggatggctaaaggtgaccccaagaaaccaaagggcaagatgtccgcttatgccttctttgtgcagacatgcagagaagaacataagaagaaaaacccagaggtccctgtcaattttgcggaattttccaagaagtgctctgagaggtggaagacgatgtccgggaaagagaaatctaaatttgatgaaatggcaaaggcagataaagtgcgctatgatcgggaaatgaaggattatggaccagctaagggaggcaagaagaagaaggatcctaatgctcccaaaaggccaccgtctggattcttcctgttctgttcagaattccgccccaagatcaaatccacaaaccccggcatctctattggagacgtggcaaaaaagctgggtgagatgtggaataatttaaatgacagtgaaaagcagccttacatcactaaggcggcaaagctgaaggagaagtatgagaaggatgttgctgactataagtcgaaaggaaagtttgatggtgcaaagggtcctgctaaagttgcccggaaaaaggtggaagaggaagatgaagaagaggaggaggaagaagaggaggaggaggaggaggaggatgaataaagaaactgtttatctgtctccttgtgaatacttagagtaggggagcgccgtaattgacacatctcttatttgagaagtgtctgttgccctcattaggtttaattacaaaatttgatcacgatcatattgtagtctctcaaagtgctctagaaattgtcagtggtttacatgaagtggccatgggtgtctggagcaccctgaaactgtatcaaagttgtacatatttccaaacatttttaaaatgaaaaggcactctcgtgttctcctcactctgtgcactttgctgttggtgtgacaaggcatttaaagatgtttctggcattttctttttatttgtaaggtggtggtaactatggttattggctagaaatcctgagttttcaactgtatatatctatagtttgtaaaaagaacaaaacaaccgagacaaacccttgatgctccttgctcggcgttgaggctgtggggaagatgccttttgggagaggctgtagctcagggcgtgcactgtgaggctggacctgttgactctgcagggggcatccatttagcttcaggttgtcttgtttctgtatatagtgacatagcattctgctgccatcttagctgtggacaaaggggggtcagctggcatgagaatattttttttttttaagtgcggtagtttttaaactgtttgtttttaaacaaactatagaactcttcattgtcagcaaagcaaagagtcactgcatcaatgaaagttcaagaacctcctgtacttaaacacgattcgcaacgttctgttattttttttgtatgtttagaatgctgaaatgtttttgaagttaaataaacagtattacatttttaaaactcttctctattataacagtcaatttctgactcacagcagtgaacaaacccccactccattgtatttggagactggcctccctataaatgtggtagcttcttttattactcagtggccagctcacttagggctgagatgaaggagagggctacttgaagctactgtgtgattttgtttgtgtctgagtggcattcagatgaagtctggaggagttaggagaacgacataggcaaggttcagcagccttccaaggtataggaaggtgggtgattaggactgaggctatctaggtttaacttttgtcccacctccaccccctattttgtggggccaaatgcattgctaaacagcaatttcagagtgtatggtgtgtcaaaaattaaggccttattgtttttctctttcacccctaccccccgtgctcctggcacatatcacattatttgtggtgcccaacatttggggtcttgagcctgctgctggtctcctggatgccagtgagggtatgtgggatggggtggtggggtaggggacggtatcctttttttgctcctacttggaaacaccaaacaccccaaggaagatgataggctccatcttgggccacctgagctatagggcaggctaatggaatcaaccatttctgagcactaaatgtatcatgaaaagttgaatggcctgctcataagtttagctcattcactggaaatgtagattgatgttcaatgttaaactggaaggagcttggtttgtgtgtcagtggttatattagtgggtagtgtaacattttatccaggttggggtgaggggagatggccacagtagcaagtggtgacactaaataccattttgaaggctgatgtgtatatacatcattactgtccgtagcaatgaaggatacagtactgtgttgtgggtgagtgttgctattgcccagcattaatatttgggtgtgtatgtttgaggctatgaaacacgcaggagtgtttttgtgctattaattttaagagaaagcagctttttcttaaaattcactgttgagaaacttgcatgtctggaggcggtgtcctctccgccctgtcgggtcctggatgagtacgagttatggtcacggtcacagcctgatctcttatgtgttcatagccattcgctctcccatcagaactgtttgtcctgaatgtgttcctctagttctagaaaatgaccactaatttaaaaaactcggttgtgaggtttgcccagaggcacttgttccagaatttcccctcctgcttcagccatgtccttgtcacttggcattctaagctaaagctttagcttcccaattcgtgatgtgctaggccaagattcgggagctgttgccagcctcgtcaaatatggaagagaaacaacctgcggtcaaaagggagtgatttgttaagtggtgcgcgtctatctcataactagatgtaccaaccagggaagggccaaggatggaaaggggtaacttttgtgcttccaaagtagctaagcagaagtgggggagcagtttagccagatgatctttgattaggcaaacattgagttttaaagaggctgtcaagttgaggccacttggtccattagctggggcagcaagatcactactcaacgttttcacactgtggcaagattgctcttctagtggaataatgccctagtttctctgagatgatgtaagtggcatgatgttacctaaggcttaggcttagcttgatttctgggcccactgtctgtgttcttaagatgccaacctgttgctttttttttttttttcccccatttaaaaggatagtacctactccctctaaccacctcaccccattcttgaatgacattttatccttcggaaagaacaaggctgtgatgtagtgactattgtctgtgtctcctgtgtgtgtctgttcttgtcacaaatgtatttggggacgttggatgcattcattttctgtaataaagtttcttaatcactcttcccaaaaagtaa

SEQ ID NO: 2614 - DNA, 1061 bp, Homo Sapiens
  NM_005343
tgccctgcgcccgcaacccgagccgcacccgccgcggacggagcccatgcgcggggcgaaccgcgcgcccccgcccccgccccgccccggcctcggccccggccctggccccgggggcagtcgcgcctgtgaacggtggggcaggagaccctgtaggaggaccccgggccgcaggcccctgaggagcgatgacggaatataagctggtggtggtgggcgccggcggtgtgggcaagagtgcgctgaccatccagctgatccagaaccattttgtggacgaatacgaccccactatagaggattcctaccggaagcaggtggtcattgatggggagacgtgcctgttggacatcctggataccgccggccaggaggagtacagcgccatgcgggaccagtacatgcgcaccggggagggcttcctgtgtgtgtttgccatcaacaacaccaagtcttttgaggacatccaccagtacagggagcagatcaaacgggtgaaggactcggatgacgtgcccatggtgctggtggggaacaagtgtgacctggctgcacgcactgtggaatctcggcaggctcaggacctcgcccgaagctacggcatcccctacatcgagacctcggccaagacccggcagggagtggaggatgccttctacacgttggtgcgtgagatccggcagcacaagctgcggaagctgaaccctcctgatgagagtggccccggctgcatgagctgcaagtgtgtgctctcctgacgcagcacaagctcaggacatggaggtgccggatgcaggaaggaggtgcagacggaaggaggaggaaggaaggacggaagcaaggaaggaaggaagggctgctggagcccagtcaccccgggaccgtgggccgaggtgactgcagaccctcccagggaggctgtgcacagactgtcttgaacatcccaaatgccaccggaaccccagcccttagctcccctcccaggcctctgtgggcccttgtcgggcacagatgggatcacagtaaattattggatggtcttgaaaaaaaaaaaaaaaaaa

SEQ ID NO: 2615 - DNA, 2445 bp, Homo Sapiens
  NM_005345
ataaaagcccaggggcaagcggtccggataacggctagcctgaggagctgctgcgacagtccactacctttttcgagagtgactcccgttgtcccaaggcttcccagagcgaacctgtgcggctgcaggcaccggcgcgtcgagtttccggcgtccggaaggaccgagctcttctcgcggatccagtgttccgtttccagcccccaatctcagagcggagccgacagagagcagggaaccggcatggccaaagccgcggcgatcggcatcgacctgggcaccacctactcctgcgtgggggtgttccaacacggcaaggtggagatcatcgccaacgaccagggcaaccgcaccacccccagctacgtggccttcacggacaccgagcggctcatcggggatgcggccaagaaccaggtggcgctgaacccgcagaacaccgtgtttgacgcgaagcggctgattggccgcaagttcggcgacccggtggtgcagtcggacatgaagcactggcctttccaggtgatcaacgacggagacaagcccaaggtgcaggtgagctacaagggggagaccaaggcattctaccccgaggagatctcgtccatggtgctgaccaagatgaaggagatcgccgaggcgtacctgggctacccggtgaccaacgcggtgatcaccgtgccggcctacttcaacgactcgcagcgccaggccaccaaggatgcgggtgtgatcgcggggctcaacgtgctgcggatcatcaacgagcccacggccgccgccatcgcctacggcctggacagaacgggcaagggggagcgcaacgtgctcatctttgacctgggcgggggcaccttcgacgtgtccatcctgacgatcgacgacggcatcttcgaggtgaaggccacggccggggacacccacctgggtggggaggactttgacaacaggctggtgaaccacttcgtggaggagttcaagagaaaacacaagaaggacatcagccagaacaagcgagccgtgaggcggctgcgcaccgcctgcgagagggccaagaggaccctgtcgtccagcacccaggccagcctggagatcgactccctgtttgagggcatcgacttctacacgtccatcaccagggcgaggttcgaggagctgtgctccgacctgttccgaagcaccctggagcccgtggagaaggctctgcgcgacgccaagctggacaaggcccagattcacgacctggtcctggtcgggggctccacccgcatccccaaggtgcagaagctgctgcaggacttcttcaacgggcgcgacctgaacaagagcatcaaccccgacgaggctgtggcctacggggcggcggtgcaggcggccatcctgatgggggacaagtccgagaacgtgcaggacctgctgctgctggacgtggctcccctgtcgctggggctggagacggccggaggcgtgatgactgccctgatcaagcgcaactccaccatccccaccaagcagacgcagatcttcaccacctactccgacaaccaacccggggtgctgatccaggtgtacgagggcgagagggccatgacgaaagacaacaatctgttggggcgcttcgagctgagcggcatccctccggcccccaggggcgtgccccagatcgaggtgaccttcgacatcgatgccaacggcatcctgaacgtcacggccacggacaagagcaccggcaaggccaacaagatcaccatcaccaacgacaagggccgcctgagcaaggaggagatcgagcgcatggtgcaggaggcggagaagtacaaagcggaggacgaggtgcagcgcgagagggtgtcagccaagaacgccctggagtcctacgccttcaacatgaagagcgccgtggaggatgaggggctcaagggcaagatcagcgaggcggacaagaagaaggtgctggacaagtgtcaagaggtcatctcgtggctggacgccaacaccttggccgagaaggacgagtttgagcacaagaggaaggagctggagcaggtgtgtaaccccatcatcagcggactgtaccagggtgccggtggtcccgggcctgggggcttcggggctcagggtcccaagggagggtctgggtcaggccccaccattgaggaggtagattaggggcctttccaagattgctgtttttgttttggagcttcaagactttgcatttcctagtatttctgtttgtcagttctcaatttcctgtgtttgcaatgttgaaattttttggtgaagtactgaacttgctttttttccggtttctacatgcagagatgaatttatactgccatcttacgactatttcttctttttaatacacttaactcaggccattttttaagttggttacttcaaagtaaataaactttaaaattcaaaaaaaaaaaaaaaaaa

SEQ ID NO: 2616 - DNA, 2551 bp, Homo Sapiens
  NM_005346
ggaaaacggccagcctgaggagctgctgcgagggtccgcttcgtctttcgagagtgactcccgcggtcccaaggctttccagagcgaacctgtgcggctgcaggcaccggcgtgttgagtttccggcgttccgaaggactgagctcttgtcgcggatcccgtccgccgtttccagcccccagtctcagagcggagcccacagagcagggcaccggcatggccaaagccgcggcgatcggcatcgacctgggcaccacctactcctgcgtgggggtgttccaacacggcaaggtggagatcatcgccaacgaccagggcaaccgcaccacccccagctacgtggccttcacggacaccgagcggctcatcggggatgcggccaagaaccaggtggcgctgaacccgcagaacaccgtgtttgacgcgaagcggctgatcggccgcaagttcggcgacccggtggtgcagtcggacatgaagcactggcctttccaggtgatcaacgacggagacaagcccaaggtgcaggtgagctacaagggggagaccaaggcattctaccccgaggagatctcgtccatggtgctgaccaagatgaaggagatcgccgaggcgtacctgggctacccggtgaccaacgcggtgatcaccgtgccggcctacttcaacgactcgcagcgccaggccaccaaggatgcgggtgtgatcgcggggctcaacgtgctgcggatcatcaacgagcccacggccgccgccatcgcctacggcctggacagaacgggcaagggggagcgcaacgtgctcatctttgacctgggcgggggcaccttcgacgtgtccatcctgacgatcgacgacggcatcttcgaggtgaaggccacggccggggacacccacctgggtggggaggactttgacaacaggctggtgaaccacttcgtggaggagttcaagagaaaacacaagaaggacatcagccagaacaagcgagccgtgaggcggctgcgcaccgcctgcgagagggccaagaggaccctgtcgtccagcacccaggccagcctggagatcgactccctgtttgagggcatcgacttctacacgtccatcaccagggcgaggttcgaggagctgtgctccgacctgttccgaagcaccctggagcccgtggagaaggctctgcgcgacgccaagctggacaaggcccagattcacgacctggtcctggtcgggggctccacccgcatccccaaggtgcagaagctgctgcaggacttcttcaacgggcgcgacctgaacaagagcatcaaccccgacgaggctgtggcctacggggcggcggtgcaggcggccatcctgatgggggacaagtccgagaacgtgcaggacctgctgctgctggacgtggctcccctgtcgctggggctggagacggccggaggcgtgatgactgccctgatcaagcgcaactccaccatccccaccaagcagacgcagatcttcaccacctactccgacaaccaacccggggtgctgatccaggtgtacgagggcgagagggccatgacgaaagacaacaatctgttggggcgcttcgagctgagcggcatccctccggcccccaggggcgtgccccagatcgaggtgaccttcgacatcgatgccaacggcatcctgaacgtcacggccacggacaagagcaccggcaaggccaacaagatcaccatcaccaacgacaagggccgcctgagcaaggaggagatcgagcgcatggtgcaggaggcggagaagtacaaagcggaggacgaggtgcagcgcgagagggtgtcagccaagaacgccctggagtcctacgccttcaacatgaagagcgccgtggaggatgaggggctcaagggcaagatcagcgaggcggacaagaagaaggttctggacaagtgtcaagaggtcatctcgtggctggacgccaacaccttggccgagaaggacgagtttgagcacaagaggaaggagctggagcaggtgtgtaaccccatcatcagcggactgtaccagggtgccggtggtcccgggcctggcggcttcggggctcagggtcccaagggagggtctgggtcaggccctaccattgaggaggtggattaggggcctttgttctttagtatgtttgtctttgaggtggactgttgggactcaaggactttgctgctgttttcctatgtcatttctgcttcagctctttgctgcttcacttctttgtaaagttgtaacctgatggtaattagctggcttcattatttttgtagtacaaccgatatgttcattagaattctttgcatttaatgttgatactgtaagggtgtttcgttccctttaaatgaatcaacactgccaccttctgtacgagtttgtttgttttttttttttttttttttttttgcttggcgaaaacactacaaaggctgggaatgtatgtttttataatttgtttatttaaatatgaaaaataaaatgttaaactttaaaaaaaaaaaaaaaaaaaaaaaaaaaaaaa

SEQ ID NO: 2617 - DNA, 2388 bp, Homo Sapiens
  NM_005349
attgggtacatgcgcagtgccgctcgcgcgggccgcgccaatcctgcagcgccttcaacaggtttcgggcggcgaattccagttctccgggttttggggctccctgcgggaggcagtgctggatctgggaatctctaggaaaggaaagagcaaaggaggggaaagatggggggctgcagtctccacgtacgtccctcaaagcgcgtcctaaaacccggataaccggagcgctccccatggaccacacggagggctcgcccgcggaggagccgcctgcgcatgctccatcgcctgggaaatttggtgagcggcctccacctaaacgacttactagggaagctatgcgaaattatttaaaagagcgaggggatcaaacagtacttattcttcatgcaaaagttgcacagaagtcatatggaaatgaaaaaaggtttttttgcccacctccttgtgtatatcttatgggcagtggatggaagaaaaaaaaagaacaaatggaacgcgatggttgttctgaacaagagtctcaaccgtgtgcatttattgggataggaaatagtgaccaagaaatgcagcagctaaacttggaaggaaagaactattgcacagccaaaacattgtatatatctgactcagacaagcgaaagcacttcatgttgtctgtaaagatgttctatggcaacagtgatgacattggtgtgttcctcagcaagcggataaaagtcatctccaaaccttccaaaaagaagcagtcattgaaaaatgctgacttatgcattgcctcaggaacaaaggtggctctgtttaatcgactacgatcccagacagttagtaccagatacttgcatgtagaaggaggtaattttcatgccagttcacagcagtggggagccttttttattcatctcttggatgatgatgaatcagaaggagaagaattcacagtccgagatggctacatccattatggacaaacagtcaaacttgtgtgctcagttactggcatggcactcccaagattgataattaggaaagttgataagcagaccgcattattggatgcagatgatcctgtgtcacaactccataaatgtgcattttaccttaaggatacagaaagaatgtatttgtgcctttctcaagaaagaataattcaatttcaggccactccatgtccaaaagaaccaaataaagagatgataaatgatggcgcttcctggacaatcattagcacagataaggcagagtatacattttatgagggaatgggccctgtccttgccccagtcactcctgtgcctgtggtagagagccttcagttgaatggcggtggggacgtagcaatgcttgaacttacaggacagaatttcactccaaatttacgagtgtggtttggggatgtagaagctgaaactatgtacaggtgtggagagagtatgctctgtgtcgtcccagacatttctgcattccgagaaggttggagatgggtccggcaaccagtccaggttccagtaactttggtccgaaatgatggaatcatttattccaccagccttacctttacctacacaccagaaccagggccgcggccacattgcagtgcagcaggagcaatccttcgagccaattcaagccaggtgccccctaacgaatcaaacacaaacagcgagggaagttacacaaacgccagcacaaattcaaccagtgtcacatcatctacagccacagtggtatcctaactaccgtctttttgctaggacttaaactgacttgagtgtggcaaaaagttaacaaaaaaggagaaaaaatgaacaatcgtttgtggtttcttgggaaaacttttcataccaggtgatactattcaaaaaccccgttgtctccctgcaagtgctgatttgaaatgcagaagccacagtaaaaaaaaaaaaaaaaaaaaaaaaaaagaaaaaaaaatcaaaatgtataaatattggaaatcaagtttttcagctgttttgttggttggttggttggtttttgtttggttttgtttaaatgggcaagaagtaaataatgtggctggaatacaagttgaacaaactagaagacacaaatctaacatagtttttatggaccaaggaacttgtatattgtataagctttagtaaaaggtacattttcaccatacctttttttatatcacggtattatagtacaccttgttaccaaataggttgttctcttccccacccacctttgagcttttgctctaaaatacattcaggttccaagcctgaccatccttgtttaatctatcatactcttccaggttttttttttttggtctaaggctggaacttttttcttttttttcagctgaagtcttatgacttttcatgagtcaaaatt

SEQ ID NO: 2618 - DNA, 2135 bp, Homo Sapiens
  NM_005356
aagtcagggtgggacgtgggcgcggggagacaggtggtggctacgacggcgaagggagctgagactgtccaggcagccaggttaggccaggaggaccatgtgaatggggccagagggctcccgggctgggcagggaccatgggctgtggctgcagctcacacccggaagatgactggatggaaaacatcgatgtgtgtgagaactgccattatcccatagtcccactggatggcaagggcacgctgctcatccgaaatggctctgaggtgcgggacccactggttacctacgaaggctccaatccgccggcttccccactgcaagacaacctggttatcgctctgcacagctatgagccctctcacgacggagatctgggctttgagaagggggaacagctccgcatcctggagcagagcggcgagtggtggaaggcgcagtccctgaccacgggccaggaaggcttcatccccttcaattttgtggccaaagcgaacagcctggagcccgaaccctggttcttcaagaacctgagccgcaaggacgcggagcggcagctcctggcgcccgggaacactcacggctccttcctcatccgggagagcgagagcaccgcgggatcgttttcactgtcggtccgggacttcgaccagaaccagggagaggtggtgaaacattacaagatccgtaatctggacaacggtggcttctacatctcccctcgaatcacttttcccggcctgcatgaactggtccgccattacaccaatgcttcagatgggctgtgcacacggttgagccgcccctgccagacccagaagccccagaagccgtggtgggaggacgagtgggaggttcccagggagacgctgaagctggtggagcggctgggggctggacagttcggggaggtgtggatggggtactacaacgggcacacgaaggtggcggtgaagagcctgaagcagggcagcatgtccccggacgccttcctggccgaggccaacctcatgaagcagctgcaacaccagcggctggttcggctctacgctgtggtcacccaggagcccatctacatcatcactgaatacatggagaatgggagtctagtggattttctcaagaccccttcaggcatcaagttgaccatcaacaaactcctggacatggcagcccaaattgcagaaggcatggcattcattgaagagcggaattatattcatcgtgaccttcgggctgccaacattctggtgtctgacaccctgagctgcaagattgcagactttggcctagcacgcctcattgaggacaacgagtacacagccagggagggggccaagtttcccattaagtggacagcgccagaagccattaactacgggacattcaccatcaagtcagatgtgtggtcttttgggatcctgctgacggaaattgtcacccacggccgcatcccttacccagggatgaccaacccggaggtgattcagaacctggagcgaggctaccgcatggtgcgccctgacaactgtccagaggagctgtaccaactcatgaggctgtgctggaaggagcgcccagaggaccggcccacctttgactacctgcgcagtgtgctggaggacttcttcacggccacagagggccagtaccagcctcagccttgagaggccttgagaggccctggggttctccccctttctctccagcctgacttggggagatggagttcttgtgccatagtcacatggcctatgcacatatggactctgcacatgaatcccacccacatgtgacacatatgcaccttgtgtctgtacacgtgtcctgtagttgcgtggactctgcacatgtcttgtacatgtgtagcctgtgcatgtatgtcttggacactgtacaaggtacccctttctggctctcccatttcctgagaccacagagagaggggagaagcctgggattgacagaagcttctgcccacctacttttctttcctcagatcatccagaagttcctcaagggccaggactttatctaatacctctgtgtgctcctccttggtgcctggcctggcacacatcaggagttcaataaatgtctgttgatgactgttgtaaaaaaaaaaaaaaaaaaa

SEQ ID NO: 2619 - DNA, 2656 bp, Homo Sapiens
  NM_005360
gaggctttaaaatcttttttcatcttctagctgtagctcgggctgcttgtcggcttggcctccccctcccccctttgctctctgcctcgtctttccccaggacttcgctattttgcttttttaaaaaaaggcaagaaagaactaaactcccccctccctctcctccagtcgggctgcacctctgccttgcactttgcacagaggtagagagcgcgcgagggagagagaggaaagaaaaaaaataataaagagagccaagcagaagaggaggcgagaagcatgaagtgttaactcccccgtgccaaggcccgcgccgcccggacagacgcccgccgcgcctccagccccgagcggacgccgcgcgcgccctgcctgcagcccgggccggcgaggcgagcccttccttatgcaaagcgcgcagcggagcggcgagcgggggacgccgcgcaccgggccgggctcctccagcttcgccgccgcagccaccaccgccgccaccgcagctcgcggaggatcttcccgagcctgaagccgccggctcggcgcgcaaggaggcgagcgagcaaggaggggccggggcgagcgagggagcacattggcgtgagcaggggggagggagggcgggcgcggggggcgcgggcagggcgggggggtgtgtgtgtgagcgcgctcggaggtttcgggccagccaccgccgcgcaagctagaagcgccccagcccggcaagctggctcacccgctggccacccagcacagcccgctggcccctctcctgcagcccatctggcggagcggcggcggcggcggcggcggcggcaggagaatggcatcagaactggcaatgagcaactccgacctgcccaccagtcccctggccatggaatatgttaatgacttcgatctgatgaagtttgaagtgaaaaaggaaccggtggagaccgaccgcatcatcagccagtgcggccgtctcatcgccgggggctcgctgtcctccacccccatgagcacgccgtgcagctcggtgcccccttcccccagcttctcggcgcccagcccgggctcgggcagcgagcagaaggcgcacctggaagactactactggatgaccggctacccgcagcagctgaaccccgaggcgctgggcttcagccccgaggacgcggtcgaggcgctcatcagcaacagccaccagctccagggcggcttcgatggctacgcgcgcggggcgcagcagctggccgcggcggccggggccggtgccggcgcctccttgggcggcagcggcgaggagatgggccccgccgccgccgtggtgtccgccgtgatcgccgcggccgccgcgcagagcggcgcgggcccgcactaccaccaccaccaccaccacgccgccggccaccaccaccacccgacggccggcgcgcccggcgccgcgggcagcgcggccgcctcggccggtggcgctgggggcgcgggcggcggtggcccggccagcgctgggggcggcggcggcggcggcggcggcggaggcggcgggggcgcggcgggggcggggggcgccctgcacccgcaccacgccgccggcggcctgcacttcgacgaccgcttctccgacgagcagctggtgaccatgtctgtgcgcgagctgaaccggcagctgcgcggggtcagcaaggaggaggtgatccggctgaagcagaagaggcggaccctgaaaaaccgcggctatgcccagtcctgccgcttcaagagggtgcagcagagacacgtcctggagtcggagaagaaccagctgctgcagcaagtcgaccacctcaagcaggagatctccaggctggtgcgcgagagggacgcgtacaaggagaaatacgagaagttggtgagcagcggcttccgagaaaacggctcgagcagcgacaacccgtcctctcccgagtttttcataactgagcccactcgcaagttggagccatcagtgggatacgccacattttggaagccccagcatcgtgtacttaccagtgtgttcacaaaatgaaatttgtgtgagagctgtacattaaaaaaaatcatcattattattattatttgcagtcatggagaaccacctacccctgacttctgtttagtctcctttttaaataaaaattactgtgttagagaagaaggctattaaatgtagtagttaactatgcctcttgtctgggggtttcatagagaccggtaggaaagcgcactcctgcttttcgatttatggtgtgtgcaagtaaacaggtgcattgctttcaacctgccatactagttttaaaaattcactgaaattacaaagatacatatatatgcatatatataatggaaagtttcccggaatgcaacaattagcattttaaaatcatatataggcatgcacattctaaatagtactttttcatgcttcattgtttctctggcagataattttactaagaagaaaaatagatattcgactccccttccctaaacaaatccacgggcagaggctccagcggagccgagccccctggttttctcgtaggccctagacggtgttgcatttatcagtgatgtcaaacgtgctcatttgtcagacatagctgtaaatgaaaacaatgtgtggcaaaatacaaagttaaaaaaaaaa

SEQ ID NO: 2620 - DNA, 1311 bp, Homo Sapiens
  NM_005371
ggcctgcgcctccacgtggatttggtagagaaaccccggactgggatcatggcagccgagactcggaacgtggccggagcagaggccccaccgccccagaagcgctactaccggcaacgtgctcactccaaccccatggcggaccacacgctgcgctaccctgtgaagccagaggagatggactggtctgagctatacccagagttcttcgctccactcactcaaaatcagagccacgatgacccaaaggataagaaagaaaagagagctcaggcccaagtggagtttgcagacataggctgtggctatggtggcctgttagtggaactgtcaccgctgttcccagacacacttattctgggtctggagatccgggtgaaggtctcagactatgtacaagaccggattcgggccctacgcgcagctcctgcaggtggcttccagaacatcgcctgtctccgtagcaatgccatgaagcaccttcctaacttcttctacaagggccagctgacaaagatgttcttcctcttccccgacccacatttcaagcggacaaagcacaagtggcgaatcatcagtcccaccctgctagcagaatatgcctacgtgctaagagttggggggctggtgtataccataaccgatgtgctggagctacacgactggatgtgcactcatttcgaagagcacccactgtttgagcgtgtgcctctggaggacctgagtgaagaccccgttgtgggacatctaggcacctcaactgaggaggggaagaaagttctacgtaatggagggaagaatttcccagccatcttccgaagaatacaagatcccgtcctccaggcagtgacctcccaaaccagcctgcctggtcactgactgcttactctaccttagctggacctcgtctcccagggattagagaaaagagcaggagtcctgggtcttcccagttgagactgctggagctgagacacagtactctcttaaagaaggtggggagctgcccagggcagaacccactggtgttcatgactacccctggctcctctcaccttgtccctccactgccaacagaaaacaaagcagctgactgagatggtcaaaggactttggaccataggggatctttggaaggctgtggggtcttgctcttccttagcactcctttctccttgtgagatctctcctcagctggaatgaggaatgtagtccatctaaactgcttgctaggctcaattaccacttctgtttgctttgtggatcctgggataacatgtatatgtgtacacatgcctattctgccaaaaa

SEQ ID NO: 2621 - DNA, 2044 bp, Homo Sapiens
  NM_005380
agacagcgcgcagcgcagcccagccgagcgtcgcggggccgccccccgccctgccggccgcctcgccgagcctcctggggcgcccgggcccgcgacccccgcacccagctccgcaggaccggcgggcgcgcgcgggctctggaggccacgggcatgatgcttcgggtcctggtgggggctgtcctccctgccatgctactggctgccccaccacccatcaacaagctggcactgttcccagataagagtgcctggtgcgaagccaagaacatcacccagatcgtgggccacagcggctgtgaggccaagtccatccagaacagggcgtgcctaggacagtgcttcagctacagcgtccccaacaccttcccacagtccacagagtccctggttcactgtgactcctgcatgccagcccagtccatgtgggagattgtgacgctggagtgcccgggccacgaggaggtgcccagggtggacaagctggtggagaagatcctgcactgtagctgccaggcctgcggcaaggagcctagtcacgaggggctgagcgtctatgtgcagggcgaggacgggccgggatcccagcccggcacccaccctcacccccatccccacccccatcctggcgggcagacccctgagcccgaggacccccctggggccccccacacagaggaagagggggctgaggactgaggcccccccaactcttcctcccctctcatccccctgtggaatgttgggtctcactctctggggaagtcaggggagaagctgaagcccccctttggcactggatggacttggcttcagactcggacttgaatgctgcccggttgccatggagatctgaaggggcggggttagagccaagctgcacaatttaatatattcaagagtggggggaggaagcagaggtcttcagggctctttttttggggggggtggtctcttcctgtctggcttctagagatgtgcctgtgggagggggaggaagttggctgagccattgagtgctgggggaggccatccaagatggcatgaatcgggctaaggtccctgggggtgcagatggtactgctgaggtcccgggcttagtgtgagcatcttgccagcctcaggcttgagggagggctgggctagaaagaccactggcagaaacaggaggctccggcccacaggtttccccaaggcctctcaccccacttcccatctccagggaagcgtcgccccagtggcactgaagtggccctccctcagcggaggggtttgggagtcaggcctgggcaggaccctgctgactcgtggcgcgggagctgggagccaggctctccgggcctttctctggcttccttggcttgcctggtgggggaaggggaggaggggaagaaggaaagggaagagtcttccaaggccagaaggagggggacaaccccccaagaccatccctgaagacgagcatccccctcctctccctgttagaaatgttagtgccccgcactgtgccccaagttctaggccccccagaaagctgccagagccggccgccttctcccctctcccagggatgctctttgtaaatatcggatgggtgtgggagtgaggggttacctccctcgccccaaggttccagaggccctaggcgggatgggctcgctgaacctcgaggaactccaggacgaggaggacatgggacttgcgtggacagtcagggttcacttgggctctctctagctccccaattctgcctgcctcctccctcccagctgcactttaaccctagaaggtggggacctggggggagggacagggcaggcgggcccatgaagaaagcccctcgttgcccagcactgtctgcgtctgctcttctgtgcccagggtggctgccagcccactgcctcctgcctggggtggcctggccctcctggctgttgcgacgcgggcttctggagcttgtcaccattggacagtctccctgatggaccctcagtcttctcatgaataaattccttcaacgcctgtgaaaaaaaaaaaaaaaaaa

SEQ ID NO: 2622 - DNA, 2732 bp, Homo Sapiens
  NM_005381
ctttcgcctcagtctcgagctctcgctggccttcgggtgtacgtgctccgggatcttcagcacccgcggccgccatcgccgtcgcttggcttcttctggactcatctgcgccacttgtccgcttcacactccgccgccatcatggtgaagctcgcgaaggcaggtaaaaatcaaggtgaccccaagaaaatggctcctcctccaaaggaggtagaagaagatagtgaagatgaggaaatgtcagaagatgaagaagatgatagcagtggagaagaggtcgtcatacctcagaagaaaggcaagaaggctgctgcaacctcagcaaagaaggtggtcgtttccccaacaaaaaaggttgcagttgccacaccagccaagaaagcagctgtcactccaggcaaaaaggcagcagcaacacctgccaagaagacagttacaccagccaaagcagttaccacacctggcaagaagggagccacaccaggcaaagcattggtagcaactcctggtaagaagggtgctgccatcccagccaagggggcaaagaatggcaagaatgccaagaaggaagacagtgatgaagaggaggatgatgacagtgaggaggatgaggaggatgacgaggacgaggatgaggatgaagatgaaattgaaccagcagcgatgaaagcagcagctgctgcccctgcctcagaggatgaggacgatgaggatgacgaagatgatgaggatgacgatgacgatgaggaagatgactctgaagaagaagctatggagactacaccagccaaaggaaagaaagctgcaaaagttgttcctgtgaaagccaagaacgtggctgaggatgaagatgaagaagaggatgatgaggacgaggatgacgacgacgacgaagatgatgaagatgatgatgatgaagatgatgaggaggaggaagaagaggaggaggaagagcctgtcaaagaagcacctggaaaacgaaagaaggaaatggccaaacagaaagcagctcctgaagccaagaaacagaaagtggaaggcacagaaccgactacggctttcaatctctttgttggaaacctaaactttaacaaatctgctcctgaattaaaaactggtatcagcgatgtttttgctaaaaatgatcttgctgttgtggatgtcagaattggtatgactaggaaatttggttatgtggattttgaatctgctgaagacctggagaaagcgttggaactcactggtttgaaagtctttggcaatgaaattaaactagagaaaccaaaaggaaaagacagtaagaaagagcgagatgcgagaacacttttggctaaaaatctcccttacaaagtcactcaggatgaattgaaagaagtgtttgaagatgctgcggagatcagattagtcagcaaggatgggaaaagtaaagggattgcttatattgaatttaagacagaagctgatgcagagaaaacctttgaagaaaagcagggaacagagatcgatgggcgatctatttccctgtactatactggagagaaaggtcaaaatcaagactatagaggtggaaagaatagcacttggagtggtgaatcaaaaactctggttttaagcaacctctcctacagtgcaacagaagaaactcttcaggaagtatttgagaaagcaacttttatcaaagtaccccagaaccaaaatggcaaatctaaagggtatgcatttatagagtttgcttcattcgaagacgctaaagaagctttaaattcctgtaataaaagggaaattgagggcagagcaatcaggctggagttgcaaggacccaggggatcacctaatgccagaagccagccatccaaaactctgtttgtcaaaggcctgtctgaggataccactgaagagacattaaaggagtcatttgacggctccgttcgggcaaggatagttactgaccgggaaactgggtcctccaaagggtttggttttgtagacttcaacagtgaggaggatgccaaagctgccaaggaggccatggaagacggtgaaattgatggaaataaagttaccttggactgggccaaacctaagggtgaaggtggcttcgggggtcgtggtggaggcagaggcggctttggaggacgaggtggtggtagaggaggccgaggaggatttggtggcagaggccggggaggctttggagggcgaggaggcttccgaggaggcagaggaggaggaggtgaccacaagccacaaggaaagaagacgaagtttgaatagcttctgtccctctgctttcccttttccatttgaaagaaaggactctggggtttttactgttacctgatcaatgacagagccttctgaggacattccaagacagtatacagtcctgtggtctccttggaaatccgtctagttaacatttcaagggcaataccgtgttggttttgactggatattcatataaactttttaaagagttgagtgatagagctaacccttatctgtaagttttgaatttatattgtttcatcccatgtacaaaaccattttttcctacaaatagtttgggttttgttgttgtttcttttttttgttttgtttttgttttttttttttttgcgttcgtggggttgtaaaagaaaagaaagcagaatgttttatcatggtttttgcttcagcggctttaggacaaattaaaagtcaactctggtgccagaaaaaaaaaaaaaaaa

SEQ ID NO: 2623 - DNA, 2104 bp, Homo Sapiens
  NM_005384
acgtagcgcggcgctcggaactgacctactaacacacatctctccgcgcggccacggcgcccgcggacccggcgcgcccgcccgcctcccgcgccgcgccctcgccgccgcccgcctcccgccgcggccccggaggcccggcccggcccgagccccgagcgccggcggcccgactcccggccgcccctttctttctcctcgccggcccgagagcaggaacacgataacgaaggaggcccaacttcattcaataaggagcctgacggatttatcccagacggtagaacaaaaggaagaatattgatggattttaaaccagagtttttaaagagcttgagaatacggggaaattaatttgttctcctacacacatagatagggtaaggttgtttctgatgcagctgagaaaaatgcagaccgtcaaaaaggagcaggcgtctcttgatgccagtagcaatgtggacaagatgatggtccttaattctgctttaacggaagtgtcagaagactccacaacaggtgaggagctgcttctcagtgaaggaagtgtggggaagaacaaatcttctgcatgtcggaggaaacgggaattcattcctgatgaaaagaaagatgctatgtattgggaaaaaaggcggaaaaataatgaagctgccaaaagatctcgtgagaagcgtcgactgaatgacctggttttagagaacaaactaattgcactgggagaagaaaacgccactttaaaagctgagctgctttcactaaaattaaagtttggtttaattagctccacagcatatgctcaagagattcagaaactcagtaattctacagctgtgtactttcaagattaccagacttccaaatccaatgtgagttcatttgtggacgagcacgaaccctcgatggtgtcaagtagttgtatttctgtcattaaacactctccacaaagctcgctgtccgatgtttcagaagtgtcctcagtagaacacacgcaggagagctctgtgcagggaagctgcagaagtcctgaaaacaagttccagattatcaagcaagagccgatggaattagagagctacacaagggagccaagagatgaccgaggctcttacacagcgtccatctatcaaaactatatggggaattctttctctgggtactcacactctcccccactactgcaagtcaaccgatcctccagcaactccccgagaacgtcggaaactgatgatggtgtggtaggaaagtcatctgatggagaagacgagcaacaggtccccaagggccccatccattctccagttgaactcaagcatgtgcatgcaactgtggttaaagttccagaagtgaattcctctgccttgccacacaagctccggatcaaagccaaagccatgcagatcaaagtagaagcctttgataatgaatttgaggccacgcaaaaactttcctcacctattgacatgacatctaaaagacatttcgaactcgaaaagcatagtgccccaagtatggtacattcttctcttactcctttctcagtgcaagtgactaacattcaagattggtctctcaaatcggagcactggcatcaaaaagaactgagtggcaaaactcagaatagtttcaaaactggagttgttgaaatgaaagacagtggctacaaagtttctgacccagagaacttgtatttgaagcaggggatagcaaacttatctgcagaggttgtctcactcaagagacttatagccacacaaccaatctctgcttcagactctgggtaaattactactgagtaagagctgggcatttagaaagatgtcatttgcaatagagcagtccattttgtattatgctgaattttcactggacctgtgatgtcatttcactgtgatgtgcacatgttgtctgtttggtgtctttttgtgcacagattatgatgaagattagattgtgttatcactctgcctgtgtatagtcagatagtccatgcgaaggctgtatatattgaacattatttttgttgttctattataaagtgtgtaagttaccagtttcaataaaggattggtgacaaacacagaaaaaaaaaaaaaaaaaaaaa

SEQ ID NO: 2624 - DNA, 7312 bp, Homo Sapiens
  NM_005385
gtggcattgggaggcccggcctgggggaggagacggcgttccgttagcggcgttggggtttggctgcagtggcagtgctttctcttctgctcacggggacccgctcaggctggaggccagccagctcttgccgccacctcggtcgcgatgggggcgcaggaccggccgcagtgccacttcgacatcgagatcaaccgggagccggttggtcgcattatgtttcagctcttctcagacatatgtccaaaaacatgcaaaaacttcctttgcttgtgctcaggagagaaaggccttgggaaaacaactgggaagaagttatgttataaaggttctacgttccatcgtgtggttaaaaactttatgattcagggtggggacttcagtgaaggtaatggaaaaggtggagaatcaatttatggtggatattttaaagatgaaaactttattctcaaacatgacagagcgttccttttatcaatggcaaatcgagggaaacataccaatggttcccagtttttcattaccacaaagcctgctccacacctggatggggtgcatgtagtctttggactggttatttctggttttgaagtaatcgaacaaattgaaaatctgaagaccgatgctgcaagcagaccatatgcagatgtgcgagttattgactgtggagtacttgccacaaaatcaataaaagatgtttttgagaaaaaaaggaagaaaccaactcattcagaaggctcggattcctcttccaattcctcctcttcttcagaatcatcttcagaaagtgaacttgaacatgagagaagcagaaggaggaaacataagaggaggccaaaagttaaacgttctaaaaagaggcgaaaggaagcaagcagttcagaagagccaaggaataaacatgcaatgaacccaaaaggtcactctgagaggagtgataccaatgaaaaaaggtcagttgattccagtgctaaaagggaaaaacctgtggtccgcccagaagagattcctccagtgcctgagaaccgatttttactgagaagagatatgcctgttgttactgcagaacctgaaccgaagattcctgatgttgcacccattgtaagtgatcagaaaccatctgtatcaaagtctggacggaagattaaaggaaggggcacaattcgctatcacacacctccaagatcaagatcctgttctgagtcagatgatgatgacagcagtgaaactcctcctcactggaaagaggaaatgcagagattaagagcatatagaccacctagtggagaaaaatggagtaaaggagataagttaagtgacccctgttcaagccgatgggatgaaagaagcttgtctcagagatccagatcatggtcctataatggatattattcagaccttagtacagcaagacactctggccaccataaaaaacgcagaaaagaaaaaaaggttaagcataaaaagaaagggaaaaagcagaaacactgcagaagacacaaacaaacaaagaagagaaggattcttataccgtctgacatagaatcctcaaaatcttccactcgaagaatgaaatcctcttgtgatagagaaaggagttctcgttcttcctcattgtcatctcatcactcatcaaagagagactggtctaaatctgataaggatgtccagagctctttaacccattccagcagagactcatacagatcaaaatctcactcacagtcttattctagaggaagctcaagatcaaggactgcgtcaaagtcctcatcacattctcgaagtagatcaaagtccagatctagttccaagtctgggcaccgaaagagagcatcaaaatcaccaagaaaaacagcttctcagttaagtgaaaataaaccagttaaaacagaacctttaagagcaaccatggcacaaaatgaaaatgtagtagtacaaccagttgtagcagaaaatattcctgtaataccactgagtgacagtccccccccttcaagatggaagcctggacagaaaccttggaagccctcttatgagcgaattcaggaaatgaaagctaaaacaacccatttgctacccatccaaagcacttacagtttagcaaatattaaagagactggtagctcatcatcctaccataaaagagaaaaaaattcggaaagtgatcagagcacttattcaaaatacagtgatagaagttcagaaagctcaccaaggtcaaggagcagatcttctaggagtagatcttattccagatcatatacaagatcacgtagtctagctagttcacattcaaggtctaggtctccatcatctagatctcattcacgaaataaatacagtgatcattcacagtgtagtagatcatcttcatatacttctattagcagtgatgatggaaggcgagctaagaggagacttagatccagtgggaaaaaaaatagcgtttcacataaaaagcatagcagcagctctgaaaagacacttcacagtaaatatgtcaaaggtagagacaggtcttcatgtgtgagaaagtatagcgagagcagatcatctttagattattcttcagacagtgagcagtcaagtgttcaggccacacagtcagcccaggaaaaagagaagcagggccaaatggaaagaacacataataaacaagaaaaaaacagaggtgaagaaaaatccaagtctgaacgggaatgccctcattcaaaaaaaagaactttgaaagagaatctttctgatcaccttagaaatggcagtaagcccaaaaggaagaattatgctggtagtaaatgggactctgagtcaaattcagaacgagatgtcactaaaaacagtaaaaatgactcccatccatcctctgacaaggaagaaggtgaggccacatccgattctgaatcagaggttagtgaaattcacatcaaagtcaaacccacaaccaagtcgtccacaaatacttcactgcctgatgataatggtgcttggaaatcaagcaaacagcgcacatcaacttctgactctgaggggtcctgttccaattcggaaaacaataggggaaagccacaaaagcacaaacatgggtcaaaggaaaatcttaaaagagaacacaccaaaaaagtgaaagagaaattgaaagggaaaaaagacaaaaagcataaggctccaaaacgaaagcaagcatttcactggcagcctccactagaatttggtgaagaggaggaggaggagattgatgacaagcaagttactcaggaatcaaaagagaaaaaagtttctgaaaacaatgaaaccataaaagataatattctaaaaactgagaaatccagtgaagaggacctttcaggtaaacatgatacagtgactgtttcatcagatcttgatcagtttactaaagatgatagtaaactcagtatttctcccacagctttaaatactgaggaaaatgtggcctgtttacaaaacattcagcacgttgaagaaagtgttcccaatggagtggaagatgtgcttcaaacagatgacaacatggagatctgcactcctgataggagttccccagcaaaagtagaggagacttcccctctaggaaatgcacggcttgataccccagatataaacattgttttgaagcaggatatggcaacggaacatcctcaagcagaggtagtaaaacaggaaagcagcatgtccgaaagtaaagtgttgggtgaagtggggaaacaggacagcagctctgctagcttggctagtgctggagaaagtaccgggaagaaggaggtggctgagaagagccagatcaacctcattgataagaaatggaagcccctgcaaggtgtggggaacctggcagcacctaatgctgccacatccagtgctgtggaagttaaggtgttgaccactgtgcctgaaatgaaaccacaaggcttgagaatagaaattaaaagcaaaaataaagttcggcctgggtctctctttgatgaagtaagaaagacagcacgcttaaaccgtagaccaagaaatcaggagagttcaagtgatgagcagacgcctagtcgggatgatgatagccagtccaggagtccaagtagatctcgaagtaaatctgaaaccaaatcaagacacagaacaaggtctgtctcctatagtcactcaagaagtcgatcgagaagttccacatcatcttatcgatcaagaagctactctagaagtcggagcagaggatggtacagcagaggccgaaccagaagccggagcagttcctaccggagttacaaaagtcacaggacgtccagcaggagcagatccaggagcagctcatatgatccccacagtcgatccaggtcctacacctacgatagctactatagcaggagtcggagtcgaagtagaagccagagaagtgacagttaccaccgaggcagaagttataatcggcggtccaggagttgtagatcttatggctctgacagtgaaagtgaccgaagttactctcatcaccggagccccagtgagagcagcagatacagttgaaaacgtccggatacaaattatatcttatttgtaaatatctggcaacttagcttaagaaatgtaatgacagtctgttgttctatttcaatatcagaggtgaatttcaaaaatagacacttcttaattgttactggttcatttacatgtggggagaagaatttaaaatacagatatgtctcctaaaaatatttttatgccacattttacagtagccaactatggaaatgaatttcattttcttgaatcaagaaatcgtgaaatttatctatgtataatttgcaatattattttaagtctatttcactctatcttacgtatcccttagaatacagattctttttgcctgtttttccagttttagcatatatgctgccaagcatagaactgtgaaggagaactgttaaaggcggccaaatatttatatactgattacatagagtcttgtacatatgtgctctaaaaacaaaccacccagaattgatactgttggtaaccaggagtataaggcagtggctctggggttcttaattcattcctaacttctttgatacttcacaggattaggaaagtggtcatcatacatcccacacagtctgtattacttcaggcttgtgggcaaggttaggaagaatcaatcagccttaactataaatacctgcactgtctctgaggacttactattttatgttctttttaatcaataccgatcagaagtttaggttataaaaacaattctacttcatgctttggtgcttggtaatttttggtgcgtctttaagcattactcttatatatcatatattaaaataccataaaaatgaaattcagacaaaatcactggcaccaaaaatggtttattctgagctgtcttcactttgactatttggggggcttctctcaagtacagatgtgggttggggtcccctggagcaggcaggattggcagtaagagatattggccactcaagtctactgtgtgtgtgtgcctctggaagagtgaagaatggacttcaaaagtaacatcaaaaatctaactgccaccatcctggagacattttgcagggctttcctttcaagtctttcaagtacaggatattaccacaacagcagctgaactgttgtaaccagcatgtttttcctatttccactgtgacctgcagctgactcaaagccttgcgtgacctgacccaggtgcaagagacaggggaagagggatagagggtatagcataaattacatattttcatggctttgggtggttcctccaaaaataattggacctgtaaaaactagtgtgtgtgtgtgtgtgtgtgtgtgtgtgtgtgtggtttttttttttaatctttactttgaatttgttccccaagtgtacttaatcaccttagtgccagtttaatccagttatgcagaagaaattcatattggttgcctgatgtagagctcagcaccaccctaccacaggccttgtctggtgtatttgggaagtggaaaagagccctcagttggagggagctgacaacccttggtggagggagggtgcccttgaatgtattaaaactatcacccaaagaaggtatgaaaacagggtaaggtggtcagttgtttgccaggtcaatagacagaaagtacattagaaaacaggacttaggccaaacaaacaatactggatactgaatacaaaacagtatgatttatattaaaggtttccaaaggttgcctgcaaaggagaatattactactagtcagcaggaaaaaaatgcattcagaacccaagcagaaactgccaaatgtaattaggttaagaaaagttacccttgggcagtgtattagttttctattgctgtgtgacaaattaccccaaatttagcagtttaaaaaacaatacccatagcagttctgtagctcatgagtctggcacagtgtggctggattctctgctcagggtcttaaaggctgaaataagggttggcaggacaacattccttcatggaggctctggggaagaatctgcttctaagttcattcaggttgttggcggaattcagttctttgctggctctcagctggaggcccctctctcacctcaaggctgcctgcattccttcttatgtggtcccctccagcttcaaaccagccttcctgctctttctcatgcttcatatctctctcccgtcctcctgttttaggggcatatgattagctcaagcccacagatatattttaaggttgattgtgcgatagaacataattgcaggagtactgtctcatctcatcatattcacgggttctggagattagctcattgaaagtgggaggggcattttcaaattctgcctaccacaggcaataactgcccatctcagctgtaggtggaatttttacccagaaaagataggccctagaagcctcatttcttttctccatggaaaaggacagccctctgctgcagcgttcaacttgtgtgtttactgacagagtgaactacagaaatagcttttcttcctaaaggggattgttctacattttgaagttattttttaataaaattgaattatgttgtgtattgtgcttcttaataggaaatgcattattggactgtttttgtaacatcctgtttattgcaaatagctagtatcgttcaaaaactgtataaaatacttttgtacatattagcaatgtctaatttgtatacacttcagttaaatttccctaaaacttgaaaggggaccttgtagaaattaaaatatatacttagtctaagtctgaaaaaaaaaaa

SEQ ID NO: 2625 - DNA, 3085 bp, Homo Sapiens
  NM_005388
attggacaatgcgcgtccgccacgacgcaggaaggccgcctcattggtccgcgctgtcgggcttcggcggcttttctctttagcgctcagggcgctgacccactgctcttcctcttaagaaagtgctccattccttccggcgcccggagctgctggcccaaagggatccggagcgagctagggcagacaccatgaccacccttgatgataagttgctgggggagaaactgcagtactactatagcagcagtgaggatgaggacagtgaccacgaggacaaggaccgaggcagatgtgccccagccagcagttctgtgcctgcagaggctgagctggcaggcgaaggcatctcagttaacacaggcccaaaaggtgtgatcaatgactggcgccgcttcaagcagttggagacagagcagagggaggagcagtgccgggagatggaaaggctgatcaagaagctgtcaatgacttgcaggtcccatctggatgaagaggaggagcaacagaaacagaaagacctccaggagaagatcagtgggaagatgactctgaaggagtttgccataatgaatgaggaccaagatgatgaagagtttctgcagcagtaccggaagcagcgaatggaagagatgcggcagcagcttcacaaggggccccaattcaagcaggtttttgagatctccagtggagaagggtttttagacatgattgataaagaacagaaaagcattgtcatcatggttcatatttatgaggatggcattccagggaccgaagccatgaatggttgcatgatctgccttgccgcagagtacccagctgtcaagttctgcaaggtgaagagctcagttattggcgccagcagtcagttcaccaggaatgcccttcctgccctgctgatctataaggggggtgaattgatcggcaattttgttcgtgttactgaccagctgggggatgatttctttgctgtggaccttgaagcttttctccaggaatttggattactcccagaaaaggaagtcttggtgctgacatctgtgcgtaactctgccacgtgtcacagtgaggatagcgacctggaaatagattgaactgatagtctagttgcatagatttctcattgtttgggttggaatacacgtcattgtttatttttgttcctttgtcttctggcttttcagctgttctttgtagtcccttttattatgcataaaataaagaaattcttagattaaatcagaatgctgaataaccttgtagctagcaataaggtgacttacagttgtataaacaggaagccaggcttttgaactgtttacttaagattctgtggtgtgacatctctgttattgtttccagtcaatatttacaaagcatcctaaagacagggtcttggaaattgtcttcagatgatcttagaggtctctgccaagtctgagagtataattctgtaggtattgtgttatttgcaacgtaaatagtgcattttcttaatcaaatgattgtaaattatatttacttgtaatcagttccatagctttagacggtggttagattttttttttccccaccagggtcttgtttaaaggggtgagccaccgcacccagtcctgaggggtggcctctgctgctggatttcatgtcttcctccagcatgactaagtctggaacagcaggaagggttgatgcttactgacctggtgatgttagaagacaagtagtttatggatttaaacattagagctggagtggggctggaaatctttgtaaaggaagttctttcagtaagatgcccctgcttgtctttgtctcttttttgtttaacaaggtaactttttgtttaacaaggtaactttttgtttaacctagattttttttaaaactttttttttttttcatattggaaaagtaattcatattcagtagaggaaaactgaccaaaacagaagcaaaaataagaaaattaaaataatctctaatcctactacctagaataaaacactattaatattttggtctgtttcctgccaaggtgttttctgtgtatacatggatattttgtttgtttttaaacaaaacgatgggatcattctgaacatactgttctatagtatggtcagctaataatatatcagacctttttttatattattaaatattctacaactttttaaaaatgtctattaatattccatcgtatagatgtgatataatttgcttgatggttgtctcttaaaaagaaagatagcaaatactttttttaaattacaaaagtgatagatgttcattgtagaaaatgtaataaacactgttaagacttaaaagccatataattccaccaaccaaaattaatcccttttgtcatatttctagtcatttttatagcctttttttctatgtatttataataattatcatttgcgtttttttcctttttttaactttaaaaatgtatattctagggtcaggggaaatgtaatctggaattaaatattagccttaaaattcacaattttgattttcctggcttttcaggaattgactaactgtaaaagagtcttgaaagtatttagtcaacaaacagagtgcattttttttttttttgactaagaaagctcgttgtagtagaaagggtggaatgtattgaaaattattagaagcagggaagtattgttagtctagcttatttcctttcagtcttttttcaatatttttataaacattgagtacttactgaatttagttctgtgctcttccttatttagtgttgtatcataaatactttgatgtttcaaacattctaaataaataattttcagtggcttcataatatttcatcatttggatatataataatttatttaaccagtctctttatttttatttatttattttgtttgttttctttgagatggagtctcgctctgtcacccaggctggagtacaatagcgtgatctcggctcactgcaacctccacctcctgggttcaagcagttctcctgcctcagcctcctgagtagctgggactacaggcacatgccatcacgcctggctaatttttgtatttttactagagac

SEQ ID NO: 2626 - DNA, 1751 bp, Homo Sapiens
  NM_005389
gcggcgtcacagagcgcatgcgtgccgcgggggatgccgggagcgcgcagtggcggcagcggcggcgacggcagtaacagcggcagctacagcggggacgcgagcggggcggtgacggtgtgggaggtggtctcactcttgggaaaactgctgggcaccgtcgtcgcgctgaaggtggttctgtacctgctccgagtgtgcttagcgatggcctggaaatccggcggcgccagccactcggagctaatccacaatctccgcaaaaatggaatcatcaagacagataaagtatttgaagtgatgctggctacagaccgctcccactatgcaaaatgtaacccatacatggattctccacaatcaataggtttccaagcaacaatcagtgctccacacatgcatgcatatgcgctagaacttctatttgatcagttgcatgaaggagctaaagctcttgatgtaggatctggaagtggaatccttactgcatgttttgcacgtatggttggatgtactggaaaagtcataggaattgatcacattaaagagctagtagatgactcagtaaataatgtcaggaaggacgatccaacacttctgtcttcagggagagtacagcttgttgtgggggatggaagaatgggatatgctgaagaagccccttatgatgccattcatgtgggagctgcagcccctgttgtaccccaggcgctaatagatcagttaaagcccggaggaagattgatattgcctgttggtcctgcaggcggaaaccaaatgttggagcagtatgacaagctacaagatggcagcatcaaaatgaagcctctgatgggggtgatatacgtgcctttaacagataaagaaaagcagtggtccaggtggaagtgattttatcttctgctctttcttcttccacacatgcaagggatgaattgtaaaagcaacatcagcttgaccagtataaaattacagtggattgctcatctcagtcctcaaagctttttgaaaaccaacaccatcacagcttgttttggactttgttacactgttattttcagcatgaaaatgtgtgtttttttagggtttctgattcttcaaagaggcacagagccaaattggtagaggaaggatgcaaagtataaatttgtgtaatattactttaacatgcccatattttacttggaaatattaaaagaaagggttctgtaaaatggaaaacttagtttgtgaattgattttgaggagtggtttttcttttcttggacacttaattctgttctgatattaatttatcagattgcttttgtgcattggataacaccaccattcacaagttaagattcttggtatttggatatctgttagatgctactaagaaaatagagatgagctttctttttaaagcttttgatgtggtgtcatagaatagcatgttgtagatacaatcagctgctttgttaccttaaaactaggcatttgtaaatattaaaccataagatggcaggtgatgtcctgtaaacactcagctgttcagattggacataactgacttagttcttcccttctctctctctcaaaattataggagacttgtagtttagtgtggttttctgtttctaatttgctgctgataatgtatatgaacttaacatgctgtgtaagctgtgtcctagttcttgaacagtttatgcagtgctgctttgccaaataaagttaaaagtaaaagaggcaaaaaaaaaaaaaaaaaa

SEQ ID NO: 2627 - DNA, 1803 bp, Homo Sapiens
  NM_005391
gtgcagcaaccgactccgcccagcgaggcggagcctagggaagccgcgggcggcccgccgctgtcctggagctgctgctgctgctgcggcggctgcaccggcggcgccgaggccgagatcgaggccggggtgcgcgcttcgcaaacgtgccctatccgtgcggcttggctgcgccagcccttgcggccacccgggcgtctaggcgggtctgtgcgccgcccgggcgaggatgcggctgttccggtggctgctgaagcagccggtgcccaagcagatcgagcgctactcgcgcttttcgccgtcgccgctctccatcaaacaattcctggacttcgggagagataatgcatgtgagaaaacttcatatatgtttctacgaaaggaacttcctgtgcggctggctaacacaatgagagaagttaatcttctgccggataatttacttaaccgcccttcagtgggattggttcagagttggtatatgcagagttttcttgaacttttagaatatgaaaataagagccctgaggatccacaggtcttggataactttctacaagttctgattaaagtcagaaatagacacaatgatgtggttcctacaatggcacaaggagtgattgaatacaaggagaagtttgggtttgatcctttcattagcactaacatccaatattttctggatcggttttataccaaccgcatctctttccgcatgcttattaatcagcacacacttctgtttgggggtgacactaatcctgttcatcctaaacacataggaagtatcgatcccacctgtaacgtggcggatgtggtgaaagatgcatatgaaacagccaagatgctgtgtgaacagtattacctggtagctccagagctggaagttgaagaattcaatgccaaagcgccagacaaacctattcaggtggtttatgtgccctcacatctgtttcatatgctatttgagttgttcaagaactcaatgagagcgacagttgaactctatgaagacagaaaagagggctaccctgctgttaaaaccctcgttactttgggtaaagaagacttatccattaagatcagtgacctaggtggtggtgtcccacttcgaaaaatagatcgtctttttaactacatgtattctactgctcctagacccagcctggagcctaccagagctgcccctttggctggatttggttatggtttgccaatttcccgtctgtatgctagatattttcaaggagatctgaaactgtattccatggaaggagtgggtactgatgctgtcatttatttgaaggctctttcaagtgagtcatttgagagacttccagtttttaataagtccgcatggcgccattacaagaccacgcctgaagccgatgattggagcaatcccagcagtgaacccagggatgcttcaaaatacaaagcaaaacagtaatataccaccttgatttccattacaaagtatctgatttgtctgaataaaggtgtcccactcactgttccaggaattcttgcagtgtagaggtattcacaacagcaagcagggatttggcctgccatcaattttatttaaaaagcaattaagtttgcagtttgtcctcataaacgttgtaggttgaaactgaaaaataagttaaaatgatcaatcaagataaaaggtgatctatccatccaatggaatattatttggccttaaaaaggaaggacattctgatatgtgctgcaacatgggtgaatcttgaagtcattatgctaagtgaaataaaccagacataaaaggacaaatac

SEQ ID NO: 2628 - DNA, 5431 bp, Homo Sapiens
  NM_005399
aggaggaatcgctggtcgccagcgaggggtgcggcttcaatttcaataactttattggtggcctgatctgcagaacagccatcacatcagtggcccttggaggagggagcgcatcgcccgaggtggtccccgacgagctgcagccatgggaaacaccaccagcgaccgggtgtccggggagcgccacggcgccaaggctgcacgctccgagggcgcaggcggccatgccccggggaaggagcacaagatcatggtggggagtacggacgaccccagcgtgttcagcctccctgactccaagctccctggggacaaagagtttgtatcatggcagcaggatttggaggactccgtaaagcccacacagcaggcccggcccactgttatccgctggtctgaaggaggcaaggaggtcttcatctctgggtccttcaacaattggagcaccaagattccactgattaagagccataatgactttgttgccatcctggacctccctgagggagagcaccaatacaagttctttgtggatggacagtgggttcatgatccatcagagcctgtggttaccagtcagcttggcacaattaacaatttgatccatgtcaagaaatctgattttgaggtgttcgatgctttaaagttagattctatggaaagttctgagacatcttgtagagacctttccagctcacccccagggccttatggtcaagaaatgtatgcgtttcgatctgaggaaagattcaaatccccacccatccttcctcctcatctacttcaagttattcttaacaaagacactaatatttcttgtgacccagccttactccctgagcccaaccatgttatgctgaaccatctctatgcattgtccattaaggacagtgtgatggtccttagcgcaacccatcgctacaagaagaagtatgttactactctgctatacaagcccatttgaagggatcccttcttgcctctaaggattcaggagaagcatctcccttgcatttctggactgaaccagtcttacctgagactggaaggctgatttgctttgaggctgatatgtgtgtttcagagcctctgagtaggatgctctgcttttgcatttgattgcagatgagagctttatgagttcacggaatttattttaagaaaaaaaaatatacatatgagaagaaggtaaatggaagcctcctagccccagctagaagtattgtttctgcctgtgggttttcaccaagacctgtttgggggcgctgcaggaataactatataggaagatttttcctaaaatgaaagaacagcaaactcttaggatccttgttgggtggagattctatcactgctaccttggctctccaaggaatgggcttgtgctagaccgctgccctacttaacagctgcctcattgcaagggcagtttttcttgcatgggttctctatattcccagagtatgtggcacaatctgtgttgtttatatgataccagatgccccacaagaacccttattcctctcatttcacattcttcctttaatagcctccttcagatcccatacctgacccctctctaacacaaaacttattgggtaagtgactttgaaaagttttgtggcacctgacccaccccagacactagggctatcagaaggtctcctttttagcccagcacaggcccaggccactttgtcgtgtttgttttaacttctaaagaaaatatgtttcagcattataagaaaggcagaatgcagaacacctacatttttgttttagtttggtgccaaggctcaggctgtattggcaaattcccgaaagttttcccactttgcctggccctgcttctgtcttttctttctcagtaaacagttctgaaggcaggagtggaacccgggagtattttcatgtctttcatccttgaaagatttttatgtgcctgcattttttttttaattaaaaaatgccttttcattggtcttaagagaccgcattggagaatttcaggcttttgataaatgcttcttcaaagagattttcttctctagtctagccttccacattcttagattaatatggccaaccctgtacacatcactacactaaacactgctctagataaactgctcaagttcatttaactcatttgatgcacctaaaggggttcctcattttaaagatttgttaggccaagaagcaagagagtattcctagtattcccaaccatgaaaagtatcattctttgcaccaaatgttaacaaaatcattttgttctcctgcctcttctttttaaaggtgtttgatgattaagtggggtcactgaattccatttgtggactgaaaagtattcaatccacttttggggttcagagataaaacattttttcccaagtagctggggctcttccattttgcagataagtcaaataatcaacactaaaggaggctaaactgttgatgaatgagagactccctgactgctcagatgaccctagccacactgaaagggcacctacaggtcagtttagctacctcctgtctttcccatgcaaagctgataacacagttgtctttggacttgtagacctcttggattccaggtgtgatggagtaaagtgtgggattgttgttttgctgggatgcaaataactaaatgctttggtggttaattgctaagagtaaatactactttagccatccaaggccaccttctgcagcaaaaggcttttgtggagaaccttttatgttcccaaccactttttgaatggtgtgccatttaaaaatccaggccagatcctattataaccaactctcaggatttacagccttcagttgtactagaattttgtttttatccaatactcattaaataagtgggccacttaggaagattcaaaatcttggttattacatgaagtttgttatatttcttgtcaacagtattgaaatgtaatatgtatgtgttcatgtatgaaaatttttactccacacaggtgtttcagtagagtggggcaggaaaagagatctcttcgatttctttcaggcctgaggcttttgtgaaatgcgtcagccccctgtgacagtaggttttgatgctagtgatcttcagatctttctctctggaaatgtgcagagagtgtcagtttcccaagttctgaggtaactctcagcccagatgtgaaatgggagcctaccagctggtatagaagggaatgggtaggaggcactgggtgctgactcattcagcactgtcccttttctatactgctgatacatcccatggttctgagaagccttatctcagtctatttggaagagagggaggaagagaaggaagtaacccaaagtactactcatttatccttgtatattgattagttaaagggataattaatttaatgctgaggagagtttgacagattttgaaaatgagtaaaggcaaaaaaaatttttttagcctttattttgcttttgggaattttacagagtcaaagtaggcagaataagaaaatagttcttcaggagggccgacctttaaagaacttcaacatagtttcggaattgtggggaagagaagagtgactgagctgagaagtaataatagaataaagggttgagtaacttagaactgaaaatgatctcttttaaaaagaaattaaatcagacaccacatggtggtgtccttggatctcactgtgcagaattagcagtgtataaccatcttctcttttcatcttgttccaattctctcctctttcctttccattctgctttaagctcatgtgtcaggcagactttaccagagtgtcagacattacctaaaacacatacgttagccatgctgctggtatggagaaattccacaccatgattattagcctcctttaagctgaatgggatttaaccattctaggcaacacccctgaagggcatacctaacctcaatagtgttggcttttaaaacgtatgtttgtatggtagagaaactttgtaaaagaagaatccaagagaagtttgtgaggatcctacaaacccaggcccactcactttgctctaattctttctagtatcttgtagatctaatgggtctgggataaaaactttgaaaagtgtcaatattccatgtatgctgctgaaatgaagttaagtttggaaagaagtgatacctctagactgggtttatattaatctgggatataaatgaagaagacatactaatagaactccttgcttttaattggggaaatagggctttaataattttgacctcaactaaaaatgatatgcaatagtctctgtgtgtgtttgaaatacattgtgttctcagagatttctacattctcacgttctagtgatttggggcatgggcttaatagcagatgtacagtgtattcctgcattattgtgattccccttaaagcccagttcttgctgtcttctaccaggggctgctgactccagttacccatggaatgcaggacctgggaggggtagccattagggtctttcaaaactctttggatctaagcatttgtctctccttaagtgccaatcacaattggatatggaaggactgtgatttctgcaatgaacccaaacttttagagtaaaaagccaaatttaaattataagaaagaagggaaaaaagagaaaaactcaagtctattacttgtagagtccaattcttagcaatggaatcgctctaggattctagtttgggctttgtctggatttgcttttctcagttgtgctttgaagtgaataagctttgttacaaattaattttttattagttccaatattagttggagttaacttgaattgattgtatgtagcacagcacttttgcagtaagattggtgtgaaatactaaacactatggattttgtaggtgtcaggttaaatggtcaagggatacctacattaagtcatatattaggtattgatgatcttacttcttttctgttcccctgtacaaaacacttacctaacccagcttgtggttttaggacagccaaagctcactgttgttggttagtcctaatcactacacgggtctcataaatgagacttgtttgaattttggtacattggagcatgttggttggtattacacggcagcatttcgaatgagtgcagctctgtgtctgtcagaaaggagagataagactactttgaagggaattaaatatgtgagtcctctttttaatggtgctttttgtaacctttaatgctgaggtacagagctgcttttcaatatttcataaaggagtggcagacaagagtggattttaaagctgttcttcaaacgtaatttgtcactggactctgacacacctggaaattatatgatatgatacatacagaaatgttgtgggttttttccataaaactttaataaaagtattatacagcaataaaaaaaaaa

SEQ ID NO: 2629 - DNA, 2818 bp, Homo Sapiens
  NM_005402
aagtgatctgtggcggctgctgcagagccgccaggaggagggtggatctccccagagcaaagcgtcggagtcctcctcctccttctcctcctcctcctcctcctcctccagccgcccaggctcccccgccacccgtcagactcctccttcgaccgctcccggcgcggggccttccaggcgacaaggaccgagtaccctccggccggagccacgcagccgcggcttccggagccctcggggcggcggactggctcgcggtgcagattcttcttaatcctttggtgaaaactgagacacaaaatggctgcaaataagcccaagggtcagaattctttggctttacacaaagtcatcatggtgggcagtggtggcgtgggcaagtcagctctgactctacagttcatgtacgatgagtttgtggaggactatgagcctaccaaagcagacagctatcggaagaaggtagtgctagatggggaggaagtccagatcgatatcttagatacagctgggcaggaggactacgctgcaattagagacaactacttccgaagtggggaggggttcctctgtgttttctctattacagaaatggaatcctttgcagctacagctgacttcagggagcagattttaagagtaaaagaagatgagaatgttccatttctactggttggtaacaaatcagatttagaagataaaagacaggtttctgtagaagaggcaaaaaacagagctgagcagtggaatgttaactacgtggaaacatctgctaaaacacgagctaatgttgacaaggtattttttgatttaatgagagaaattcgagcgagaaagatggaagacagcaaagaaaagaatggaaaaaagaagaggaaaagtttagccaagagaatcagagaaagatgctgcattttataatcaaagcccaaactcctttcttatcttgaccatactaataaatataatttataagcattgccattgaaggcttaattgactgaaattactttaacattttggaaattgttgtatatcactaaaagcatgaattggaactgcaatgaaagtcaaatttactttaaaaagaaattaatatggcttcaccaagaagcaaagttcaacttatttcataattgcctacatttatcatggtcctgaatgtagcgtgtaagcttgtgtttcttgggcagtctttcttgaaattgaagaggtgaaatgggggtggggagtgggaggaaaggtgacttcctctggtgtttattataaagcttaaattttatatcattttaaaatgtcttggtcttctactgccttgaaaaatgacaattgtgaacatgatagttaaactaccactttttttaaccattattatgcaaaatttagaagaaaagttattggcatggttgttgcatatagttaaactgagagtaattcatctgtgaatctgctttaattacctggtgagtaacttagaaaagtggtgtaaacttgtacatggaattttttgaatatgccttaatttagaaactgaaaaatatctggttatatcattctgggtgtgttcttactgacaccaggggtccgctgccccatgtgtcctggtgagaaaatatatgcctggcacagcttttgtatagaaaattcttgagaagtaactgtccgctagaagtctgtccaaatttaaaatgtgtgccatattctggttcttgaaaataagattccagagctctttgatcgcttttaataaactgcaagttcattttaaatgaagggccagcatatatacttgcaagataattttcagctgcaaggattcagcaccagttatgtttgaatgaaccctccttttctctgagattctggtccctggaaatccctttctgctagtggtgagcatgtaagtgttaagtttttaatctgggagcagggcataggaagaaaatgtcagtagtgctaatgcattttgcactagaacgcttcgggaaaatattcatgcttgccatctgttcatttctaaatttatattcataaagttacagtttgatacaggaattattaggagtaattcttttctgtttctgtttataatgaagaacactgtagctacattttcagaagttaacatcaagccatcaaacctgggtatagtgcagaaaacgtggcacacactgaccacacattaggctgtgtcaccattgtgtggtgtacctgctggaagaattctagcatgctacttggggacataatttcagtgggaaatatgccactgaccgattttttttttttcctctttgcagtggggctaggacagttgattcaacaaagtatttttttcttttttctcagtcctaatttgaacaggtcaaagatgtgttcaggcattccaggtaacaggtgtgtatgtaaagttaaaaataggctttttaggaactcactctttagatatttacatccagcttctcatgttaaatatttgtccttaaagggtttgagatgtacatctttcatttcgtatttctcataggctatgccatgtgcggaattcaagttaccaatgtaacactggccagcgggcccagcaatctccatgtgtacttattacagtcttatttaaccaggggtcctaaccactaacattgtgactttgctttgagacctttcctctcctgggtactgaggtgctatgaagccaactgacaaagatgcatcacgtgtcttaggctgatgccactacccgatttgtttatttgcaatttgagccatttaaagaccaataaacttccttttttaaaaaaaaaaaaaaaaaaaaaaaaaa

SEQ ID NO: 2630 - DNA, 4931 bp, Homo Sapiens
  NM_005407
gagctgcagaagcgtagggaagaagctgaagaaaaaaagggggcgtctcccctttaaagacttgcaaagattgagagagaaagagagagagtcaagaacagagaatcagagagagagagagagtctgtgtctctgggaaagaagaacatctctgcttcacagtgatttgcgctgggggagaggcatcaattggcttcggacccaagggggagacgagaccaggtcaccccggttaagaccaagtgagcgttgcccctccctctcccaactctctacccgggaatgtctcggcgaaagcagcggaaaccccaacagttaatctcggactgcgaaggtcccagcgcgtctgagaacggtgatgctagcgaggaggatcacccccaagtctgtgccaagtgctgcgcacaattcactgacccaactgaattcctcgcccaccagaacgcatgttctactgaccctcctgtaatggtgataattgggggccaggagaaccccaacaactcttcggcctcctctgaaccccggcctgagggtcacaataatcctcaggtcatggacacagagcatagcaaccccccagattctgggtcctccgtgcccacggatcccacctggggcccagagaggagaggagaggagtctccagggcatttcctggtcgctgccacaggtacagcggctgggggaggcgggggcctgatcttggccagtcccaagctgggagcaaccccattacctccagaatcgacccctgcaccccctcctcctccaccaccccctccgcccccaggggtaggcagtggccacttgaatatccccctgatcttggaagagctacgggtgctgcagcagcggcagatccatcagatgcagatgactgagcaaatctgcaggcaggtgctgttgcttggctccttaggccagacggtgggtgcccctgccagtccctcagagctacctgggacagggactgcctcttccaccaagcccctactacccctcttcagccccatcaagcctgtccaaaccagcaagacactggcatcttcctcctcctcctcctcttcctcttcaggggcagaaacgcccaagcaggccttcttccacctttaccacccactggggtcacagcatcctttctctgctggaggggttgggcgaagccacaaacccacccctgccccttccccagccttgccaggcagcacagatcagctgattgcctcgcctcatctggcattcccaagcaccacgggactactggcagcacagtgtcttggggcagcccgaggccttgaggccactgcctccccagggctcctgaagccaaagaatggaagtggtgagctgagctacggagaagtgatgggtcccttggagaagcctggtggaaggcacaaatgccgcttctgtgccaaagtatttggcagtgacagtgccctgcagatccaccttcgttcccacacgggtgagaggccctataagtgcaatgtctgtggaaaccgttttaccacccgtggcaacctcaaagtgcatttccaccggcatcgtgagaagtacccacatgtgcagatgaacccacacccagtaccagagcacctagactatgtcattaccagcagtggcttgccttatggtatgtccgtgccaccagagaaggccgaggaggaggcagccactccaggtggaggggttgagcgcaagcctctggtggcctccacaacagcactcagtgccacagagagcctgactctgctctccaccagtgcaggcacagccacggctccaggactccctgctttcaataagtttgtgctcatgaaagcagtggaacccaagaataaagctgatgaaaacacccccccagggagtgagggctcagccatcagtggagtggcagaaagtagcacggcaactcgcatgcaactaagtaagttggtgacttcactaccaagctgggcactgcttaccaaccacttcaagtccactggcagcttccccttcccctatgtgctagagcccttgggggcctcaccctctgagacatcaaagctgcagcaactggtagaaaagattgaccggcaaggagctgtggcggtgacctcagctgcctcaggagcccccaccacctctgcccctgcaccttcatcctcagcctcttctggacctaaccagtgtgtcatctgtctccgagtgcttagctgtcctcgggccctacgccttcattatggccaacatggaggtgagaggcccttcaaatgcaaagtgtgtggcagagccttctccaccaggggtaatctgcgtgcacatttcgtgggccacaaggccagtccagctgcccgggcacagaattcctgccccatctgccagaagaagttcaccaatgctgtcactctgcagcagcatgtccggatgcacctggggggccagatccccaacggtggtactgcactccctgaaggtggaggagctgctcaggagaatggctccgagcaatctacagtctccggggcagggagtttcccccagcagcagtcccagcagccatcaccggaagaggagttgtctgaggaggaggaagaggaggatgaggaagaagaggaagatgtgactgatgaagattccctggcagggagaggctcagagagtggaggtgagaaggcaatatcagtgagaggtgattcagaagaggcatctggggcagaggaggaggtggggacagtggcggcagcagccacagctgggaaggagatggacagtaatgagaaaactactcaacagtcttctttgccaccaccaccaccacctgacagcctggatcagcctcagccaatggagcagggaagcagtggtgttttaggaggcaaggaagaggggggcaaaccggagagaagctcaagtccggcatcagcactcaccccagaaggggaagccaccagcgtgaccttggtagaggagctgagcctgcaggaggcaatgagaaaggagccaggagagagcagcagcagaaaggcctgcgaagtgtgtggccaggcctttccctcccaggcagctctggaggagcatcagaagacccaccccaaggaggggccgctcttcacttgtgttttctgcaggcagggctttcttgagcgggctaccctcaagaagcatatgctcctggcacaccaccaggtacagccctttgccccccatggccctcagaatattgctgctctttctctagtccctggctgttcgccttccatcacctccacagggctctccccctttccccgaaaagatgaccccacgatcccatgagcctgtttttctgtacctgctgctctttgtcccacagagcagaaacagcttcacaaaaggacctcccagagttatgagccctgattttgtctttttctctaagttcttaacatgttatgtccctagtggcttttctgtagtccctgagcttggaaattactgtgcttacaaggggatggccccctaaggaatttttcttccctcctcattctttgtacctgaggaacatagattctctgcagctttctcaaggggaaccctctccagcttccctggtgtgacccttcttccccctcctctctcctctccctttccctttggtaggtgcacctgagcacctacatttggcattgcagcctagccaaaaagggctggcagctgtctctggagggcccagtgccactcctctggggtgacctttctgctcagctggtgggtatgggtcccctatctttctagaaccagtatgtggcattcctgtcaaatggcctgcccatgaagccctggaattccagctccacctccactaccactccaagcctggccccaccagtgctgtttggcctaggaactgtggctgggaaggtgcctccaacaatgggatccagggaagccaaggagaagacagcccccctcctatttcagcctcctgcacccaaggcagtgcctgagaagcccatcatagacaagaagtagcaaactgtacattccttcttcctccccctgctccagaaggtgccggtactgaagatgctccagtaattggtgacccaaccctaggaagtagggagaaatgaaggaagggcataggaaaattttcccagtaaatcccctgatggtcacattaaggtaaaggttttggctggtcagtgtgccaagacctctccagcttctcattcatgatgacctctcaaagttgggaaacaagctgatttcttgccaagaggtctcccaggagatatttgggaaatgtgaagttcgtatctttaaggagcatttttggtcagcatggttgatgaactaatgatgagagagttaaggaatgttgctagaacatagggcttgctggtacctatgtgactaagaaagggacatgatgtaagggaaaaggcctcaaattcttgtgaatgtggacattctcgttaatattcttttgggctaatagtgacatagtgtgcagaggtgtaccagggatcatgggggatttcctagcactagtatgcttctagttttagataactccctcctttattccctggccccttgtattttccttatcttcctctttcaagacccctacccattttgcctatccgtaggctggggcttgtgtctttgtcattgtctggttcttaagagtcccagctccaggtggcgtcctccctgcctctccgtcttgtaatgagttgtagtatttactcttaacataggatcatttggaacaggagttctgaggaggagagagtgagggttttgctattgactgacttgaacgatggcttctcctcaagctgtaggctccagagcttcctaacctagtaaaatgtcaagaacagacgggagatattagtgtctttccctctatcattaaaggtgttttaaccaaaaaaaaaaaaaaaaaaaaa

SEQ ID NO: 2631 - DNA, 2295 bp, Homo Sapiens
  NM_005412
ataaagaaaaaagcggtgagtgggcgaactacaattcccaaaaggccacaaaggggccaccactacgcatgcgtagatccctcccgttagctttggcgcctcagcgagctcttctcgcgcatgcgttctccgaacggtcttcttccgacagcttgctgccctagaccagagttggtggctggacctcctgcgacttccgagttgcgatgctgtacttctctttgttttgggcggctcggcctctgcagagatgtgggcagctggtcaggatggccattcgggctcagcacagcaacgcagcccagactcagactggggaagcaaacaggggctggacaggccaggagagcctgtcggacagtgatcctgagatgtgggagttgctgcagagggagaaggacaggcagtgtcgtggcctggagctcattgcctcagagaacttctgcagccgagctgcgctggaggccctggggtcctgtctgaacaacaagtactcggagggttatcctggcaagagatactatgggggagcagaggtggtggatgaaattgagctgctgtgccagcgccgggccttggaagcctttgacctggatcctgcacagtggggagtcaatgtccagccctactccgggtccccagccaacctggccgtctacacagcccttctgcaacctcacgaccggatcatggggctggacctgcccgatgggggccatctcacccacggctacatgtctgacgtcaagcggatatcagccacgtccatcttcttcgagtctatgccctataagctcaaccccaaaactggcctcattgactacaaccagctggcactgactgctcgacttttccggccacggctcatcatagctggcaccagcgcctatgctcgcctcattgactacgcccgcatgagagaggtgtgtgatgaagtcaaagcacacctgctggcagacatggcccacatcagtggcctggtggctgccaaggtgattccctcgcctttcaagcacgcggacatcgtcaccaccactactcacaagactcttcgaggggccaggtcagggctcatcttctaccggaaaggggtgaaggctgtggaccccaagactggccgggagatcccttacacatttgaggaccgaatcaactttgccgtgttcccatccctgcaggggggcccccacaatcatgccattgctgcagtagctgtggccctaaagcaggcctgcacccccatgttccgggagtactccctgcaggttctgaagaatgctcgggccatggcagatgccctgctagagcgaggctactcactggtatcaggtggtactgacaaccacctggtgctggtggacctgcggcccaagggcctggatggagctcgggctgagcgggtgctagagcttgtatccatcactgccaacaagaacacctgtcctggagaccgaagtgccatcacaccgggcggcctgcggcttggggccccagccttaacttctcgacagttccgtgaggatgacttccggagagttgtggactttatagatgaaggggtcaacattggcttagaggtgaagagcaagactgccaagctccaggatttcaaatccttcctgcttaaggactcagaaacaagtcagcgtctggccaacctcaggcaacgggtggagcagtttgccagggccttccccatgcctggttttgatgagcattgaaggcacctgggaaatgaggcccacagactcaaagttactctccttccccctacctgggccagtgaaatagaaagcctttctattttttggtgcgggagggaagacctctcacttagggcaagagccaggtatagtctcccttcccagaatttgtaactgagaagatcttttctttttcctttttttggtaacaagacttagaaggagggcccaggcactttctgtttgaacccctgtcatgatcacagtgtcagagacgcgtcctctttcttggggaagttgaggagtgcccttcagagccagtagcaggcaggggtgggtaggcaccctccttcctgtttttatctaataaaatgctaacctgccctgagtttccattactgtgggtggggttcccctgggccaaacagtgatttgtctccctcaatgtgtacaccgctccgctcccaccaccgctaccacaaggacccccggggctgcagcctcctctttctgtctctgatcagagccgacaccagacgtgattagcaggcgcagcaaattcaatttgttaaatgaaattgtattttgccca

SEQ ID NO: 2632 - DNA, 3297 bp, Homo Sapiens
  NM_005415
tgccggcgctctctgcgtggttcttcttctcggccgctgaaacccccgcggctgcttcctgggaaggtcgtgagtcccgctgagctgtccccggtgccgccgacccgggccgtgtgcccgtggctccagccgctgccgcctcgatctcctcgtctcccgctccgccctcccttttccctggatgaacttgcgtcctttctcttctccgccatggaattctgctccgtgcttttagccctcctgagccaaagaaaccccagacaacagatgcccatacgcagcgtatagcagtaactccccagctcggtttctgtgccgtagtttacagtatttaattttatataatatatattatttattatagcatttttgatacctcatattctgtttacacatcttgaaaggcgctcagtagttctcttactaaacaaccactactccagagaatggcaacgctgattaccagtactacagctgctaccgccgcttctggtcctttggtggactacctatggatgctcatcctgggcttcattattgcatttgtcttggcattctccgtgggagccaatgatgtagcaaattcttttggtacagctgtgggctcaggtgtagtgaccctgaagcaagcctgcatcctagctagcatctttgaaacagtgggctctgtcttactgggggccaaagtgagcgaaaccatccggaagggcttgattgacgtggagatgtacaactcgactcaagggctactgatggccggctcagtcagtgctatgtttggttctgctgtgtggcaactcgtggcttcgtttttgaagctccctatttctggaacccattgtattgttggtgcaactattggtttctccctcgtggcaaaggggcaggagggtgtcaagtggtctgaactgataaaaattgtgatgtcttggttcgtgtccccactgctttctggaattatgtctggaattttattcttcctggttcgtgcattcatcctccataaggcagatccagttcctaatggtttgcgagctttgccagttttctatgcctgcacagttggaataaacctcttttccatcatgtatactggagcaccgttgctgggctttgacaaacttcctctgtggggtaccatcctcatctcggtgggatgtgcagttttctgtgcccttatcgtctggttctttgtatgtcccaggatgaagagaaaaattgaacgagaaataaagtgtagtccttctgaaagccccttaatggaaaaaaagaatagcttgaaagaagaccatgaagaaacaaagttgtctgttggtgatattgaaaacaagcatcctgtttctgaggtagggcctgccactgtgcccctccaggctgtggtggaggagagaacagtctcattcaaacttggagatttggaggaagctccagagagagagaggcttcccagcgtggacttgaaagaggaaaccagcatagatagcaccgtgaatggtgcagtgcagttgcctaatgggaaccttgtccagttcagtcaagccgtcagcaaccaaataaactccagtggccactaccagtatcacaccgtgcataaggattccggcctgtacaaagagctactccataaattacatcttgccaaggtgggagattgcatgggagactccggtgacaaacccttaaggcgcaataatagctatacttcctataccatggcaatatgtggcatgcctctggattcattccgtgccaaagaaggtgaacagaagggcgaagaaatggagaagctgacatggcctaatgcagactccaagaagcgaattcgaatggacagttacaccagttactgcaatgctgtgtctgaccttcactcagcatctgagatagacatgagtgtcaaggcagagatgggtctaggtgacagaaaaggaagtaatggctctctagaagaatggtatgaccaggataagcctgaagtctctctcctcttccagttcctgcagatccttacagcctgctttgggtcattcgcccatggtggcaatgacgtaagcaatgccattgggcctctggttgctttatatttggtttatgacacaggagatgtttcttcaaaagtggcaacaccaatatggcttctactctatggtggtgttggtatctgtgttggtctgtgggtttggggaagaagagttatccagaccatggggaaggatctgacaccgatcacaccctctagtggcttcagtattgaactggcatctgccctcactgtggtgattgcatcaaatattggccttcccatcagtacaacacattgtaaagtgggctctgttgtgtctgttggctggctccggtccaagaaggctgttgactggcgtctctttcgtaacatttttatggcctggtttgtcacagtccccatttctggagttatcagtgctgccatcatggcaatcttcagatatgtcatcctcagaatgtgaagctgtttgagattaaaatttgtgtcaatgtttgggaccatcttaggtattcctgctcccctgaagaatgattacagtgttaacagaagactgacaagagtctttttatttgggagccagaggagggaagtgttacttgtgctataactgcttttgtgctaaatatgaattgtctcaaaattagctgtgtaaaatagcccgggttcctttggctcctgctgaggtcccctttccttctgggctgtgaattcctgtacatatttctctactttttgtatcaggcttcaattccattatgttttaatgttgtctctgaagatgacttgtgatttttttttcttttttttaaaccatgaagagccgtttgacagagcatgctctgcgttgttggtttcaccagcttctgccctcacatgcacagggatttaacaacaaaaatataactacaacttcccttgtagtctcttatataagtagagtccttggtactctgccctcctgtcagtagtggcaggatctattggcatattcgggagcttcttagagggatgaggttctttgaacacagtgaaaatttaaattagtaacttttttgcaagcagtttattgactgttattgctaagaagaagtaagaaagaaaaagcctgttggcaatcttggttatttctttaagatttctggcagtgtgggatggatgaatgaagtggaatgtgaacttcgggcaagttaaatgggacagccttccatgttcatttgtctacctcttaactgaataaaaaagcctacagtttttagaaaaaaaaaaaaaaa

SEQ ID NO: 2633 - DNA, 5842 bp, Homo Sapiens
  NM_005436
agtgcaatactgcccaagcccgggcggggtctctgttctctggcagaggaggtcccttggcagcgggaagcgccctctctttctctcgccgccgctccgagtctgcgccctggtgccaggcgctcagctcggcgctcccctgtgctcgcccggcgcccactcattcgcagcccggccttcgtcgccgccgcctccctgctgctcctcctcctttccccagcccgccgcggccatggcggacagcgccagcgagagcgacacggacggggcggggggcaacagcagcagctcggccgccatgcagtcgtcctgctcgtcgacctcgggcggcggcggtggcggcgggggaggcggcggcggtgggaagtcggggggcattgtcatctcgccgttccgcctggaggagctcaccaaccgcctggcctcgctgcagcaagagaacaaggtgctgaagatagagctggagacctacaaactgaagtgcaaggcactgcaggaggagaaccgcgacctgcgcaaagccagcgtgaccatccaagccagggctgagcaggaagaagaattcattagtaacactttattcaagaaaattcaggctttgcagaaggagaaagaaacccttgctgtaaattatgagaaagaagaagaattcctcactaatgagctctccagaaaattgatgcagttgcagcatgagaaagccgaactagaacagcatcttgaacaagagcaggaatttcaggtcaacaaactgatgaagaaaattaaaaaactggagaatgacaccatttctaagcaacttacattagaacagttgagacgggagaagattgaccttgaaaatacattggaacaagaacaagaagcactagttaatcgcctctggaaaaggatggataagcttgaagctgaaaagcgaatcctgcaggaaaaattagaccagcccgtctctgctccaccatcgcctagagatatctccatggagattgattctccagaaaatatgatgcgtcacatcaggtttttaaagaatgaagtggaacggctgaagaagcaactgagagctgctcagttacagcattcagagaaaatggcacagtatctggaggaggaacgtcacatgagagaagagaacttgaggctccagaggaagctgcagagggagatggagagaagagaagccctctgtcgacagctctccgagagtgagtccagcttagaaatggacgacgaaaggtattttaatgagatgtctgcacaaggattaagacctcgcactgtgtccagcccgatcccttacacaccttctccgagttcaagcaggcctatatcacctggtctatcatatgcaagtcacacggttggtttcacgccaccaacttcactgactagagctggaatgtcttattacaattccccgggtcttcacgtgcagcacatgggaacatcccatggtatcacaaggccttcaccacggagaagcaacagtcctgacaaattcaaacggcccacgccgcctccatctcccaacacacagaccccagtccagccacctccgcctccacctccgccacccatgcagcccacggtcccctcagcagccacctcgcagcctactccttcgcaacattcggcgcacccctcctcccagccttaatgcatgagcttagtctgaatttcaagttgggactcatccaatggagccgtctactcaacgccaaaggcttccttctctggcatatttggatatgacttatttgcactgaggttatctaggcttcactatccattgtgttgtaaatgtttgtcagaaatgcagccagtgttgtgggtctacaacactaaccagacgactttttccatcagtgttttacttgaatcttcatgtacgtccattccctggctggaaccttcgctgtttggtatttggtatttcagcagcagtgtgcaatttttgcttggcccagagcttcattctcctggcttttaggtttgtaaaagaaaaagggatatcttttttatatttttttccatgaatctgcagaaaattactgagctgttgttaccctcctctcattataatagtgtttaccaaacataccaataattcagcactacaattcagacctttgaaaatctggctttcagtgtagaacagaaagttagatgaatcagtgcccaagacatattttctgtttaacagaactttctacagatacattttttacaggttattttcattgtgttattgacatccatgtctctcgtaaaacagatggcccaaagtaatgaatcatgtggctgtaccttctccacataaatgggatggataattatcgtatattaagatgtgattctcttttttatccttaatgttaatctacttaacctggccccctctaacatgagtcgataaatgttgtcctactcaccggtggtttcaatggctaattagaatgtgttatttgatttctgctgcagaaggcagtgtgattgtaacaaaaacaatgcggcttccccctttcgtacttcatttgtgttctcttaaaatagagtttgaacaaatattttaaaggtgcaaaataccattagaaaatactatttgaaatggacattatcgcattatcttggcataatggccagaaaatattgtattgcttggcagaaaagaaaataaggtctaaaggaaagtagcacattagcattgatggctgttcatttcacccagtataagcaagtgcagtgtacaaagaagtatattctgaatacattatttccattcatttagcacaaataaatcatttggtttcactttgcagtggaacactgagtcactcttttcttaacacgtgcaacatcttaatttttgtttttcagcagttgctgttttgtactttggtagtaaagtgatttttaccacctgtgtttgcatatttatatatgctgtggatgaaaataacttactagagaatgtatattttatgacaagaatgtgtatctgttggatataatcagagaactgaaaagtaatttatcagtaatttttaagagtccatgttttgtgacaaccatctctaatagccaactctttattaaacacactcctaaaaataaggaaccatgacattgtagatatttaatattgtacagtatagaaacctccatttttgccttcgaatgcatatttaagagttaacagaatgaaaaaaaaaagtcttgttggataatagtgtttgactagcgttttaagaacttgagagtaaaagcaacaataagattttttcacctcttcctgcttccacccccaaactgagaacatcactcaattgtttggaagaaactgtaggtctatataaattttatttataatgtatgtgtaatatacataatcataatacagttctcagatgcagggaagaagtttggcatttaatcattgaggctttaggtttttgatgtgatcagactgggccatgtcaaacccggaattttcaccaacagttcactcaccctcctggtacattgccattccaaggaattctgagagtaggcaaacaaattttgccttcatggtacagttctcagtttttcttataggagaaatatggtatatgtttataagaatcttttatgagattatagatttcaatgctgtggatagtgtcttgcacccaaacaagaaagtccataatggaatgatcttccctcagcttcctatcgatttagttacctcttgaaagcacaaaaattaaaacattgccatatgttgaatttttaaaaagcacttggagtgagcgaacatttcctgataaatgccttttagagataggttcttgatattcagacatctgcagaaatgttctggttcccaaagtcatttcacttcgaaataaaacacagctccttcaaacagcactttttccacataaatctagttgcctctccctgtggacattcagaactgatagaacaaacactactcttttgaatttgatggttcgtgtcctttaaagtgtttgaggacctatgcagagcctgtaacacttgggtagtacctgctaggacaatttcttggcaattgtcttactactagggatcagtaagatttagattctgagcccataatggcaacagccccctcacctatgggaagctgacttccctcagtcgggcacttctcatgggggctgaacatggttcctgccattctgttacccactctcccaggtgagccctggattggctcccagaaggcctttgtaaaatcagtagccgtcctgcaggcaggtgggagcaacaggggcttcagtagcttcattttcctgtcttgcagacagagacccttggctaccactgtgctgctaataggataagtactctgttgccagattaccatgccttttatacaaaaccaaattaacttacctaatacctgacacctctttgggctctgaactgctttctctcatcaagcatgctagcactctagacagaattctagaaatttggcagatagtggaagcctttaattgaacttactccttcgttgactgaaaggagttttaaattctgagctcctgagatactgactagcaaccatggaatgaatgtgtgaccagaaagtggctttgacaccaagtgctactgtccctttgtaattggcttctaacagaattcaaccagaaataattgataatgtgaatttttgttaattgttcacttgtaggaaaatagaacatgtatcaccctttgttaggtagacatgaacttttcctgcacaaagccttgcttttagagaatgcccaataaggcaagaaaaagcatagtaacttgtgctttgagagctcaatatttgtatcttatcagtacagaagaaatatttctgtgtaacttgatcttctgtctagtacttgtcttataggtaaccaacactgaaaactttgtagtgatgactaccaaagaaatacatagtaaaacaaccttttatttccaaattgttaaagagccagccattgatgctgctacatgagttccatgctcaagagccattgtaagagattaaggggtttctaggtttttggtgattttttgtttgtttttttctttgttttttagggtttttttttcttctttaattttttgattaaaacatacacacagctgttagcataaagtcgtggggggcattttctggaatgctcagcagttctgattaactgccaagcccaggttgcctctcatgaggcaactgaaaaaatcctgtgtcttgatagcatgggtgctgtgtgtgtgcatgtgtgtgtctgcattcatgccttaactcgggttactgcacaactttagttcttgacttagtctgcaccgtcatctagattgtattgtacatctcggtctgaacttcatcctggcaaaaacaaagttgcaggcacaacagtttaagaatgcattcctccagaagagtatctggtcaggttgacccctgagccttctttggacttgatttggaacttagcctggaaagcgaaagtggactgtccaacagaaagatgtcaacaaggaaaagaggagagccaagcgctagcatgccttttgcctctgcatatctgtgcacactgtatgttgttcatgatagcttgtctacaacttgactaggttggagttctggtaatagtggcaatcttgacattcttggtcagagtttagagagatgtaagactttcaattaatgtcttatttactcctttatgttgattagtctttgatacatgtgctgaatcagaaacctaaataaagataattttttaaaatgtacctcttgagccttaaaaaaaaaaaaaaaaaa

SEQ ID NO: 2634 - DNA, 2756 bp, Homo Sapiens
  NM_005442
atgcagttaggggagcagctcttggtgagctcagtgaacctgcctggcgcgcacttctacccgctggagagtgcgcgaggcggcagcggcgggagcgctggccacctccccagcgcggccccctctcctcagaagttggacttagacaaagcgtccaagaagttttccggcagtctctcctgcgaggcggtgagcggggagcccgcagccgccagcgcaggggcccccgcggccatgcttagtgacaccgacgccggggacgcatttgccagcgctgcggcagtggccaagccggggcccccggacggccgcaagggctccccctgcggggaggaggagctgccctccgccgctgcagccgccgccgccgccgccgccgcggctgcggccactgcgcgctactccatggacagcctgagctccgagcggtactacctccagtcccccggtcctcaggggtcggagctggctgcgccctgctcactcttcccgtaccaggcggcggctggggcgccccacggacctgtgtacccggctcctaacggggcgcgctacccctacggctccatgctgccccccggcggcttccccgcggctgtgtgcccacccgggagggcgcagttcggcccaggagccggtgcgggcagtggcgcgggcggtagcagcggcgggggcggcggcccgggcacctatcagtacagccagggggctccgctctacgggccgtaccctggagccgcagcggcgggatcttgcggaggactggggggcctgggggttccaggttctggcttccgtgcccacgtctacctgtgcaaccggcctctgtggctcaaattccaccgccaccaaactgagatgatcattacgaaacagggcaggcgcatgtttcctttcttgagcttcaacataaacggactcaatcccactgcccactacaatgtgttcgtagaggtggtgctggcggaccccaaccactggcgcttccaggggggcaaatgggtgacctgtggcaaagccgacaataacatgcagggcaacaaaatgtatgttcacccagagtctcctaatactggttcccactggatgagacaggagatttcattcgggaaattaaaactcaccaataacaaaggcgcaaataacaacaacacccagatgatagtcttacaatccttacacaaataccaaccccgactgcatattgttgaagttacagaggatggcgtggaggacttgaatgagccctcaaagacccagacttttaccttctcagaaacgcaattcattgcagtgactgcctaccaaaacaccgatattactcaactaaagattgatcataacccctttgcaaaaggcttcagagacaactatgattcatcccatcagattgtccctggaggtcggtacggcgttcaatccttcttcccggagccctttgtcaacactttacctcaagcccgctattataatggcgagagaaccgtgccacagaccaacggcctcctttcaccccaacagagcgaagaggtggccaaccctccccagcggtggcttgtcacgcctgtccagcaacctgggaccaacaaactagacatcagttcctatgaatctgaatatacttctagcacattgctcccatatggcattaaatccttgccccttcagacatcccatgccctggggtattacccagacccaacctttcctgcaatggcagggtggggaggtcgaggttcttaccagaggaagatggcagctggactaccatggacctccagaacaagccccactgtgttctctgaagatcagctctccaaggagaaagtgaaagaggaaattggctcttcttggatagagacacccccttccatcaaatctctagattccaatgattcaggagtatacaccagtgcttgtaagcgaaggcggctgtctcctagcaactccagtaatgaaaattcaccctccataaagtgtgaggacattaatgctgaagagtatagtaaagacacctcaaaaggcatgggagggtattatgctttttacacaactccctaaagagttattttaacctcaaaaattagctaactttttgcagatggacttggtggtgttttttgttgtcttctttgcctaggttgccaaaaagatgtttgccttccaccttgatgcatcctgttttgtgcaattctctaaaagaaggtgccaaagctttttgattgctgcaggtaactgaaacaaacctagcatttttaaaaaataagattaatggaagactttaaggtattttaaaattcgaagggtatccaaggttctgtatttatttattggggagacactaacccttcaaagaagcaggctgtgaacattgggtgcccagtgctatcagatgagttaaaacctttgattctcatttctatttgtaaattcttaagcaaatagaagccgagtgttaaggtgttttgcttctgaaagagggctgtgccttccgtttcagaaggagacattttgctgttacattctgccaggggcaaaagatactaggcccaggagtcaagaaaagcttttgtgaaagtgatagtttcacctgactttgattccttaacccccggcttttggaacaagccatgtttgccctagtccaggattgcctcacttgagacttgctaggcctctgctgtgtgctggggtggccagtgggactcaggagagagcaagctaaggagtcaccaaaaaaaaaaaaaaaaaaaaaa

SEQ ID NO: 2635 - DNA, 2558 bp, Homo Sapiens
  NM_005443
agccccgccccgctcgctggcctgccctcctcttgctaccctcccggcgcagagaaccccggctgctcagcgcgctccgcggtcatggagatccccgggagcctgtgcaagaaagtcaaactgagcaataacgcgcagaactggggaatgcagagagcaaccaatgtcacctaccaagcccatcatgtcagcaggaacaagagaggtcaggtggtggggaccagaggtggctttcgtggttgcacagtttggctaacaggcttgtctggagcgggaaagactactgtgagcatggccttggaggagtacctggtttgtcatggtattccatgctacactctggatggtgacaatattcgtcaaggtctcaataaaaatcttggctttagtcctgaagacagagaagagaatgttcgacgcatcgcagaagttgctaaactgtttgcagatgctggcttagtgtgcatcacaagtttcatatcaccttacactcaggatcgcaacaatgcaaggcaaattcatgaaggtgcaagtttaccgttttttgaagtatttgttgatgctcctctgcatgtttgtgaacagagggatgtcaaaggactctacaaaaaagcccgggcaggagaaattaaaggtttcactgggatcgattctgaatatgaaaagccagaggcccctgagttggtgctgaaaacagactcctgtgatgtaaatgactgtgtccagcaagttgtggaacttctacaggaacgggatattgtacctgtggatgcatcttatgaagtaaaagaactatatgtgccagaaaataaacttcatttggcaaaaacagatgcggaaacattaccagcactgaaaattaataaagtggatatgcagtgggtgcaggttttggcagaaggttgggcaaccccattgaatggctttatgagagagagggagtacttgcagtgccttcattttgattgtcttctggatggaggtgtcattaacttgtcagtacctatagttctgactgcgactcatgaagataaagagaggctggacggctgtacagcatttgctctgatgtatgagggccgccgtgtggccattcttcgcaatccagagttttttgagcacaggaaagaggagcgctgtgccagacagtggggaacgacatgcaagaaccacccctatattaagatggtgatggaacaaggagattggctgattggaggagatcttcaagtcttggatcgagtttattggaatgatggtcttgatcagtatcgtcttactcctactgagctaaagcagaaatttaaagatatgaatgctgatgctgtctttgcatttcaactacgcaacccagtgcacaatggacatgccctgttaatgcaggatacccataagcaacttctagagaggggctaccggcgccctgtcctcctcctccaccctctgggtggctggacaaaggatgacgatgttcctttgatgtggcgtatgaagcagcatgctgcagtgttggaggaaggagttctgaatcctgagacgacagtggtggccatcttcccatctcccatgatgtatgctggaccaactgaggtccagtggcattgcagagcacggatggttgcaggagccaacttttacattgttggacgagaccctgctggcatgcctcatccagaaacagggaaggatctttatgagccaagtcatggtgccaaagtgctgacgatggcccctggtttaatcactttggaaatagttccctttcgagttgcagcttacaacaagaaaaagaagcgtatggactactatgactctgaacaccatgaagactttgaatttatttcaggaacacgaatgcgcaaacttgctcgagaaggccagaaaccacctgaaggtttcatggctcccaaggcttggaccgtgctgacagaatactacaaatccttggagaaagcttaggctgttaacccagtcactccacctttgacacattactagtaacaagaggggaccacatagtctctgttggcatttctttgtggtgtctgtctggacatgcttcctaaaaacagaccattttccttaacttgcatcagttttggtctgccttatgagttctgttttgaacaagtgtaacacactgatggttttaatgtatcttttccacttattatagttatattcctacaatacaattttaaaattgtctttttatattatatttatgcttctgtgtcatgattttttcaagctgttatattagttgtaaccagtagtattcacattaaatcttgctttttttccccttaaaaaaagaaaaaaattaccaaacaataaacttggctagaccttgttttgaggattttacaagacctttgtagcgattagattttttttctacattgaaaatagaaactgcttcctttcttctttccagtcagctattggtctttccagctgttataatctaaagtattcttatgatctgtgtaagctctgaatgaacttctttactcaataaaattaattttttggcttcttaaaaaaaaaaaaaaaaa

SEQ ID NO: 2636 - DNA, 900 bp, Homo Sapiens
  NM_005444
atgcacagcctggcgacggctgcgcctgtgcctactacactggcacaagtggatagagaaaagatctatcagtggatcaatgagctgtccagtcctgagactagggaaaatgctttgctggagctaagtaagaagcgagaatctgttcctgaccttgcacccatgctgtggcattcatttggtactattgcagcacttttacaggaaattgtaaatatttatccatctatcaacccacccaccttgacagcacaccagtctaacagagtttgcaatgctctggcattactgcaatgtgtagcatcacatccagaaaccaggtcagcgtttctcgcagcacacatcccactttttttgtacccctttttgcacactgtcagcaaaacacgtccctttgagtatctccggctcaccagccttggagttattggggccctggtgaaaacagatgaacaagaagtaatcaactttttattaacaacagaaattatccctttatgtttgcgaattatggaatctggaagtgaactttctaaaacagttgccacattcatcctccagaagatcttgttagatgacactggtttggcttatatatgtcagacgtatgagcgtttctcccatgttgccatgatcttgggtaagatggtcctgcagctatccaaagagccttctgcccgtctgctgaagcatgtagtgagatgttaccttcgactttcagataaccccagggcacgtgaagcactcagacagtgcctccctgaccagctgaaagacacaaccttcgcccaggtgctaaaagatgacaccaccacgaaacgctggcttgcacaactggtgaagaacctgcaagagggccaggtcaccgatccccggggtatccccctgccccctcagtga

SEQ ID NO: 2637 - DNA, 3109 bp, Homo Sapiens
  NM_005449
agcctgagaatagttagcaaacaagggaggttgtcatttcctcatcgtcaagctttgttcctcgtgggggctagaaatctctttccagttccagattgtgaagggttcctgagtaagcagcgtgtctccatccccctctctaggggctcttggatggaccttgcactctagaagggacaatggacttctggctttggccactttacttcctgccagtatcgggggccctgaggatcctcccagaagtaaaggtagagggggagctgggcggatcagttaccatcaagtgcccacttcctgaaatgcatgtgaggatatatctgtgccgggagatggctggatctggaacatgtggtaccgtggtatccaccaccaacttcatcaaggcagaatacaagggccgagttactctgaagcaatacccacgcaagaatctgttcctagtggaggtaacacagctgacagaaagtgacagcggagtctatgcctgcggagcgggcatgaacacagaccggggaaagacccagaaagtcaccctgaatgtccacagtgaatacgagccatcatgggaagagcagccaatgcctgagactccaaaatggtttcatctgccctatttgttccagatgcctgcatatgccagttcttccaaattcgtaaccagagttaccacaccagctcaaaggggcaaggtccctccagttcaccactcctcccccaccacccaaatcacccaccgccctcgagtgtccagagcatcttcagtagcaggtgacaagccccgaaccttcctgccatccactacagcctcaaaaatctcagctctggaggggctgctcaagccccagacgcccagctacaaccaccacaccaggctgcacaggcagagagcactggactatggctcacagtctgggagggaaggccaaggatttcacatcctgatcccgaccatcctgggccttttcctgctggcacttctggggctggtggtgaaaagggccgttgaaaggaggaaagccctctccaggcgggcccgccgactggccgtgaggatgcgcgccctggagagctcccagaggccccgcgggtcgccgcgaccgcgctcccaaaacaacatctacagcgcctgcccgcggcgcgctcgtggagcggacgctgcaggcacaggggaggcccccgttcccggccccggagcgccgttgccccccgccccgctgcaggtgtctgaatctccctggctccatgccccatctctgaagaccagctgtgaatacgtgagcctctaccaccagcctgccgccatgatggaggacagtgattcagatgactacatcaatgttcctgcctgacaactccccagctatcccccaaccccaggctcggactgtggtgccaaggagtctcatctatctgctgatgtccaatacctgcttcatgtgttctcagagccctcatcacttcccatgccccatctcgactcccatccccatctatctgtgccctgagcatggctctgcccccaggtcgtcttgcacaccttggcagccccctgtagttgacaggtaagctgtaggcatgtagagcaattgtcccaatgccacttgcttcctttccaagccgtcgaacagactgtgggatttgcagagtgtttcttccatgtctttgaccacagggttgttgctgcccaggctctagatcacatggcatcaggctggggcagaggcatagctattgtctcgggcatccttcccagggttgggtcttacacaaatagaaggctcttgctctgagttatgtgacatgcctcagccccatggactaagcaggggtctggtataaaaacactcctggaaacgcctttgccctgatccaaatgttagcacttgctagtgaacgtctacttatctcaagttctatgctaaaggcaatttatcttgatgtgatgataaaccaaacttattagcaagatatgcatatatatccataaattctctttactctgtctccatcacttgatgcacataagtgccctgacctcagcatctcccctctaaaaaaaaaaaaaaaaaagtatctctttatctttcttccatagcctgacactgatatttgtgcacttaccttaactttggtctattttattcatccaaaaccattacatttcttggttttcacaaatgttccccatttcttagccagttccagacaatgtatagcaagcaggggaaggaaagcagtcaggagttcctgggtggccacggctctgcaatagcacttatgtcatggaagtgatatcccacctcctacatatactctttgcctaggtttttggaacaaggttatagtcagacactgtatctttagattgatgtcgaccacaaagttcagccagagcttgaggctagatgcacagccttgctattgggaagaaggccttttctagctgtacaacacagtctcactgggcattcatccagaaatagagaagaaagtctgccagacttgagttatgttgtcttttattagcagggaatgtcatcacagattggatagtacatccaggtgcaatgtcaccatcagcaaggtcagcttgacactcaagtggaagattagggaagaatgactaggataaaaaaaaaaggagggcaccaagggaaagggatgatggggtgagctggcgagtgtgggtgggaaatgaaatgtttattgaggatctgctttgtgctgggcactttaatccacattttatcgtttacttttcaaacagatgcaccttacccccaccccaatgctctgtccctgcagatatcagaagacagtgtgattttcatgctctgaagttcagttttacatccaagcatccctctctgttttttaacaatccaaagacaggccaaaaaaagcaccacagtttattaagtacttactaagcacccatccactgccccacactgtggcaaggattgtgaggggtaaagaagcatggggcacaatattctgctgccttcatgtaacttacagtctcacaaataaatagaacttcagttgaaatactgacattaattaaatagagttgtaataaaaaaaaaaaaaaaaaaaaaaaaaa

SEQ ID NO: 2638 - DNA, 1892 bp, Homo Sapiens
  NM_005450
aaaccggtgccaacgtgcgcggacgccgccgccgccgccgccgctggagtccgccgggcagagccggccgcggagcccggagcaggcggagggaagtgcccctagaaccagctcagccagcggcgcttgcacagagcggccggacgaagagcagcgagaggaggaggggagagcggctcgtccacgcgccctgcgccgccgccggcccgggaaggcagcgaggagccggcgcctcccgcgccccgcggtcgccctggagtaatttcggatgcccagccgcggccgccttccccagtagacccgggagaggagttgcggccaacttgtgtgcctttcttccgccccggtgggagccggcgctgcgcgaagggctctcccggcggctcatgctgccggccctgcgcctgcccagcctcgggtgagccgcctccggagagacgggggagcgcggcggcgccgcgggctcggcgtgctctcctccggggacgcgggacgaagcagcagccccgggcgcgcgccagaggcatggagcgctgccccagcctaggggtcaccctctacgccctggtggtggtcctggggctgcgggcgacaccggccggcggccagcactatctccacatccgcccggcacccagcgacaacctgcccctggtggacctcatcgaacacccagaccctatctttgaccccaaggaaaaggatctgaacgagacgctgctgcgctcgctgctcgggggccactacgacccaggcttcatggccacctcgccccccgaggaccggcccggcgggggcgggggtgcagctgggggcgcggaggacctggcggagctggaccagctgctgcggcagcggccgtcgggggccatgccgagcgagatcaaagggctagagttctccgagggcttggcccagggcaagaagcagcgcctaagcaagaagctgcggaggaagttacagatgtggctgtggtcgcagacattctgccccgtgctgtacgcgtggaacgacctgggcagccgcttttggccgcgctacgtgaaggtgggcagctgcttcagtaagcgctcgtgctccgtgcccgagggcatggtgtgcaagccgtccaagtccgtgcacctcacggtgctgcggtggcgctgtcagcggcgcgggggccagcgctgcggctggattcccatccagtaccccatcatttccgagtgcaagtgctcgtgctagaactcgggggccccctgcccgcacccggacacttgatcgatccccaccgacgccccctgcaccgcctccaaccagttccaccaccctctagcgagggttttcaatgaacttttttttttttttttttttttttttctgggctacagagacctagctttctggttcctgtaatgcactgtttaactgtgtaggaatgtatatgtgtgtgtatatacggtcccagttttaatttacttattaaaaggtcagtattatacgttaaaagttaccggcttctactgtatttttaaaaaaaagtaagcaaaagaaaaaaaaaagaacagagaaaagagagacttattctggttgttgctaataatgttaacctgctatttatattccagtgcccttcgcatggcgaagcaggggggaaaagttatttttttcttgaagtacaaagagacgggggaacttttgtagaggactttttaaaagctattttccattcttcggaaagtgttttggttttccttggacctcgaagaagctatagagttcaatgttattttacagttattgtaaatatagagaacaaatggaatgactaatcattgtaaattaagagtatctgctatttattctttataatatcccgtgtagtaaatgagaaagaagtgcagagcaggatt

SEQ ID NO: 2639 - DNA, 1709 bp, Homo Sapiens
  NM_005451
agaacactggcggccgatcccaacgaggctccctggagcccgacgcagagcagcgccctggccgggccaagcaggagccggcatcatggattccttcaaagtagtgctggaggggccagcaccttggggcttccggctgcaagggggcaaggacttcaatgtgcccctctccatttcccggctcactcctgggggcaaagcggcgcaggccggagtggccgtgggtgactgggtgctgagcatcgatggcgagaatgcgggtagcctcacacacatcgaagctcagaacaagatccgggcctgcggggagcgcctcagcctgggcctcagcagggcccagccggttcagagcaaaccgcagaaggcctccgcccccgccgcggaccctccgcggtacacctttgcacccagcgtctccctcaacaagacggcccggccctttggggcgcccccgcccgctgacagcgccccgcagcagaatggacagccgctccgaccgctggtcccagatgccagcaagcagcggctgatggagaacacagaggactggcggccgcggccggggacaggccagtcgcgttccttccgcatccttgcccacctcacaggcaccgagttcatgcaagacccggatgaggagcacctgaagaaatcaagccaggtgcccaggacagaagccccagccccagcctcatctacaccccaggagccctggcctggccctaccgcccccagccctaccagccgcccgccctgggctgtggaccctgcgtttgccgagcgctatgccccggacaaaacgagcacagtgctgacccggcacagccagccggccacgcccacgccgctgcagagccgcacctccattgtgcaggcagctgccggaggggtgccaggagggggcagcaacaacggcaagactcccgtgtgtcaccagtgccacaaggtcatccggggccgctacctggtggcgctgggccacgcgtaccacccggaggagtttgtgtgtagccagtgtgggaaggtcctggaagagggtggcttctttgaggagaagggcgccatcttctgcccaccatgctatgacgtgcgctatgcacccagctgtgccaagtgcaagaagaagattacaggcgagatcatgcacgccctgaagatgacctggcacgtgcactgctttacctgtgctgcctgcaagacgcccatccggaacagggccttctacatggaggagggcgtgccctattgcgagcgagactatgagaagatgtttggcacgaaatgccatggctgtgacttcaagatcgacgctggggaccgcttcctggaggccctgggcttcagctggcatgacacctgcttcgtctgtgcgatatgtcagatcaacctggaaggaaagaccttctactccaagaaggacaggcctctctgcaagagccatgccttctctcatgtgtgagccccttctgcccacagctgccgcggtggcccctagcctgaggggcctggagtcgtggccctgcatttctgggtagggctggcaatggttgccttaaccctggctcctggcccgagcctggggctccctgggccctgccccacccaccttatcctcccaccccactccctccaccaccacagcacaccggtgctggccacaccagccccctttcacctccagtgccacaataaacctgtacccagctgtg

SEQ ID NO: 2640 - DNA, 2363 bp, Homo Sapiens
  NM_005452
gtagttctgacatgtttagggagtggagttctgctaaaaagactagactaggacatttttaggcaagatggggaaactaatccagaaaaagaaaccgcaccgctacttagcccctggctccggacctgcctttcttttttaaatcactcttgcataagctgccgctcgcgataaggtgccaaaaactgttccgcccctctaaggagagcgtgccctcactcaagatggcacctagagagcttcatacctggtacgctgctgattggatgaaggacagagggcttccgggagttttcaagccgactgtgtggcagctgagaggagttttgcacgtggatcgccgttcgggtgggcgagatggagacagcccccaagccgggcaaggatgtcccgcccaagaaagacaaacttcagaccaagagaaagaaaccgcggcgatactgggaggaagagaccgttccgaccacagccggagcctctccagggcctcctcgtaacaagaagaatcgggagctccgtcctcagagaccaaaaaatgcttacatcttaaagaagtctcggatctctaagaagcctcaggtcccgaagaaaccccgagaatggaagaacccggagtcccagcgcggcttgtccgggacccaagatccattcccaggccccgcccccgtccctgtggaagtggtccagaagttctgtcgcattgacaaatcccgaaagctaccacattctaaagccaaaactcgaagccgacttgaggtggctgaagctgaggaagaggaaacaagtatcaaagctgctcgttctgagctgctgcttgctgaagaacctgggtttctggaaggggaggatggggaagacacagcaaagatatgccaggctgacattgtggaggctgtggacattgcaagtgcagccaagcactttgacttgaatctgcggcagtttggaccctacagactaaactactctcgaactggaagacacctggcttttggagggcgccgaggtcatgtggctgcccttgattgggtaacaaagaagcttatgtgcgagatcaacgtcatggaggcggtgcgggacatccggtttctccattctgaggcactgcttgctgttgctcagaaccgctggctccacatctatgacaatcagggcattgagctccactgtatccgccgctgtgaccgagtaacacggcttgagttcctgcccttccacttcctcctggctacagcttcagaaacagggtttctaacctacctggatgtgtcagtggggaagattgtggcagctctgaatgctcgagctgggcggctcgatgttatgagtcagaacccttacaatgccgtcatccatctcggacacagcaatggtactgtgtctttatggagtccagctatgaaggagccactggcaaagattctctgtcatcgtggtggggtccgggctgtggcagtagattctacaggcacgtacatggccacctctggcctagaccaccagctgaagatctttgacttgcgagggacgtaccagcctctgagcactcggaccctgccccatggagcagggcacctggccttctcccagaggggactgctggtggcgggaatgggtgacgttgtcaacatctgggcagggcagggcaaggccagcccaccctcccttgaacagccctacctcacccaccggctctcaggccctgtgcatggccttcagttctgcccctttgaagatgtgctgggggtggggcacactgggggcatcaccagcatgctggtccctggggccggtgagcccaacttcgatggcctggagagtaatccatacagaagccggaagcagcgccaggagtgggaggtgaaggccctgctagagaaggtacctgcagagcttatttgtctggacccacgagccctggccgaggtggatgtcatctccctggagcagggaaagaaggagcagatagagaggctgggctatgacccgcaggctaaggctcccttccagccaaagccaaagcagaagggccgcagctccacggcaagcctggtgaagaggaagaggaaggtcatggatgaggaacacagggacaaggtccggcagagccttcagcagcagcatcataaggaggcgaaggccaagcccacgggggcccggccatctgccctggacagatttgtgcgctgagccagactccagggttgcctgggaacagtctctccccaagatcacctgtagggaaatgagtgttccctggaacaaggaggtgggggcagtgtggccccttccccaactgggggtggacagctgtctcctggggtgggttggtattaaagaggaaagcgattttttggataatg

SEQ ID NO: 2641 - DNA, 3162 bp, Homo Sapiens
  NM_005455
tctagtgccacgaaggcctcctgcctgggttgtccttatggcgcctgtgagtttagttctagaaaagatatttgtattttaacttttccatctaacaaacagtagcacaggcatcttagtctggacaacaacgtacaagctgaattcctggctagttccctcattatcaaaccctgacacagtagtaggcgcgagtcaggcagtgtggggacagccccgagttgccgaaagtccccggcccgttttcctcctgtgaagacatagctgcgggtggctgtgctggtggcgttcaagatgtcgaccaagaatttccgagtcagtgacggggactggatttgccctgacaaaaaatgtggaaatgtaaactttgctagaagaaccagctgtaatcgatgtggtcgggagaaaacaactgaggccaagatgatgaaagctgggggcactgaaataggaaagacacttgcagaaaagagccgaggcctatttagtgctaatgactggcaatgtaaaacttgcagcaatgtgaattgggccagaagatcagagtgtaatatgtgtaatactccaaagtatgctaaattagaagaaagaacaggatatggtggtggttttaatgaaagagaaaatgttgaatatatagaaagagaagaatctgatggtgaatatgatgagtttggacgtaaaaagaaaaaatacagagggaaagcagttggtcctgcatctatattaaaggaagttgaagataaagaatcagagggagaagaagaggatgaggatgaagatctttctaaatataagttagatgaggatgaggatgaagatgacgctgatctctcaaaatataatcttgatgccagtgaagaagaagatagtaataaaaagaaatctaatagacgaagtcgctcaaagtctcgatcttcacattcacgatcttcatcacgctcatcctccccctcaagttcaaggtctaggtccaggtcccgttcaagaagttcttccagttcgcagtcaagatctcgttccagttccagagaacgttcgagatctcgtgggtcgaaatcaagatccagctccaggtcccacaggggctcttcttccccacgaaaaagatcttattcaagttcatcatcttctcctgagaggaacagaaagagaagtcgttctagatcttcttcatctggtgatcgcaaaaaaagacgaacaagatcacggtcacccgaaagccaggtgattggtgaaaacactaaacaaccctgagcccagggccaacccctacggaacaccactactttacccagacgccacaggtcatcatctggatcatcccattctggttcccgttcaagttcaaaaaagaaataatgtattaaaatttacatcttaaaaaaatccagtacagtgcatgaagcatatttttaaagaagttggtgtcttacttggtcagaagtgctaaatctgctagtagaggtgcatgcctttcattgcttttcaaaacaatacagctgtgtttatttgtgaagttaaaagtaaatagcattttaagccataatgtcccaaaatagatgttctgtcattcattatttacaaccatttgcttcatttaaaaccatttcagctataacaaagtactttgcttcctaatttaaacccatttttgtcatttccaaatacatcctgtccattggctaagacaggattacctaggcttgcctgaactttgggcatggaagaaagactggaaactagttggaaacaacatacttatggaaaagaaagtcagcctttttatgctgttaacagatgtcagagtgattctcaccaaaaaaagttaaactatgttgtaagcagccaactgtaaatgtctattttgaaattccctatgctaagggtgccttagaatcattgtgtctcttttatccagctttacttttttgctccacatttaatgcaaaagaatcttgtgatgtctacaaggagagaagtgggatatattttcctttctgacacataatttggggcaaaaaagaaagtcttaagagtttatcttttctctgctgatacggttgcttgataaagacatctcaaaatgtttaccaatgttttaagaagctttgtgtgatattcttccaaatgtagttaccaaatataatatggtagaaaaggctaaatcatacttaatgagcaaattgaagtaagcttttaaagtatatttctcttttggtgaaaggccaatggagacattgtgaatttaagtgaacatttgcctcaagatgttaactataaacacactgcatacaattttcttctgaataacaaatgaatgcttattgctgcatgatgtaagcaaaagtcattatttttcctattcatttgaaataagttatggcttaaaatgcttttggagtttatttctcaaaattaaaatctggtcacatgagctttagtttgttttctggtttaaaaaataaaaaggtttctcttaacagtatttccagtgacaatgcaaggtaagtatatcaaaggaaatcaacagttgtgcttgggggctttttgttatgggatattgatttcttgttttttttccgtaacattgtctgctgcaatttaaataaaaattacgacattttaagatatttcatagacaaaccaaacaaaaatatatgtttttactttaaagtgaatgtttttctcttcagctgatctaaaaatgaaagcaagatatcttatgtagaaatattttgataatatttttacagtgagctttcccatgtttttatgtcttaagtttctttgctgcgtttatgtaggttgcacaagaacttttactcacttgtaattgtgcctcagactttttgaaagtctaccttctaaattgccccgacgatctagattctacatgttaccattggtttattcttgtgctttctgtatttaaaactttggctgtactaagcaaatgcaaggttataatttagctaatagtagtttacagacaattctgatgattatgatttcatttggtttaactaagctgtactagttcatttcataaggaaatgatactgtagacaaatgtaaataaagcctgtgagtcaagcatcaagtggtgtttgttagaaataaactagagatttttaaactctgaaaaaaaaaaaaaaaaaa

SEQ ID NO: 2642 - DNA, 1344 bp, Homo Sapiens
  NM_005466
gaaagagaacctgtaaacgctctcggaattatggcggcggtggatatccgagacaatctgctgggaatttcttgggttgacagctcttggatccctattttgaacagtggtagtgtcctggattacttttcagaaagaagtaatcctttttatgacagaacatgtaataatgaagtggtcaaaatgcagaggctaacattagaacacttgaatcagatggttggaatcgagtacatccttttgcatgctcaagagcccattcttttcatcattcggaagcaacagcggcagtcccctgcccaagttatcccactagctgattactatatcattgctggagtgatctatcaggcaccagacttgggatcagttataaactctagagtgcttactgcagtgcatggtattcagtcagcttttgatgaagctatgtcatactgtcgatatcatccttccaaagggtattggtggcacttcaaagatcatgaagagcaagataaagtcagacctaaagccaaaaggaaagaagaaccaagctctatttttcagagacaacgtgtggatgctttacttttagacctcagacaaaaatttccacccaaatttgtgcagctaaagcctggagaaaagcctgttccagtggatcaaacaaagaaagaggcagaacctataccagaaactgtaaaacctgaggagaaggagaccacaaagaatgtacaacagacagtgagtgctaaaggcccccctgaaaaacggatgagacttcagtgagtactggacaaaagagaagcctggaagactcctcatgctagttatcatacctcagtactgtggctcttgagctttgaagtactttattgtaaccttcttatttgtatggaatgcgcttattttttgaaaggatattaggccggatgtggtggctcacgcctgtaatcccagcactttgggaggccatggcgggtggatcacttgaggtcagaagttcaagaccagcctgaccaatatggtgaaaccccgtctctactaaaaatacaaaaattagccgggcgtggtggcgggcgcccatagtcccagctactcgggaggctgagacaggagacttgcttgaacccgggaggtggaggttgccctgagctgattatcatgctgttgcactccagcttgggcgacagagcgagactttgtctcaaaaaagaagaaaagatattattcccatcatgatttcttgtgaatatttgttatatgtcttctgtaacctttcctctcccggacttgagcaacctacacactcacatgtttactggtagatatgtttaaaagcaaaataaaggtatttgtata

SEQ ID NO: 2643 - DNA, 2703 bp, Homo Sapiens
  NM_005468
gccaagagtccgcaggatgcagtggacgaaggtgttggggctggggctgggggctgctgccctcttggggctggggatcatcctcggccactttgccatccccaaaaaagccaactcactggccccccaggacctggacctggagatcctggagaccgtcatggggcagctggatgcccacaggatccgggagaacctcagagaactctccagggagccacacctggcctccagccctcgggatgaggacctggtgcagctgctgctgcagcgctggaaggacccagagtcaggcctggactcggccgaggcctccacgtacgaagtgctgctgtccttccctagccaggagcagcccaacgtcgtggacatcgtgggccccactgggggcatcatccactcctgccaccggactgaggagaacgtgaccggggagcaaggggggccagatgtggtacaaccctatgctgcctatgctccttctggaaccccacagggcctcctcgtctatgccaaccggggcgcggaagaagactttaaggagctacagactcagggcatcaaacttgaaggcaccattgccctgactcgatatgggggtgtagggcgtggggccaaggctgtgaacgctgccaagcacggggtagctggggtgctggtgtacacagaccctgccgacatcaacgatgggctgagctcacccgacgaaacctttcccaactcctggtacctgcccccctcaggagtggagcgaggctcctactacgagtattttggggaccctctgactccctaccttccagccgtcccctcttccttccgcgtggaccttgccaatgtctccggatttcccccaattcctacacagcccattggcttccaggatgcaagagacctgctctgtaacctcaacggaactttggccccagccacctggcagggagcactgggctgccactacaggttgggtcccggcttccggcctgacggagacttcccagcagacagccaggtgaatgtgagcgtctacaaccgcctggagctgaggaactcttccaacgtcctgggcatcatccgtggggctgtggagcctgatcgctacgtgctgtatgggaaccaccgagacagctgggtgcacggggctgtggaccccagcagtggcaccgccgtcctcctggagctctcccgtgtcctggggaccctgctgaagaagggcacctggcgtcctcgcagatcaatcgtgtttgcgagctggggggctgaggagtttgggctcattggctccacggaattcacagaagagttcttcaacaagctgcaggagcgcacggtggcctacatcaacgtggacatctcggtgtttgccaacgctacccttagggtgcaggggacgccccctgtccagagcgtcgtcttctctgcaaccaaagagatccgctcaccaggccctggcgacctgagcatctacgacaactggatccggtacttcaaccgcagcagcccggtgtacggcctggtccccagcttgggttctctgggtgctggcagcgactatgcacccttcgttcacttcctgggcatctcctccatggacattgcctatacctatgaccggagcaagacttcagccaggatctaccccacctaccacacagcctttgacacctttgactatgtggacaagtttttggacccgggcttcagcagccatcaggctgtggcccggacagcggggagtgtgattctccggctcagtgacagcttcttcctgcccctcaaagtcagtgactacagtgagacactccgcagcttcctgcaggcagcccagcaagatcttggggccctgctggagcagcacagcatcagcctggggcctctggtgactgcagtggagaagtttgaggcagaagctgcagccttgggccaacgcatatcaacactgcagaagggcagccctgaccccctgcaggtccggatgctcaatgaccagttgatgctcttggaacggacctttctgaaccctagagccttcccagaggaacgctactacagccatgtgctctgggcacctcgcacgggctccgtagtcacattcccgggcctatccaatgcctgctccagggccagggacacagcttctggatctgaagcttgggctgaggtccagagacagctcagcattgtggtgacagccctggagggtgcggcagccaccctgaggcctgtggctgacctctgaccccagccctctttcttcagccctccctttactccaaccctctcctgcctgctttcctgagatgtcctggtcttccttggtgccagaagagggcactaccacaggaccctctcaagcttctcaggcaacagcttgaggtccctgaggggagtggcaagccctaatgcaactcaccctcatcctggtgcttaggtggcagagggtgggcagcaggggacagggatgggatggcaaaaccaccaactgcccttggtggcaggtgggtggagatgggatgcgtgccaacctcagatgccaactcaggtcatcaaggccaaggaccagtggcgaaagtgagtcttggggtaccttaggccttggctagtctgcgttcctctccctgcatgctgtgtatcctaactccctacaacagcccctcaaataaatcacatctagtgactggtaccaaaaaaaaaaaaaaaaaa

SEQ ID NO: 2644 - DNA, 1188 bp, Homo Sapiens
  NM_005469
ggttactagggcaatctgccggaagagtcaggttctgtgtatgtctccgcgtcttccgcggagcgggtgtgcagggcctgcagcattgaactagatgtcgtccccgcaggccccagaagatgggcagggctgtggcgaccgcggcgatccccctggggacctccgtagcgtcttggtcacgaccgtgctcaacctcgagccgctggacgaggatctcttcagaggaaggcattactgggtaccggccaagaggctgtttggtggtcagatcgtgggccaggccctggtggctgcagccaagtctgtgagtgaagacgtccacgtgcactccctgcactgctactttgttcgggcaggggacccgaagctgccagtactgtaccaagtggagcggacacgaacagggtcgagcttctcggtgcgctctgtgaaggccgtgcaacatgggaagcccatcttcatctgccaggcctccttccagcaggcccagcccagccccatgcagcaccagttctccatgcccactgtgccaccaccagaagagctgcttgactgtgagaccctcattgaccagtatttaagggaccctaacctccaaaagaggtacccattggcgctcaaccgaattgctgctcaggaggtccccattgagatcaagccagtaaacccatcccccctgagccagctgcagagaatggagcccaaacagatgttctgggtgcgagcccggggctatattggcgagggcgacatgaagatgcactgctgcgtggccgcctatatctccgactatgccttcttgggcactgcactgctgcctcaccagtggcagcacaaggtgcacttcatggtctcactggaccattccatgtggttccacgcccccttccgagctgaccactggatgctctatgaatgcgagagcccctgggccggtggctctcgggggctggtccatgggcggctgtggcgtcaggatggagtcctagctgtgacctgtgcccaggagggcgtgatccgagtgaagccccaggtctcagagagcaagctgtagccagaggtaccagcttcgcctggggcttcaagaacctcccatctatccccattcctgagacaggagttacagtcccttttggccctcacatccaataaagagactgataccactggaaaaaaaaaaaaaaaaaa

SEQ ID NO: 2645 - DNA, 5425 bp, Homo Sapiens
  NM_005475
cccgggccaccgcctccgcccggctgcccgcccggactgtcgcggcccgcggtggcgacggcggccgctgcaaagtttccccggcggcggcggcccgggggcgcatcctcccgcaactgtcaagcgctggcggcggaaatgatgaggcgctggccattttccgagcccgggtttcctgcctgagccccgctcgagcgagccgcgagcgaggagccggcgggcgggagaggacgcgcccagggcgggggcccgcccgccccctcgggatttcgagggcccgggggcgcgcgacgccatgggccggccgggcccagagctcctgtctctcagcccggccgcaccacctgggtctccgccatgaacgggcctgccctgcagccctcctcgccctcttccgcgccctcagcctccccggcggcggccccgcggggctggagcgagttctgtgagttgcacgccgtagcggcggcccgggagctggcccgccagtactggctgttcgcccgggagcatccgcagcacgcgccgctgcgcgccgagctggtgtcgctgcagttcaccgacctcttccagcgctacttctgccgcgaggtgcgcgacggacgggcgccgggccgcgactaccgggacacaggccgtgggcccccagccaaggccgaggcgtccccggagccaggccccggccccgccgcccctggcctgcccaaggcccgcagctctgaggagctggccccgccgcggccgcccgggccctgctccttccagcactttcgccgcagcctccgccacatcttccgccgccgctcggccggggagctgccagcggcccacaccgctgccgcccccgggacccccggagaggctgctgagacccccgcccggcctggcctggccaagaagttcctgccctggagcctggcccgggagccgccacccgaggcgctgaaggaggcggtgctgcgctacagcctggccgacgaggcctccatggacagcggggcacgctggcagcgcgggaggctggcgctgcgccgggccccgggccccgatggccccgaccgcgtgctggagctcttcgacccacccaagagttcaaggcccaagctacaagcagcttgctccagcatccaggaggtccggtggtgcacacggcttgagatgcctgacaacctttacacctttgtgctgaaggtgaaggaccggacagacatcatctttgaggtgggagacgagcagcagctgaattcatggatggctgagctctcggagtgcacaggccgagggctggagagcacagaagcagagatgcatattccctcagccctagagcctagcacgtccagctccccaaggggcagcacagattcccttaaccaaggtgcttctcctggggggctgctggacccggcctgccagaagacggaccatttcctgtcctgctacccctggttccacggccccatctccagagtgaaagcagctcagctggttcagctgcagggccctgatgctcatggagtgttcctggtgcggcagagcgagacgcggcgtggggaatacgtgctcactttcaactttcaggggatagccaagcacctgcgcctgtcgctgacagagcggggccagtgccgtgtgcagcacctccactttccctcggtcgtggacatgctccaccacttccagcgctcgcccatcccactcgagtgcggcgccgcctgtgatgtccggctctccagctacgtggtagtcgtctcccaaccaccaggttcctgcaacacggtcctcttccctttctcccttcctcactgggattcagagtcccttcctcactggggttcagagttgggccttccccaccttagttcttctggctgtccccgggggctcagcccagagggtctcccagggcgatcctcaccccccgagcagatcttccacctggtgccttcgcccgaagaactggccaacagcctgcagcacctggagcatgagcctgtgaatcgagcccgggactcggactacgaaatggactcatcctcccggagccacctgcgggccatagacaatcagtacacacctctctgaccagtgaggaattccaggcctcaacagctgcccttgaggagcacaggcagaagtgtgaacttgtgaatgtaattgatctttccttccttccagagaaagatttaagggacactgttaactgctcgtgccagtttggaagtgacccttctattaggcctgttgaagggccctcctgtaggtttcatctatccacctggctttctccttattgtttacagatgtagttcttgttagaggatgccgctagctcctgcccggggtccctatgcccagtccccgttactcttagagaaaggagttggggtgagggccagagctggcagtggaaacttgttctctttttcactgacactgtcacagcggatgacagactttctacggggaggagggggggatcatcaggaagcccagaacactaacaagcggttctcccatctaccgtcagtccacatggcaggtctgctgtgtccacaccacagatgaccacatctaatcctgcttctactctcagctttaggacaaaagctctgtcagaggcacaagctgaaggtcaaaaatgatttaaaacattttacctcagactaatttctttaaaggattcaggttcaaaacttaaccactgcttatttcagtgcactgtttcaactaacacccatgctatttttgtagtcagaaacagctatgcaaaccctacctaatttacagtctgagccagcatgctggcttgtctactgcatcctcgggacagtcacctgccactgagtggccactgtccttcctaaatgtcaagaagtgaagtatgtcaccctttcagggaaattcaggcaattactgaaataggagggtggcaagaacagttctatcctggtgccttacgaataaaaaactggattctggtttacagcagctttacagtgatagttaaattaactggggctaggggaagagcaagcaaaaagggaagaaggactcctaggccctttctagtaaatccttcagcaacaaggctggcttggtgccctccaagcatctaatggcttattaaattatcccacaagtgggttttaggctccttttttgagccaaaatggaagctgggaatctggtgccataactaatgagaaactcctttaatagcccacaatcagtgttctgttctagctggctactgcttcactggattgagaatctatctatctccttgcacacatgggcacacacaatctccaccatccagggaggtcctgaagtcaaatctctatctatacaagtgatacaattcatagggggctggctcctcccagaacctgtctggaggctcagaaacgggggcagtgacagtggagtcagctgctcttgggtgccagcagagccattcagtacaacccccaggctcacagcagtggcttctaggaaactgggagtttagatcagctttacagatacatcgatcagaggctaaaatgaaacctcagcctaaaactcataggactgactgcctgggaggagggttaggtctgcttcttccacttatacttagtctctgtgctccaagaggtcaaatttttgcttctagaatttccttggggtctttcagagggtgggggaacaaacccctatgcacttttcttttttttttttttgagatggagtttctcttgtcaaccgggctggagtgcagtggtgcaatcttggctcactgcaacctccaccttcctggttcaagcgattctgcctcgacctctcaagtagctgggattacaagcaccagccaccatgcctggctaattttgtatttttagtagagacagggtttcaccatgttggccaggctggtctcgaatgtctgacctcaggtgatccacccgccttggcctcccaaagtgctgggattacaggcgcgagccaccgcgcccagcctacaccacttttagtaccaacactcttgggtgatttcatggaccctaaagcagacctgacactgatccagatttgcagtccatttttaaggacacctgtctttatttcctcaaagtcaagcagctttctctggaaaatgaatgctaattagtgtgaaccaaaagagtaagtaagagtctgaagtttttttaaaggagaaagcttattatggaaagtcactggtcctcccctccgcacaggaaaggtacccagtagataatgaaccaaattaagttccctccctccagccagaagttaaacatctgggatatgacgtcttcatgccaggggcactcatttcttagcagcctctctacatacatctctcaggtggtgccaagaggcacaccaggtagagcaaacttagcagctctgactaacaggctgcaaagtgcaagttcagattctgtggcagagatttggaaggcacccacctccagactgcttcccgtccaagttaccaggacagctcaaaaacatgctgacagaaaactcccatggctctaggaagaagtgacactaagccaacacctttctttatgtgggagcagaatcagctgatgaaggggtgggcagcagtgtggggcaggcaccccactggctgcagctagcccaccataggcacagcacatcccaccactctccttccagtcctgaccaggccccagccggcaacttctaccgagagccatggctcaacaccaaactggacagtagacatcatgatccctccagttagctctaattacagaccccaccagtacagcttgacagctcccggcaccatcccttccttcatctgacttattgaacttttacaaactaacagtcaccagcaccaaagaattaagtcaactaacctgccttgaattttagaccagcaatccatatggctttatctggtataaatcttctgcctttgatcatttctggaccgtaggaaaaaggaatagcaatcattaaaatcttgggccagagaacactatttttacataacagtttcttaacctaaagtcaaggccttggactcttccctgagggttgcctgagattccttcatgctttctattcaggactaagtcccttactgcaaatgtgttagctctaacatctcccacaagctagaggaacttgcgagtatattaacaaggacacatctgacatcctgtgtttggttagaatatacagcacattgtgataacataaagtggattcatcttgtatcattataggcagaaggtatttggcaaatttttatgtattgttttatgtactgtacaagtaacttattcttgaataatgcaaattttgctataatgtacaaattgctatatgtgaattaaaaagttttcagaatcttgaaaaaaaaaaaaaaaaaaaa

SEQ ID NO: 2646 - DNA, 5329 bp, Homo Sapiens
  NM_005476
gtgggcgtggctgggcgagcgaggagtggggacaaggtcgagcgacgagtcgtctacccgcgcgcccgagcgcggaaaccgaggggcaggctcgcgctctgcctgcttcgtggcgcttggttcgtccctcgcccgaggagcgcggtggcggcgtgggagggagcctctgacggcgtctggaactctattttaagaacctctcaaaacgaaacaagcaaatcatggagaagaatggaaataaccgaaagctgcgggtttgtgttgctacttgtaaccgtgcagattattctaaacttgccccgatcatgtttggcattaaaaccgaacctgagttctttgaacttgatgttgtggtacttggctctcacctgatagatgactatggaaatacatatcgaatgattgaacaagatgactttgacattaacaccaggctacacacaattgtgaggggagaagatgaggcagccatggtggagtcagtaggcctggccctagtgaagctgccagatgtccttaatcgcctgaagcctgatatcatgattgttcatggagacaggtttgatgccctggctctggccacatctgctgccttgatgaacatccgaatccttcacattgaaggtggggaagtcagtgggaccattgatgactctatcagacatgccataacaaaactggctcattatcatgtgtgctgcacccgcagtgcagagcagcacctgatatccatgtgtgaggaccatgatcgcatccttttggcaggctgcccttcctatgacaaacttctctcagccaagaacaaagactacatgagcatcattcgcatgtggctaggtgatgatgtaaaatctaaagattacattgttgcactacagcaccctgtgaccactgacattaagcattccataaaaatgtttgaattaacattggatgcacttatctcatttaacaagcggaccctagtcctgtttccaaatattgacgcagggagcaaagagatggttcgagtgatgcggaagaagggcattgagcatcatcccaactttcgtgcagttaaacacgtcccatttgaccagtttatacagttggttgcccatgctggctgtatgattgggaacagcagctgtggggttcgagaagttggagcttttggaacacctgtgatcaacctgggaacacgtcagattggaagagaaacaggggagaatgttcttcatgtccgggatgctgacacccaagacaaaatattgcaagcactgcaccttcagtttggtaaacagtacccttgttcaaagatatatggggatggaaatgctgttccaaggattttgaagtttctcaaatctatcgatcttcaagagccactgcaaaagaaattctgctttcctcctgtgaaggagaatatctctcaagatattgaccatattcttgaaactctaagtgccttggccgttgatcttggcgggacgaacctccgagttgcaatagtcagcatgaagggtgaaatagttaagaagtatactcagttcaatcctaaaacctatgaagagaggattaatttaatcctacagatgtgtgtggaagctgcagcagaagctgtaaaactgaactgcagaattttgggagtaggcatttccacaggtggccgtgtaaatcctcgggaaggaattgtgctgcattcaaccaaactgatccaagagtggaactctgtggaccttaggacccccctttctgacactttgcatctccctgtgtgggtagacaatgatggcaactgtgctgccctggcggaaaggaaatttggccaaggaaagggactggaaaactttgttacacttatcacaggcacaggaatcggtggtggaattatccatcagcatgaattgatccacggaagctccttctgtgctgcagaactgggccaccttgttgtgtctctggatgggcctgattgttcctgtggaagccatgggtgcattgaagcatacgcctctggaatggccttgcagagggaggcaaaaaagctccatgatgaggacctgctcttggtggaagggatgtcagtgccaaaagatgaggctgtgggtgcgctccatctcatccaagctgcgaaacttggcaatgcgaaggcccagagcatcctaagaacagctggaacagctttgggtcttggggttgtgaacatcctccataccatgaatccctcccttgtgatcctctccggagtcctggccagtcactatatccacattgtcaaagacgtcattcgccagcaggccttgtcctccgtgcaggacgtggatgtggtggtttcggatttggttgaccccgccctgctgggtgctgccagcatggttctggactacacaacacgcaggatctactagacctccaggaacagacatggaccttctctccagagctcctgagtggaatcaagttcttgtctttaggatgaccgtttcttaacaatcaaatctggtattgaactgcaggtgactttggcagagaaatgttttcacttttggtctcctcttccagagtcacctttccccactcctatttttgtagatgctattctttctgatgtcttcttactaggggtcattttagctcaaaccctgtaagttacagtcacaattttctgtgccaaagcagctacaataatagagaggaagccttcttagaactctgcttactaatgtattaataccactgagaccttcaggccttgcctgggatatcacttcatcctgaagtttgcattaataatccttccaggccgggcacagtggctcacgcctgtaatcccagcactttgggaggccgaggcgggcggatcacgaggtcaggagatcgagaccgccctggctaacatggtgaaacatggtgaaaccccgtctctactaaaaatacaaaaaattagctgggtgtggtggcgggtcccagctactcgggaggctgaggcaggagaatggcatgaaccagggaggcggagctggcagtgaactgagaccgcaccactgcactccagcctgggtgacagagcaagactccatctcaaaaataataataataaataataataataataataataataataataatccttccagctgggcgcagtggctcacgcctgtaatcccaacattttgggaggccgagatgggcggatcacctgaggtcaggagttcaagaccagcctggccaacatggtgaaaccccatctctactaaaatacaaaaattagccgggcgtggtggcatgtgcctgtagtcccagctactcgggaggctgaggcaggagaattgcttgaacccgggaggcggaggttgcagtgagccgagatcatgccactgcactccaccctgggtgacagagcgagactccgtctacacacacacacacacacacacacacatccttcctcctctaaccccaaactaagatcacagaaggtgatccagtcagagaacagagggaaatcttaccaggaagggcttaagtacacttttttttaaaacagctttattgtttttaaagcctacaatttgataagccttgacatatgtatacctgtgaaagcatcaccacaatcaagacactggacatatctatcactcccccatctcagatatcccccctaatcctggataccatttgttgaaagatgttattactctagctgaacttacaagagactttagaccagggatctaaattacagtggccttagtgaccttgtccttatcttcttaggacagctgagaagccactgggacttagagcctttaaaaggagattaactgtcccaaaaggatctttgctactgaccagcagacacttcttccttcagtagcctttcatactgtgttgagtaacaccctagggtgtccattaaagttttgagttttacctagagcccagagccatgaatcaggattctgtctacatgattcgtgttttcattggtgtcaaaatacaaaagccaaagttctggctatgaattgttaacttggaagaaatactaactgccaccacttattaagtgcctactgtgtgccaggctctgaactaggtgcttcatatacattatcctaaattatctcaacatatgaggtaggtgttttaatttttattttatagaacttggtgtgtttgactgttaagctatggggctagagagagggtttgatcccaggtccctctgtgcttttgctgctgagccacacaacctctcatttcaaaaacactttcaaaatgctaacatattctaattcactctaggccaccaaaaactttaatactaatatctgatttgtaaatgacttaatgtatccttgaccctatcagctgaatttaatgaaatattcctctctgctgtgaaattttaccagtatagtatttggtctagtgacaggtgttctatttttttgagacgggtctcactctgtcacccaggctggagtgcagtggctcaatgcaacctctgccccccaagttcaagtgattctcctgcctcagcctcttgagtagctgggattacaggcacatgcaccacgcccggctgatttttttttgtatttttagtagacagggtttcaccatgttggccaggctggtcttgaactcctgacctcaggtgatccgcccgcctctgcctcccaaagtgctgggattacaggtgtaagccatcacacctggccctagtgacaggtttttatgggtacttttagatgatctaagaaatcatgtgcatatatctttcagatttctattttgggaaaatgaaggtttctacaacatattgtttcagtgttcaaataaactgaaggactcaacattacatttgaactatatccttcctagtgggttagtgtgaaaaagagtttggctgattcctaaaactctgccagccctgcagtaatctccagggcctggttattgttcagacattccatggtgattcctgggaaggaagcttggctgctcagtttctgagtctggggtgagataatgttctgggaagggacatctgttctttggtgtaatctctcatggtgaaatctgctctgtacatcagacaattgcattgctaccaagtttcataccaaatatttgaaaggatggtattgaatctaaaaccaaatattagtttttattaaactcatgggaaggctaatatattccaacgtaaattattacatatggttaagtaattgcatgttaatttattttaatgtaaatatttttgttactgttctgagccaaattctaaagaaaaaataaatacatttccttgttgaaaaaaaaaaaaaaaaaa

SEQ ID NO: 2647 - DNA, 2651 bp, Homo Sapiens
  NM_005479
ggattccggctcccgcggctgcaggcgcgcggctagagtgcctggcgggctccggcttccgcgtccgccccggccccggtccagacttagtcttcagctccgcgcccgctccgccgcggcccaccgcgcccgccggcagccgagcccccagcgacgcccgcacagctccgggtgcccagacagggggccatgccgtgccggagggaggaggaagaggaagccggcgaggaggcggagggggaggaagaggaggaggacagcttcctcctactgcagcagtcagtggcgctgggcagctcgggcgaggtggaccggctggtggcccagatcggcgagacgctgcagctggacgcggcgcagcacagcccggcctcgccgtgcgggcccccgggggcgccgctgcgggccccggggcccctggctgcggcggtgccggcggacaaggccaggtccccggcggtgccgctgctgctgccgcccgcgttggcggagactgtgggcccggcgccccctggggtcctgcgctgcgccctgggggaccgcggccgcgtgcggggccgcgctgcgccctactgcgtggccgagctcgccacaggccccagcgcgctgtccccactgccccctcaggccgaccttgatgggcctccgggagctggcaagcagggcatcccgcagccgctgtcgggtccgtgccggcgaggatggctccggggcgccgccgcctcccgccgcctgcagcagcgacgcgggtcccaaccagaaacccgcacaggcgacgacgacccgcaccggcttctgcagcagctagtgctctctggaaacctcatcaaggaggccgtgcgaaggcttcattcgcgacggctgcagttacgtgcaaagcttccccaacgcccgctcctgggacctctgtcggccccggtgcatgaacccccttcgcctcgcagccctcgcgcggcctgcagtgaccctggcgcctccgggagggcgcagctcagaactggcgacggcgttcttgtgcctggcagctaacacgcccggggtggccacagcgccagcctcagactggagggcaaggggttcccttgagggctgcagttctactcaggctggtggagaactctggcttttggaagcgagagtaaaaagctaatgacgaggaaccgaaaaatcgcgagtgtttcgcgggtaactggggttgagggccaaaatatttggaatgaaggactttggccctatttaaggcagattttacagagcgcacctcaaacgtacaagtcagtaggactccttatttggcgtgacccgacctggccgcggagcctgcatttcctcgcagcctctcagtgccctccagccccgcgaccatgtggccacaatccacgcttctccggatcgcggtgcgccggaaccacggaggatgatgccagttacttgctttaccttttcagggctggctcctgatccactttgggggaggagaacatgagtagataatttcagggtgcagcccaatctgccagacttaaaaaaaccatcttgtgtctttggaggtgctgcttaataccaaacatgcggtgccatgaagggaccctttgggggttgaataggagttaacccctgcgctctctttgcaactgtctctcttctcagagtggtgggggaaggctgtacgacacgggtggggaaaggaggtgggggcggggagtattgaatggtggtggaagggtagagaggcgcggagtgaaccccacgccctgtctaaagtgtattttcagagccggcccgcctctcctcggttcaaggtcactgtttcctgggcacgcactgggttgcgggacagagtagccaggttctgccggtgctcggagaagagcgcagtgttttgcaagtgctggagtctcctgaggacacgcgcgtcgccgccaccgcgggtgtgggaaagcgcggacgtgctgggcggctgtgcttcggtaggcgaccaccgcccctggccgcgctccgggctttcacggaaactcccgagaccgggccctgggttcctcctctcctactcggctctgcagtcctactcaagcgggtggctctgggatcctgggggcctgggttgggggctagggagacgccatgtgatggacactccagggacacacagcctagcacagcagcttataatgggctctccggggccatttgcaataacagctgcaattccctggatagacgagttgatttcctccctctgcccctcccccagccatgccagctggcctttgtaagtgcaggaaaccgagtagaaaatgtgaccctccaaatggagaagctgcaggctttgccattgtgaaccatggtgaagtgcttggaacatactgttcactcactctaaaggcgctgagactgtgctgttgttctcgtttttatagtcaatggcttgttcatcatccagatgtggctactgacatatctacacttcgcaccggagtgtctggaattgtggctatcctgattataggattttaacttaactgaaatgcctgctttgaataaatgtgttgggttttttgtttggttttattttatacttgccatcagtgaaaaagatgtacagaacacatttctctgatctccataaacatgaaaacacttgaaatctc

SEQ ID NO: 2648 - DNA, 2618 bp, Homo Sapiens
  NM_005480
attggacggctgagtctggctacgcgggcctccgcgggagcgcgaccgggccaatcaagagcttggcgtattttacaaactgagaaagtagctccagcagcacccgagagggtcaggagaaaagcggaggaagctgggtaggccctgaggggcctcggtaagccatcatgaccacccggcaagccacgaaggatcccctcctccggggtgtatctcctacccctagcaagattccggtacgctctcagaaacgcacgcctttccccactgttacatcgtgcgccgtggaccaggagaaccaagatccaaggagatgggtgcagaaaccaccgctcaatattcaacgccccctcgttgattcagcaggccccaggccgaaagccaggcaccaggcagagacatcacaaagattggtggggatcagtcagcctcggaaccccttggaagagctcaggcctagccctaggggtcaaaatgtggggcctgggccccctgcccagacagaggctccagggaccatagagtttgtggctgaccctgcagccctggccaccatcctgtcaggtgagggtgtgaagagctgtcacctggggcgccagcctagtctggctaaaagagtactggttcgaggaagtcagggaggcaccacccagagggtccagggtgttcgggcctctgcatatttggcccccagaacccccacccaccgactggaccctgccagggcttcctgcttctctaggctggagggaccaggacctcgaggccggacattgtgcccccagaggctacaggctctgatttcaccttcaggaccttcctttcacccttccactcgccccagtttccaggagctaagaagggagacagctggcagcagccggacttcagtgagccaggcctcaggattgctcctggagaccccagtccagcctgctttctctcttcctaaaggagaacgcgaggttgtcactcactcagatgaaggaggtgtggcctctcttggtctggcccagcgagtaccattaagagaaaaccgagaaatgtcacataccagggacagccatgactcccacctgatgccctcccctgcccctgtggcccagcccttgcctggccatgtggtgccatgtccatcaccctttggacgggctcagcgtgtaccctccccaggccctccaactctgacctcatattcagtgttgcggcgtctcaccgttcaacctaaaacccggttcacacccatgccatcaacccccagagttcagcaggcccagtggctgcgtggtgtctcccctcagtcctgctctgaagatcctgccctgccctgggagcaggttgccgtccggttgtttgaccaggagagttgtataaggtcactggagggttctgggaaaccaccggtggccactccttctggaccccactctaacagaacccccagcctccaggaggtgaagattcaacgcatcggtatcctgcaacagctgttgagacaggaagtagaggggctggtagggggccagtgtgtccctcttaatggaggctcttctctggatatggttgaacttcagcccctgctgactgagatttctagaactctgaatgccacagagcataactctgggacttcccaccttcctggactgttaaaacactcagggctgccaaagccctgtcttccagaggagtgcggggaaccacagccctgccctccggcagagcctgggcccccagaggccttctgtaggagtgagcctgagataccagagccctccctccaggaacagcttgaagtaccagagccctaccctccagcagaacccaggcccctagagtcctgctgtaggagtgagcctgagataccggagtcctctcgccaggaacagcttgaggtacctgagccctgccctccagcagaacccaggcccctagagtcctactgtaggattgagcctgagataccggagtcctctcgccaggaacagcttgaggtacctgagccctgccctccagcagaacccgggccccttcagcccagcacccaggggcagtctggacccccagggccctgccctagggtagagctgggggcatcagagccctgcaccctggaacatagaagtctagagtccagtctaccaccctgctgcagtcagtgggctccagcaaccaccagcctgatcttctcttcccaacacccgctttgtgccagcccccctatctgctcactccagtctttgagacccccagcaggccaggcaggcctcagcaatctggcccctcgaaccctagccctgagggagcgcctcaaatcgtgtttaaccgccatccactgcttccacgaggctcgtctggacgatgagtgtgccttttacaccagccgagcccctccctcaggccccacccgggtctgcaccaaccctgtggctacattactcgaatggcaggatgccctgtgtttcattccagttggttctgctgccccccagggctctccatgatgagacaaccactcctgccctgccgtacttcttccttttagcccttatttattgtcggtctgcccatgggactgggagccgcccacttttgtcctcaataaagtttctaaagta

SEQ ID NO: 2649 - DNA, 4626 bp, Homo Sapiens
  NM_005482
actgcctccgccccttcaggtgcgggaagtctgaagccggtaaacatggccgtcaccgacagcctcagccgggctgcgactgtcttggcaactgtgttgctcttgtccttcggcagcgtggccgctagtcatatcgaggatcaagcagaacaattctttagaagtggccatacaaacaactgggctgttctggtgtgtacatcccgattctggtttaattatcgacatgttgcaaataccctttctgtttatagaagtgtcaagaggctaggtattcctgacagtcacattgtcctaatgcttgcagatgatatggcctgtaatcctagaaatcccaaaccagctacagtgtttagtcacaagaatatggaactaaatgtgtatggagatgatgtggaagtggattatagaagttatgaggtaactgtggagaattttttacgggtattaactgggaggatcccacctagtactcctcggtcaaaacgtcttctttctgatgacagaagcaatattctaatttatatgacagggcatggtggaaatggtttcttaaaatttcaagattctgaagaaattaccaacatagaactcgcggatgcttttgaacaaatgtggcagaaaagacgctacaatgagctactgtttattattgatacttgccaaggagcatccatgtatgaacgattttattctcctaacataatggctctagctagtagtcaagtgggagaagattcactctcgcatcaacctgatcctgcaattggagtccatcttatggatagatacacattttatgtcttggaatttttggaagaaattaacccagctagccaaactaatatgaatgacctttttcaggtatgtcccaaaagtctgtgtgtgtctactcctggacatcgcactgatctttttcagagggatcctaaaaatgtactgataactgatttctttggaagtgtacggaaagtggaaattacaacagagactattaaattgcaacaggattcagaaatcatggaaagcagctataaggaagaccagatggatgagaaactaatggaacctctgaaatatgctgaacaacttcctgtagctcagataatacaccagaaaccgaagctgaaagactggcatcctcctgggggctttattctgggattatgggcacttattatcatggttttcttcaaaacttatggaattaagcatatgaagttcattttttagacttgatgatgaatgaagaatgcatggaggactgcaaacttggataataatttatgtcattatatatttttaaaaatgtgtttctcttgtatgaattggaaataagtataaggaaactaaatttgaatcaactattaattttataacttaaagaaaaataattgttaatgcaactgcttaatggcactaaatatattccagttttgtattttgtgtattataaaagcgaatgagacagagatcagaatacattgactgtttttgaaaatagtaatttccccttatccccttttcatttggaaaagaaacaattgtgaagacattaaattctcactaacagaagtaactttggttaattattttttgtatatcctcccaatcttttgacttatgcacatattttttcccaatatggagatcatatggaatgtactattttgtaatgtcttttttcattttacaatgtattatcaaccttttccctctcaaaaatacattgtgaatgactgcatagtattcactttatgaatatttaattcatttcacagtcttctattgttggaccacttacattgtaccaaatgttttcctttggtttattctttaatgtattaatattttactgctggtcactcatggaatcctgcagctttaattaaaagcaaagatgaaaaattggttttttaatctatggcactgacaatctccaggaccttatatgtttgttgtcagtttatttgggaaattttagacctttgataatttcacgtactgactgctcaagagaaacataccccattgtttttcatttgtaagcgttctgtgatcttctacaattggtcacgtcctcttcattttccatcttgaaagagagagccaacaaggactttatttcattctgttttaggtaaacctccttgcccactggctgtatctatactttccttgagaaaaatcccataaagtggatggacctgtgaagaaaatgtatgcttatggcctagccttcatgtctggctgatgtatcctataaggcagtaagccccttttctagtctctggtaagatgcaagagctcatatccccatcactgacattttagtttggaaataatattgagactgtgctatgaccaacccctgatgttgttttttcttttcaaacttttgcatatgagtagaggaaaagcctaaaagttaagtatttatgtctggggggataccttcaggtgtcttatctgttttatgcaagaatttatgtgttcatctttattcagtgcaaagatttttttttaaattttgtttataattgtaggtaacattaagacaactcttcctccacaagaaaacctcctaaaattaatattccttaagatttgtttttccttttgcacttataatattaccttttaattgcatgcaagattgtcatacttttcaaaaggcaaaggattgactgtgttatctccctagttagaacaaatgatattgaggctttttgccagctctgaatctttattttaattgatctttttattgatgtgttatataaatgaggaagaaaaattttgtctgattatgtgaaggatctttctgtacatgaaaagaagggaaaataaacttgcaattgaatagactgattatagtagcactgagacacaaaaagattgaccatgttgccctccagacactcatacaaggtcgtggacaccacggtgaggcggagctatttagggtggtaaaggaattatgattgttcttgagccaaagtaatttagtttgaatataatgaaacataccctgtaaagactgctagaaagtaaaaggattcgtcttcagaggttgtagaaggtgcccttcttagttaaaaccaaactgggaaaagtaatactggataaaatattcaggataaattttgcctcagcagaatttcaaagggcagttgttcctctgtttcattattgaatcttcagaatatagttaaagccaaaagcttaaaatatgttaaatgtttcacttataaccataatctttttacatagagcatactctgccttcataataactaaatcctctgcatgtggtagatgagtacgtttaggaaatattgtcagtgcaattaaatggcctacactttaaacagtatcataaaaacaaatccttaaatatattctacttgagtcacaaaagctgaacaacagaaaggtgttttgtttttgcctttctcacagtgttgtggtgagaatcagatgagatagtattttgactaaacacttctgaaattgtaaatatatggtggcattattgttcttatgtcggcttaggaggataccaaaggggaagttaatggtcacagtgcacttatgtagctttctaagctactcaatgtgattcttgttctctttgctgttctttttctcctcccccatggtgtccttcagagagaaaaggaatgtagataaatgaatccctgcagatgtgtcctgacatttcagggagggacagggtataatgatgccatcctgcaaaggcagcctgtgtgagaaaaagaaatcaaataatgtggattttaaaattacgaaagacattcatttgcagtttatgaaaggaaaatgtagtttggatacaaagctgattaaattggatcaagaaatattagaattaaatgcaaaaaataatccatgcatttatggttttgatttttatatattcccagctagttgaaaatgatgattcccacaagaagcataactcagcttgtttctgcttactgagtattttctactatggtatatattgataacatttcttccattatgtatgttgtataccagagttacagttactgtgggaatcataatttgaaattttgactcctgtgtttctggaatctttacaacaaatgttgcattaacatataacttttttcagttgactttaccaaaattaagcccatctttagtagatactgttttaacatgtgaaagaaatacgttataaacataccacaagatatggctataaaacaatgagatcagtatccatttttgctttaaagaattggccttattgcttcagtgtcacatctcatactcaagggcatttactacaaagaaagagttctccaatattgctgttctgttgctgcctgccctatttacacatgtacctgctacttaaataggaaagcctttcaattcatggacaatacaccttggtggtaaccaggcttttatttttatttttttttcttagtgtaaaaactgtactgttttggaaatgtgctgtgaaatattaggtttaactgtgtagatcctagaataaggggatttatatagatgaagttgtaaccaagaaactggttattaaaaatttatttactccaaacatggaaa

SEQ ID NO: 2650 - DNA, 1904 bp, Homo Sapiens
  NM_005484
gggttgatgacgtcagcgttcgaattccatggcggcgcggcggcgacggagcaccggcggcggcagggcgagagcattaaatgaaagcaaaagagttaataatggcaacacggctccagaagactcttcccctgccaagaaaactcgtagatgccagagacaggagtcgaaaaagatgcctgtggctggaggaaaagctaataaggacaggacagaagacaagcaagatggtatgccaggaaggtcatgggccagcaaaagggtctctgaatctgtgaaggccttgctgttaaagggcaaagctcctgtggacccagagtgtacagccaaggtggggaaggctcatgtgtattgtgaaggaaatgatgtctatgatgtcatgctaaatcagaccaatctccagttcaacaacaacaagtactatctgattcagctattagaagatgatgcccagaggaacttcagtgtttggatgagatggggccgagttgggaaaatgggacagcacagcctggtggcttgttcaggcaatctcaacaaggccaaggaaatctttcagaagaaattccttgacaaaacgaaaaacaattgggaagatcgagaaaagtttgagaaggtgcctggaaaatatgatatgctacagatggactatgccaccaatactcaggatgaagaggaaacaaagaaagaggaatctcttaaatctcccttgaagccagagtcacagctagatcttcgggtacaggagttaataaagttgatctgtaatgttcaggccatggaagaaatgatgatggaaatgaagtataataccaagaaagccccacttgggaagctgacagtggcacaaatcaaggcaggttaccagtctcttaagaagattgaggattgtattcgggctggccagcatggacgagctctcatggaagcatgcaatgaattctacaccaggattccgcatgactttggactccgtactcctccactaatccggacacagaaggaactgtcagaaaaaatacaattactagaggctttgggagacattgaaattgctattaagctggtgaaaacagagctacaaagcccagaacacccattggaccaacactatagaaacctacattgtgccttgcgcccccttgaccatgaaagttatgagttcaaagtgatttcccagtacctacaatctacccatgctcccacacacagcgactataccatgaccttgctggatttgtttgaagtggagaaggatggtgagaaagaagccttcagagaggaccttcataacaggatgcttctatggcatggttccaggatgagtaactgggtgggaatcttgagccatgggcttcgaattgccccacctgaagctcccatcacaggttacatgtttgggaaaggaatctactttgctgacatgtcttccaagagtgccaattactgctttgcctctcgcctaaagaatacaggactgctgctcttatcagaggtagctctaggtcagtgtaatgaactactagaggccaatcctaaggccgaaggattgcttcaaggtaaacatagcaccaaggggctgggcaagatggctcccagttctgcccacttcgtcaccctgaatgggagtacagtgccattaggaccagcaagtgacacaggaattctgaatccagatggttataccctcaactacaatgaatatattgtatataaccccaaccaggtccgtatgcggtaccttttaaaggttcagtttaatttccttcagctgtggtgaatgttgatattaaataaaccagagatctgatcttcaagcaagaaaataagcagtgttgtacttgtgaattttgtgatattttatgtaataaaaactgtacaggtctaaaaaaaaaaaaaaaaaa

SEQ ID NO: 2651 - DNA, 2360 bp, Homo Sapiens
  NM_005485
gtatccgggcccaaggtcaccgcgcgaccggcagatgcgtgctgcaggccccggccacatgagcagcgctacggacgcgactgccccggccttggatatgccagatcgagtgtccacccgtccgtgggactggtcgcctgactcggcctgccccagcctctgcttcaccccactggtggccaaatagccgatgtctaatcccccacacaagctcatccccggcctctggcgattgttgggaattctctccctaattcacgcctgaggctcatggagagttgctagacctgggactgccctgggaggcgcacacaaccaggccgggtggcagccaggacctctcccatgtccctgcttttcttgggacagccatggctccaaagccgaagccctgggtacagactgagggccctgagaagaagaagggccggcaggcaggaagggaggaggaccccttccgctccaccgctgaggccctcaaggccatacccgcagagaagcgcataatccgcgtggatccaacatgtccactcagcagcaaccccgggacccaggtgtatgaggactacaactgcaccctgaaccagaccaacatcgagaacaacaacaacaagttctacatcatccagctgctccaagacagcaaccgcttcttcacctgctggaaccactggggccgtgtgggagaggtcggccagtcaaagatcaaccacttcacaaggctagaagatgcaaagaaggactttgagaagaaatttcgggaaaagaccaagaacaactgggcagagcgggaccactttgtgtctcacccgggcaagtacacacttatcgaagtacaggcagaggatgaggcccaggaagctgtggtgaaggtggacagaggcccagtgaggactgtgactaagcgggtgcagccctgctccctggacccagccacgcagaagctcatcactaacatcttcagcaaggagatgttcaagaacaccatggccctcatggacctggatgtgaagaagatgcccctgggaaagctgagcaagcaacagattgcacggggtttcgaggccttggaggcgctggaggaggccctgaaaggccccacggatggtggccaaagcctggaggagctgtcctcacacttttacaccgtcatcccgcacaacttcggccacagccagcccccgcccatcaattcccctgagcttctgcaggccaagaaggacatgctgctggtgctggcggacatcgagctggcccaggccctgcaggcagtctctgagcaggagaagacggtggaggaggtgccacaccccctggaccgagactaccagcttctcaagtgccagctgcagctgctagactctggagcacctgagtacaaggtgatacagacctacttagaacagactggcagcaaccacaggtgccctacacttcaacacatctggaaagtaaaccaagaaggggaggaagacagattccaggcccactccaaactgggtaatcggaagctgctgtggcatggcaccaacatggccgtggtggccgccatcctcactagtgggctccgcatcatgccacattctggtgggcgtgttggcaagggcatctactttgcctcagagaacagcaagtcagctggatatgttattggcatgaagtgtggggcccaccatgtcggctacatgttcctgggtgaggtggccctgggcagagagcaccatatcaacacggacaaccccagcttgaagagcccacctcctggcttcgacagtgtcattgcccgaggccacaccgagcctgatccgacccaggacactgagttggagctggatggccagcaagtggtggtgccccagggccagcctgtgccctgcccagagttcagcagctccacattctcccagagcgagtacctcatctaccaggagagccagtgtcgcctgcgctacctgctggaggtccacctctgagtgcccgccctgtcccccggggtcctgcaaggctggactgtgatcttcaatcatcctgcccatctctggtacccctatatcactcctttttttcaagaatacaatacgttgttgttaactatagtcaccatgctgtacaagatccctgaacttatgcctcctaactgaaattttgtattctttgacacatctgcccagtccctctcctcccagcccatggtaaccagcatttgactctttacttgtataagggcagcttttataggttccacatgtaagtgagatcatgcagtgtttgtctttctgtgcctggcttatttcactcagcataatgtgcaccgggttcacccatgttttcataaatgacaagatttcctccttttttaa

SEQ ID NO: 2652 - DNA, 4220 bp, Homo Sapiens
  NM_005487
tccttctccaagatggcggcgatcggcggcgttgaggcgggatccgggcgagccgagtgaagacctggtcctgtagacgggaaggagcctggacacagtgacacattctcaaaggccctgcaggaccaccatggcttatgatgactccgtgaagaaagaagattgttttgatggtgatcatacctttgaggacataggacttgcagctggccgaagccaacgagagaaaaaacgttcttacaaagattttttaagggaagaggaagaaattgctgctcaggtcaggaattcttccaagaagaagttgaaggatagtgaactttacttcttggggacggacacacacaagaagaagaggaagcactcctctgatgattactactatggaggacagtggttcttgttctgagtgccgataaaccagtgtgaaggaggagagaggtggagggctggtattttggaggattcagcatagaagaacagtctgcatttgtgatacaccagatatttcgtctttggaatcgtcacagaagaaaaagaaaaagtccagcccacagtctactgatacagctatggacctgttgaaagctatcacttccccactggcagcaggctccaagccctccaaaaagactggggagaaatcctctggctcttcaagccattcggagagtaaaaaggagcaccacaggaagaaagtcagtggaagcagtggggaactacccctagaggatggtggctcccacaaatcgaaaaaaatgaaacctctctatgtgaacacagagacactgacccttcgggagcctgatggtttaaaaatgaaacttattctgtcaccaaaggagaagggaagcagctctgttgatgaggagtcttttcaatatccctcccaacaagcgactgtgaaaaaatcctcaaagaaatcagctcgggatgagcagggtgctttactcctaggacatgagttacagagctttctgaaaacagcccggaaaaagcacaagtcatcctcagacgcacattcatctcctggccctgaaggctgtgggtctgacgcctcccagttcgcagagtcccacagtgctaaccttgatctttcagggcttgaacctattctggtagaatcagactcatcctctggtggggaactagaggctggggagttagtgatagatgattcttaccgagaaatcaagaagaaaaagaagtcaaagaagagcaaaaagaagaaagacaaggagaagcataaagagaagcgacactccaagtccaagagaagtttaggactttctgccgtgccagtgggagaggtcacagtgacatctggccctcctcccagcatcccatacgctggagcagcagcacctcccctgccacttcctggcctccacacagatgggcatagtgaaaaaaaaaagaaaaaagaagagaaggacaaagagagagagagaggagaaaagccaaaaaagaagaacatgtcggcctaccaggtgttctgtaaagagtatcgcgtgaccattgtggctgaccatccaggtatagattttggggaacttagtaaaaaactggctgaggtgtggaagcaattaccagaaaaagacaaactgatttggaagcaaaaagctcagtatctgcagcacaaacagaacaaagcagaagccacaactgtgaaaaggaaagcatccagctcagaaggttccatgaaagtcaaagcctcttctgtaggagtactgtcaccccagaagaagtccccacccaccaccatgctgttaccagcctcaccagccaaagcccctgagacagagcccattgatgttgctgctcatcttcagctgttgggagagtccctaagcctcattggacaccgtctgcaggaaactgagggtatggtggctgtgtctggcagtttgtcagtgcttctggattccattatctgtgcccttggccccttggcatgtctcaccacacaactacctgaattgaatggctgtcccaaacaggtcttgtcaaacacattagacaacattgcttacatcatgccgggactgtgacagcaaagaatcctgggacagaaaccttatcctacaccattgctggtttgtgtatatatgactgttgcagattccttcagtggcctctggctgtaggttttaaatttttatatctatacatacatatatacatatatatataatgtacaatatatacatagactgtaactactttgcttttaataattttatgaaatggcaaaggtttagccaagaggaaattttggcatgaatacaggcttgggattcttttttctcctgtggtggataaatctgccttaaaaatcaatgtaacttgggggctgggggcttgttctgggtgccaagcgcatctctttatggacagctaaaatgtgattattttccaagctcagttggacctccagacccatcactgaccatttgccttacctgtcttagtctgaaatgtaataggaaagataacgggaagatgccagttgactgaaaattcaaagcctttcaatttgaagtgacctaggtgggaggtgataaaatttgttccctttatagttatggaagtggcttaggtgaattgagtagagggttcattccaattcctactgtataggtgtctgtgtctcaaaatttattgtaatcattggtaccattggtggcctcaacagaggccaaggagttctgtgagccctggcagcaaaaaacaccttggggggtgaagctgtcaatgccaccagttggacctccatacattctgagctaacccagaatctttagtcggcagaattaagtgctggtgtctttcactggcagcatgaagttagccaccaagtcctcacaagccgtgctgcttagttgctcggtggttatggataaactttgcccagcatgatttttgggttcatcttatcagttcccctggtgggcagatacacagtgttctgcattccacatgtaagtgaattgcaaaaacaaaacaaaactcactctcttgtaggtttatttatgtgtgtgtgaatgtgtattttaattatgtgtatttaactctttaaaatctcttagattttaatttatcctgtaaatttctgtatatataatttaataacagaagcctccaccagcaacagcatgtggaagatacagatttgtcatttctcccttccgccctcccttctttccttccttccttccctgtttccttccctctttccttccttcctcctggtctgttccaaaaactctgaatcatctacattttaaggtattttacctcaaaaatgaatcattgtgttaggattctaattctttataaagaacttcatgggcttcaataatgtctagaaagtaaaataaagaggaatgttaccatccccagctgcccttatttccagagaaccagacgtttgtttcccagttggaaagaagacagttgagcacttcaggatggtttttaaatttggtatgagattctctgccaacaccaagctctgagttaactgtgctttcttctcctggccctgacagagcactacagcatcaaagtaaatctttggggacagtgtagcccatctgcatcctatttaatttcttcccttctccccaccagtgttgtcacagggctatgttgcttaaaggtagtctggctgctgaatccctttctcagctcagagcagttttaagatttaattgggaatacagagaaacaggattgtttgagaaccaaaatcaagaggaacagaaatcttaacttgatttcatgtgttagaacattgtaccatgcctcttctgtatctgtggaagtttcctgtttgacacagggtatctaggaggggcggggaagacatggatagtataggaagacattaatcctagcattgtcatttatatacattaatgaaatcctgatgaggacctgctttttgtttgttttcctttgaaacccagccctattgtatttgtatttaaaatttgtacacatttgtataataatctgtaccttgtggtatttggtactattagaggaaaaactttggattcagaccttcttgcagtttttatatcattgttttattttgttttttaaataaattctagtggtttgatccaaatcccattacagttgtataaagaaataaaattttgtacttatattattaaaaatcacatttttaatatttgtaaaaaaaaaaaaaa

SEQ ID NO: 2653 - DNA, 2396 bp, Homo Sapiens
  NM_005488
ttcgcggtgccaccgccccgcccacgcctcctcgccggcctccgagtgcgtcacgtgacgggtcggtggcgctggcggttgctgtcagctgattcccggggttggtggcagcggcggtagcagcaatggactttctcctggggaacccgttcagctctccagtgggacagcgcatcgagaaagccacagatggctccctgcagagcgaggactgggccctcaacatggagatctgcgacatcatcaacgagacggaggaaggtcccaaagatgccctccgagcagtaaagaagagaatcgtggggaataagaacttccacgaggtgatgctggctctcacagtcttagaaacctgtgtcaagaactgcgggcaccgcttccacgtgctggtggccagccaggacttcgtggagagtgtgctggtgaggaccatcctgcccaagaacaacccacccaccatcgtgcatgacaaagtgctcaacctcatccagtcctgggctgacgcgttccgcagctcgcccgatctgacaggtgtggtcaccatctatgaggacctgcggaggaaaggcctggagttccccatgactgacctggacatgctgtcacccatccacacaccccagaggaccgtgttcaactcagagacacaatcaggacaggattctgtgggcactgactccagccagcaagaggactctggccagcatgctgcccctctgcccgccccgcccatactctccggtgacacgcccatagcaccaaccccggaacagattgggaagctgcgcagtgagctggagatggtgagtgggaacgtgagggtgatgtcggagatgctgacggagctggtgcccacccaggccgagcccgcagacctggagctgctgcaggagctcaaccgcacgtgccgagccatgcagcagcgggtcctggagctcatccctcagatcgccaatgagcagctgacagaggagctgctcatcgtcaatgacaatctcaacaatgtgttcctgcgccatgaacggtttgaacggttccgaacaggccagaccaccaaggccccaagtgaggccgagccggcagctgacctgatcgacatgggccctgacccagcagccaccggcaacctctcatcccagctggcaggaatgaacctgggctccagcagtgtgagagctggcctgcagtctctggaggcctctggtcgactggaagatgagtttgacatgtttgcgctgacacggggcagctcactggctgaccaacggaaagaggtaaaatacgaagccccccaagcaacagacggcctggctggagccctggacgcccggcagcagagcactggcgcgatcccagtcacccaggcctgcctcatggaggacatcgagcagtggctgtccactgacgtgggtaatgatgcggaagagcctaagggggtcaccagcgaagaatttgacaaattcctggaagaacgggccaaagccgcggaccgattgcccaacctctccagcccctcagctgaggggcccccgggtcccccatctggcccagcgccccggaagaagacccaggagaaagatgatgacatgctgtttgccttatgagtgtggggtctggcaccctgcagcccaggtccccactgctctcacacccttaggctgggacctccctccctcctctggtgttaaggctgctttgggggtggcttgttacccccttttcctcctctttgaagacggagctgccccagctgtggctgggggtgtggaggcagtgggatgaactgggggacaggtctgcgctgcagtgggatctggctgctctgcctcctttcccaccccagctgaccatgagactttgctgagaagtggaggccccaggacaggctggctggctggctggctgcttgacccagtgtgactctccttcactgagtgataccctgctccgggcccatgccccaaggagcccttcagagcccacactgccagtcgaggcctggctggaggctggccacagtggaaattctgccgagcctcttgtcccttccctgctctgctgcatggggccccatggctttggctggccactgagggtagggtgtggaggtgtggaggccccctgaggagctgcggcggcccaggtacgaagctgcaactctgcgcgcagtgggcgagatctcatcagccccaggctgcaggtgaggcttcaggggatgctggggccccactgcccctccgctgccttgccctccatccttcctctgttccttctggccgggcaccacagcactggggctcacctcttggttgatcctcttgtactgggagaggtgccttttgtatccccaattaaaggtagaaaaccaccctgctagcagcattgtcaaaaaaaaa

SEQ ID NO: 2654 - DNA, 2376 bp, Homo Sapiens
  NM_005490
taggtgtggtctgggaaggctggggcggtggcaaggtggagggcgggggtgacagcagcccggagccgcggagcctcagcttccgcctggacccagcctcgtgggagccccgcgggtcctgcccagatgtggaagactgaggcctgttgaaagtgcagagctcagccctggcaccctctgttcccaagagctccatgcaggtgccacaggatggagaagaccttgctggccaaccttggtaccacggcctcctgtcccgccagaaggctgaagctcttcttcagcaaaatggcgacttcctggttcgcgcctctgggtcccgtgggggcaaccccgtgatctcctgccgctggcggggctcagccctccattttgaggtgttccgtgtggccctgcgtccccggccaggccgacccacagccctctttcaactggaggatgagcaattccccagcataccggctctggttcacagttatatgacaggcaggcgcccactgtcccaggccacaggggctgtggtctccaggcctgtgacttggcaggggcctctgcgacgcagctttagcgaggacaccctgatggatggcccagctcggatagagcctctcagggcaaggaagtggagcaacagtcagcctgcagatttggcacatatggggcggtcaagagaagaccccgctgggatggaagcctccaccatgcccatatctgccttgccccgaacgagcagtgacccggtgttgctgaaggcccctgctcccctgggaactgttgccgacagtctcagggcctccgatgggcagcttcaagccaaggcaccaacgaagcccccccggacaccctccttcgaactgcctgatgcctctgaacgtcccccgacgtactgcgagctggtgccccgagtgcccagtgtccagggaacatccccgagccaaagctgcccagagccagaggccccatggtgggaggccgaggaggatgaggaggaagagaatagatgttttacaagaccacaggctgagatctctttctgcccccatgatgccccctcctgcctgctgggcccccagaatcggcccctggaaccccaagtcctgcataccctccgtggcctgttcctggagcaccatcctgggagcaccgcccttcacctgctattggtagactgccaggccacaggcctcctgggagtgaccagagatcagcggggcaacatgggagtctcatctggcctggagctgctcactcttccccatggacaccacttgaggttggaactgctggagaggcatcagacactggcgctggccggggcgctggcggtgctgggctgctcggggccgctggaggagcgcgcagccgcactgaggggactggtagagctggcgctggcgctgcggccaggggcggcgggggacctgcccgggctggctgcagtcatgggcgccctgctcatgccccaggtgtcccggttggagcacacgtggcgccagctccgaaggagccacacggaggctgcgctggcctttgagcaggagctgaagccgctgatgcgggctctggatgagggcgctggaccctgcgaccccggcgaggtggcgctgccgcacgtggcacccatggttcgcctactggagggcgaggaagtcgcggggccgctggacgagagctgtgagcggctgttgcgcaccctgcacggggcgcgtcacatggtccgggacgcacccaaattccgcaaggtggcagcccagcgcctgcgaggattccggcctaacccggagctgagggaggccctgaccaccggcttcgtgcggaggctgctctggggtagccggggcgcgggagctccgcgcgctgaacgctttgagaagttccagcgcgtcctcggcgtcctgtcgcagcgcctggagcctgaccgctgagagcgcagacacccttcttcacacccgggacccccaggtttttgcgaaccccagaagagaccaaaggagtcgtcccaggctcctcgcgcctcaggtggaatcctgccctgtgcctcacagaagaggtggggaccgcagtcagggtcacctggaccatggtgaacatgtgacctgcagatctggcatcagaggccagagttcaaatgtgactccacctcttaaaagccgtgatttctagcagttgacttcacctctgtgtcggcctttaacaaaatcatagccatacagcagctcaggcctgtaatctcagcactttgggaggccgaggcggaaggaaggcttgaggccaggagttcaagaccagccagggcaacatggtgagacctcatctctacaaaaactgaaaaataaaaaacttttaaaaaatgtaaaaaaaaaaaaaaaaaaaaaa

SEQ ID NO: 2655 - DNA, 3132 bp, Homo Sapiens
  NM_005493
gaagcagaggaggaaggagagaagaggtggaggtggccgcaggctgagtcgcggccgggatgtccgggcagccgccgccgccgccgccgcagcagcagcaacagcagcagcagctgtcgccgccaccgccggcggccttggccccagtctccggagtcgtcctgccggcgcccccggccgtcagcgccggctcttctccggccggctcgcccggcggcggtgcgggcggcgaaggcttaggggccgcggcggccgccctgctcctccaccctccgccgccgccgcccccggccaccgcggccccgccgcccccgccgccgcccccgcctccccctgcctcagcggctgcccccgccagcgggccgcccgctcccccgggccttgcagcgggccccggcccggctggaggagccccgaccccagctctggtggcgggcagcagcgccgcggcccccttccctcacggggactcggccctgaacgagcaggagaaggagttgcagcggcggctgaagcgtctctacccggccgtggacgaacaagagacgccgctgcctcggtcctggagcccgaaggacaagttcagctacatcggcctctctcagaacaacctgcgggtgcactacaaaggtcatggcaaaaccccaaaagatgccgcgtcagttcgagccacgcatccaataccagcagcctgtgggatttattattttgaagtaaaaattgtcagtaagggaagagatggttacatgggaattggtctttctgctcaaggtgtgaacatgaatagactaccaggttgggataagcattcatatggttaccatggggatgatggacattcgttttgttcttctggaactggacaaccttatggaccaactttcactactggtgatgtcattggctgttgtgttaatcttatcaacaatacctgcttttacaccaagaatggacatagtttaggtattgctttcactgacctaccgccaaatttgtatcctactgtggggcttcaaacaccaggagaagtggtcgatgccaattttgggcaacatcctttcgtgtttgatatagaagactatatgcgggagtggagaaccaaaatccaggcacagatagatcgatttcctatcggagatcgagaaggagaatggcagaccatgatacaaaaaatggtttcatcttatttagtccaccatgggtactgtgccacagcagaggcctttgccagatctacagaccagaccgttctagaagaattagcttccattaagaatagacaaagaattcagaaattggtattagcaggaagaatgggagaagccattgaaacaacacaacagttatacccaagtttacttgaaagaaatcctaatctccttttcacattaaaagtgcgtcagtttatagaaatggtgaatggtacagatagtgaagtacgatgtttgggaggccgaagtccaaagtctcaagacagttatcctgttagtcctcgaccttttagtagtccaagtatgagccccagccatggaatgaatatccacaatttagcatcaggcaaaggaagcaccgcacatttttcaggttttgaaagttgtagtaatggtgtaatatcaaataaagcacatcaatcatattgccatagtaataaacaccagtcatccaacttgaatgtaccagaactaaacagtataaatatgtcaagatcacagcaagttaataacttcaccagtaatgatgtagacatggaaacagatcactactccaatggagttggagaaacttcatccaatggtttcctaaatggtagctctaaacatgaccacgaaatggaagattgtgacaccgaaatggaagttgattcaagtcagttgagacgccagttgtgtggaggaagtcaggccgccatagaaagaatgatccactttggacgagagctgcaagcaatgagtgaacagctaaggagagactgtggcaagaacactgcaaacaaaaaaatgttgaaggatgcattcagtctactagcatattcagatccctggaacagcccagttggaaatcagcttgacccgattcagagagaacctgtgtgctcagctcttaacagtgcaatattagaaacccacaatctgccaaagcaacctccacttgccctagcaatgggacaggccacacaatgtctaggactgatggctcgatcaggaattggatcctgcgcatttgccacagtggaagactacctacattagctatgcatttcaagagctcacacttatattgtggcatatagtcaacatggaagtagaccagctctgctgatttgaaatttagattttttaaattatgtactggggacaggtttttgtcgctttacattgcttcctagtttacagcatgatgcaaatgattttctaacttagtgttaggagaaattattttccatctttaacctcttagttgtctaagagttaaatattactgaatttcagacgttcaaattgatcatcacaaatcctttaaaacaattacctaaaagaaaccaaaaatcctgccttctttgtgggggaggggggagagaggggaaggaaatggaacaagttgtgtttgtgttagcatgtgggtgatgtaaacttcaaattgggagatgttccgacccccactcccatataagcattcaatcagtgtaacttgcaaaatgcataaacatccgacagtttgaatttatagtgttgatggaagaaatcatttttaatgtgtactgtaaaacttgaaatactcaggagctgagtgaatatgtttgttgctacttacaatcccgacctgttagtcccagtagttttgttttaacatggtctttttcaactttgtttcctgtttaactacagatgacttctgttgtagactcacaagtttaactgttgtattataacagtattacatgtcaacggtgtggttatgacctttatttatataaaaaccaaatatttagtcaatttaccgtgtcttaatttaatctttgtacaccttccatttttaagtgcttaaatgagtactatattgcaataaaatgtagtgatataattaaccagccattaaaaatttacttctacagaaaaaaaaaaaaaaaaaaaa

SEQ ID NO: 2656 - DNA, 2538 bp, Homo Sapiens
  NM_005500
atgcgcagaagcactccgggcgtgctgccggcggcggtaggtggcgcgcgggtccggcgggcggttggcttgagcgggaccggagctgaggcaggaagagccggcgccatggtggagaaggaggaggctggcggcggcattagcgaggaggaggcggcacagtatgaccggcagatccgcctgtggggactggaggcccagaaacggctgcgggcctctcgggtgcttcttgtcggcttgaaaggacttggggctgaaattgccaagaatctcatcttggcaggagtgaaaggactgaccatgctggatcacgaacaggtaactccagaagatcccggagctcagttcttgattcgtactgggtctgttggccgaaatagggctgaagcctctttggagcgagctcagaatctcaaccccatggtggatgtgaaggtggacactgaggatatagagaagaaaccagagtcatttttcactcaattcgatgctgtgtgtctgacttgctgctccagggatgtcatagttaaagttgaccagatctgtcacaaaaatagcatcaagttctttacaggagatgtttttggctaccatggatacacatttgccaatctaggagagcatgagtttgtagaggagaaaactaaagttgccaaagttagccaaggagtagaagatgggcccgacaccaagagagcaaaacttgattcttctgagacaacgatggtcaaaaagaaggtggtcttctgccctgttaaagaagccctggaggtggactggagcagtgagaaagcaaaggctgctctgaagcgcacgacctccgactactttctccttcaagtgctcttaaagttccgtacagataaaggaagagatcccagttctgatacatatgaggaagattctgagttgttgctccagatacgaaatgatgtgcttgactcactgggtattagtcctgacctgcttcctgaggactttgtcaggtactgcttctccgagatggccccagtgtgtgcggtggttggagggattttggcacaggaaattgtgaaggccctgtctcagcgggaccctcctcacaacaacttcttcttcttcgatggcatgaaggggaatgggattgtggagtgccttggccccaagtgaactcaagatttggcagccccagagatgccaactgcagcatgcccacctgtattccctgtccccttccttcatgaaggcatctccaggcaaggaaaactgaagtcattggcccgatacaaaacatttcctgcaacgaaggaggtggtgccgacgtgctgcttcccatcaccagcagctgctcgacaaggggcgcagggtggctgtctttgttccagcactgttcaggctgcctgtcatcccgggcctgccagctcccctgagtgatgagcacttccaagcacccctctgccctttctctgtccttatgctgtcccggcctcgccagccctctggggcattgtgggagatgcctgccaggaatgagcaagctctgttgctcgggagcctcttgtcaccttcttggacttattccccacctgataccttatagagaaaagtgtgaattcaggtggagagtaggcccaggccccatgaggcaccagtggaagcacagctccaagttcagacaggtgcccttagagaggaaaaccatgacaggcaaatgcatttcctctggagtttgagaccctgacaaacaacaggtggcatctggtgtgctgttcttgagttttcgtttaggattagttgagttccagctgggttttgggagaaaggagatgctaccaagtcttggatgttagggcgagaccctgcaagttgagtattagagagcttgtctttcaaggcaggttcctggggcttcagggctaggagggaggagcctgcccttttaacagaaccccagtcacatgcggctcaagtcactcagaggctgttgcatttcagggctatgttggtcctttgtttacctcctaaaccacagctgtttgtgtttcacatatgttgtgaattttccttggttctttttaaaggaatgataataaagttacttgctttaggatttgcttgtttttcttccacttcagaagcttctgagagggaatgggatgatcctaccagttgccttttcagacctgaggctctaactcaagagattcctcctctccctcaccattcctgccaccattttttctgggtgatgcagcaagagttaaattgttcacattctagaatgtgtagaagcttctggctccagttgtctaatggataattcagctaaatagtggctattttcagtggcaagaattataataataaagggaagtcaaaagtgatgcttcatatgccccaagtgccacagccgctacgggtcagagcttttattggaagaccaggtttgccttgatgcagccaaagtgcgttccagttcaccccactcttgcttgtgtttcttctttatgtaaattgtgtgatgtttcaataaatcagtctctttcctattctgaaaaa

SEQ ID NO: 2657 - DNA, 3653 bp, Homo Sapiens
  NM_005503
cagtctcctgaatatttacgcgttgctgaatctcctgtggacaaaccaccaataggccaggactgtcctgtggacagacggggtgagcctcttcttgtgtctggagattctgaaaagatttgatcaccaggagatttttcgggacattaccaaaccactcattttagtggctgcctccgggtgatgatggctgtgtgaacgactgccatggcccaccggaagcttgagagcgtggggagcggcatgttggaccatagggtgagaccaggtcctgtccctcacagccaggagcccgagagcgaggacatggagctgcccttggagggctatgtgcccgagggcctggagctggctgccctgcggccagagagccccgcgccagaggaacaggagtgccacaaccacagccccgatggggactccagctctgactacgtgaacaacacctctgaggaggaggactatgacgagggcctccctgaggaggaggagggcatcacctactacatccgctactgccctgaggacgacagctacctagagggcatggactgcaacggggaggagtacctggcccacagtgcacaccctgtggacactgatgagtgccaggaggcggtggaggagtggacggactcggcgggcccgcacccccacggccacgaggctgaaggcagccaggactacccagacggccaactgcccattccggaggatgagccctccgtccttgaggcccatgaccaggaagaagatggtcactactgtgccagcaaagagggctaccaggactactaccccgaggaggccaacgggaacaccggcgcctccccctaccgcctgaggcgtggggatggggacctggaggaccaggaggaggacattgaccagatcgtggcagagatcaagatgagtctgagcatgaccagcatcaccagcgccagtgaggccagccccgagcatgggcctgagccagggcctgaggactctgtagaggcctgcccacccatcaaggccagctgcagccccagcaggcacgaggcgaggcccaagtcgctgaacctccttcccgaggccaagcaccccggagacccccagagaggcttcaagcccaagaccaggaccccagaagagaggctgaagtggccccacgagcaggtttgcaatggtctggagcagccaaggaagcagcagcgctctgatctcaatggacctgttgacaataacaacattccagagacaaagaaggtggcatcatttccaagttttgtggctgttccagggccctgcgaaccagaagacctcatcgacgggatcatctttgctgccaattacctggggtccacccagctgctatcagaacggaacccttccaaaaacatcagaatgatgcaagcgcaggaggccgtcagccgggtcaagaggatgcaaaaggctgctaagatcaagaaaaaagcgaattctgagggggatgcccagacgctgacggaagtggacctcttcatttccacccagaggatcaaggttttaaatgcagacacgcaggaaaccatgatggaccacgccttgcgtaccatctcctacatcgccgacattgggaacattgtagtgctgatggccagacgccgcatgccccggtcagcctctcaggactgcatcgagaccacgcccggggcccaggaaggcaagaagcagtataagatgatctgccatgtgttcgagtcggaggatgcccagctcatcgcccagtctatcggccaggccttcagcgtggcctaccaggagttcctgcgagccaatggcatcaaccccgaagacttgagccagaaggaatacagcgacatcatcaacacccaggagatgtacaacgacgacctcatccacttctcaaactcggagaactgcaaggagctgcagctggagaagcacaagggcgagatcctgggcgtggtggtggtggagtcgggctggggctccatcctgcccacggtgatcctggccaacatgatgaatggcggcccggctgcccgctcggggaagctgagcatcggggaccagatcatgtccatcaatggcaccagcctggtggggctgcccctcgccacctgccaaggcatcatcaagggcctgaagaaccagacacaggtgaagctcaacattgtcagctgtcccccggtcaccacggtccttatcaagcggccagacctcaagtaccagctgggcttcagcgtgcagaatggaattatctgcagcctcatgagagggggcattgctgagcgagggggcgtccgtgtgggccaccgcatcatcgagatcaacgggcagagcgtggtggccacagcccacgagaagatagtccaagctctgtccaactcggtcggagagatccacatgaagaccatgcccgccgccatgttcaggctcctcacgggtcaggagaccccgctgtacatctaggccaccccagcctggccacgcagccaggacaccgggcagggccgcccgggcccagaggagctgggagccgggccgcagacttgaccccgacgccacagcccagccacggacgctggctccccaaagggtgtgccctcaccacccacttgatttttttcattttgccaaaaaggggtatgtctttatcaaaggagagtcacagaacaaatgtttgtttgtaaagcgttccaagtattttgccacgttctggactgtcttctccctgcacaagccagggtgtgtctcggtagctgtgcgtggtgtggagtgtgtgtctttcctccctgaagctgtgcggagcgaactggcgcctccgagggacgcggctcccggggcagggcagccgtcacccctgcctcccgcccccttggctgggacgtctggggtcctgtggggcccccacaatggtcccaaacagctgcctctgccactgactgcagggacacgggcagcctggctcccaggacacgacttgtaatgaaagtttggggacatgtgattgattgattgattgtaaataaaggatgatggccacaacatgaaaactccatatttatttagatgctattattactgtttggacttttattttggcaggcttttttccagactctagggttttccaatgtgactaatgaccacacctgcctctcccgtcgtctcttctgggcaccctcccacccggctgcatacccgggcagggctcccacagagacaaggagggcacaggtgtctgccccctctttaaaatcgatctacacacatccacgcacatgcgaccccgaggaaacgaaacccactctagaaaacgcgaccttggccgcacctaaagcagccagccgtgagtgcagaccccttggccagcgtggcgcagtggccctgagcagtagtggcatgtgtgtagatcaagtcggatctagtccagctcggttcattagcgatccatgtaatctgacgtcatcttgtctcgaagtctctttttttggcccaggccttgaagaatacactgtgacttaagaagccttaccacgcagtaactaaagctttaggatgactgtattcgaggagtgccgtgtgttgcatgcagctacccgtaggaagacttcgcgcatatcactaataaacctgaagtcgtgatgaaaaaaaaaaaaaaaaaa

SEQ ID NO: 2658 - DNA, 9682 bp, Homo Sapiens
  NM_005504
agtagggaggtgggcaggagccagtgatgacggaatggcaatcacatttgacctctgatctgtttatttcctcctccttgacgtctccatataaatgttacacgggcatccccacactcggatacgcacccacagtggctgattcgggggtaaccgtgtcatttgcttgcaacactggcacctctgccctgcaccccgggagtgagcagtgagtgaggctcgggtctgggcgctggctccgaatcttcgggctgggagagactccaccatctgggggcggcctgggggagcagccttagtgtcttcctgctgatgcaatccgctaggtcgcgagtctccgccgcgagagggccggtctgcaatccagcccgccacgtgtactcgccgccgcctcgggcactgccccaggtcttgctgcagccgggaccgcgctctgcagccgcagacccggtccacacggccaggggctacgacccttgggatctgccctccgctcagctcgagcttccctcgtggccgacggaacaatgaaggattgcagtaacggatgctccgcagagtgtaccggagaaggaggatcaaaagaggtggtggggacttttaaggctaaagacctaatagtcacaccagctaccattttaaaggaaaaaccagaccccaataatctggtttttggaactgtgttcacggatcatatgctgacggtggagtggtcctcagagtttggatgggagaaacctcatatcaagcctcttcagaacctgtcattgcaccctggctcatcagctttgcactatgcagtggaattatttgaaggattgaaggcatttcgaggagtagataataaaattcgactgtttcagccaaacctcaacatggatagaatgtatcgctctgctgtgagggcaactctgccggtatttgacaaagaagagctcttagagtgtattcaacagcttgtgaaattggatcaagaatgggtcccatattcaacatctgctagtctgtatattcgtcctacattcattggaactgagccttctcttggagtcaagaagcctaccaaagccctgctctttgtactcttgagcccagtgggaccttatttttcaagtggaacctttaatccagtgtccctgtgggccaatcccaagtatgtaagagcctggaaaggtggaactggggactgcaagatgggagggaattacggctcatctctttttgcccaatgtgaagcagtagataatgggtgtcagcaggtcctgtggctctatggagaggaccatcagatcactgaagtgggaactatgaatctttttctttactggataaatgaagatggagaagaagaactggcaactcctccactagatggcatcattcttccaggagtgacaaggcggtgcattctggacctggcacatcagtggggtgaatttaaggtgtcagagagatacctcaccatggatgacttgacaacagccctggaggggaacagagtgagagagatgtttggctctggtacagcctgtgttgtttgcccagtttctgatatactgtacaaaggcgagacaatacacattccaactatggagaatggtcctaagctggcaagccgcatcttgagcaaattaactgatatccagtatggaagagaagagagcgactggacaattgtgctatcctgaatggaaaatagaggatacaatggaaaatagaggataccaactgtatgctactgggacagactgttgcatttgaattgtgatagatttctttggctacctgtgcataatgtagtttgtagtatcaatgtgttacaagagtgattgtttcttcatgccagagaaaatgaattgcaatcatcaaatggtgtttcataacttggtagtagtaacttaccttaccttacctagaaaaacattaatgtaagccatataacatgggattttcctcaatgattttagtgcctccttttgtacttcactcagatactaaatagtagtttattctttaatataagttacattctgctcctcaaacaaatgcaattttttgtgtgtgtttgaaagctaatttgagaaaatttcataggttacatttcctgcagcctatctttatccacagaaagtgttttcttttttttaaatcaagacttttaaaactggatttcctcccatcactgttttttgaaggtcctccaagtccgtgttaaggtaaatatctgttttcttcctgatgtcacagcctgagcatactctgtgcattaggaagacctgagtgcatttcccaccattgtcctttccacattatgttgtagctggctggctgtcaggcgactacaagactgagggtcttgtgccttatagatctttgtatcccccatggctgacatatagtaggtactcagtaaatggttttataatgaatcagtgaacattttgcttctatagaagtgtaccttctttgtttctatattatgaaacctctttattagaatttgtgattgattctgacagtgtatagatttaccttatattgtctttattttccatgagctactaagtcattagagatactctgaagcatagttagtttaggaaatcacttcatattgattgtattagaattatcttggaattgaagatatatccctagagcaggggaccccaacccccaggccatgggccacacagcaggaagaggtgagtggtgggccattgaggagcttcatctgtatttatggctacttcccatcactcgaattaccacctgaactccacctcttgtcagctcagtggcagcattagattctcataggagcacaaatcctattgtgaactctgcatgcaagggatctaggctatgcgctccttatgagaatctaatgcttgatgacctgaggtgtaacagtttcatcctgaaaccacccttcaccctgcagtctgtggaaaaattgtcttccacaaaactggtccctggtgccaaaaatgttggggaccactgctctagagagaggtcatgatatcataccaaccaaatggaaatgacaaatgttttatgtcaagtgttaattgcagaaataaatcttttttttttttttttggtagaaaacaaagaggcatactctgatttttatactctgtttttgcaggtgctcttttctttgaatggagatttgatgagcaagtggttaggatgcagggagagctactatgggtgatattttccttgtttaggagctgtgagttaaaattgtatcctttgtggtttatctaaggaaagtcaaatcttgacagaaaacatttttccttggaaggtcaactctcagacattgtattttggtttccctcagtcctcataacttccttcttgctgaacatattttattctcttttcagagaaggaaaataaaaaggattctaaaagtttgatgcattggaaaaatttccttgaggcatttagcaacacatagaaaatgggctttgattcttttccaaaacttttagccatagggtcttttatagacagggatagtaaaatgaaaattgagaaatataagatgaaaaggaatgataaaaatatcttttagggggcttttaattggtgatctgaaatcttgggagaagctgttcttttcaggcctgaggtgctcttgactgtcgcctgcgcactgtgtaccccgagcaacattctaagggtgtgctttcgccttggctaactcctttgacctcattcttcatatagtagtctaggaaaaagttgcaggtaatttaaactgtctagtggtacatagtaactaaatttctattcctatgagaaatgagaattatttatttgccatcaacacattttatactttgcatctccaaatttattgtggcgagacttgtccattgtgaaagttagagaacattatgtttgtatcatttctttcataaaacctcaagagcatttttaagcccttttcatcagacccagtgaaaactaaggatagatgtttaaaaactggaggtctcctgataaggagaacacaatccaccattgtcatttaagtaataagacaggaaattgaccttgacgctttcttgttaaatagatttaacaggaacatctgcacatcttttttccttgtgcactatttgtttaattgcagtggattaatacagcaagagtgccacattataactaggcaattatccattcttcaagacttagttattgtcacactaattgatcgtttaaggcataagatggtctagcattaggaacatgtgaagctaatctgctcaaaaagatcaacaaattaatattgttgctgatatttgcataattggctgcaattatttaatgtttaattgggttgatcaaatgagattcagcaattcacaagtgcattaatataaacagaactggtggcacttaaaatgataatgattaacttatattgcatgttctcttcctttcacttttttcagtttctacatttcagaccgagcttgtcagcttttttgaaaacacatcagtagaaaccaagattttaaaatgaagtgtcaagacaaaggcaaaacctgagcagttcctaaaaagatttgctgttagaaattttctttgtggcagtcatttattaaggattcaactcgtgatacaccaaaagaagagttgacttcagagatgtgttccatgctctctagcacaggaatgaataaatttataacacctgctttagcctttgttttcaaaagcacaaaggaaaagtgaaagggaaagagaaacaagtgactgagaagtcttgttaaggaatcaggttttttctacctggtaaacattctctattcttttctcaaaagattgctgtaagaaaaaatgtaagacaaaaaaaaaaaaaaaaaacaaacagaggcagaggcaggcagtagcaagaaagcagagcgtaacatcagctagatggtaacatgcaatgtcagctctcttgaagacatgggaaacctaagttacaccttgggttaaaattcttcaccatattagttttgttgcttcataaaatttacctaagcaagtggtcttgcttgcctcaaatccaagcagtcttgaacacttggaggcaattaatgagtatatcttagtcaaaagaattgttggagctttttattaaagctacagtttcagttctgcttttggggaattgtgctatgaaagcagctgccaaaataagctcatttattttcttcaatcccactcagtgctcagtcactatattctgtttcctttttttttttcaagttgcatatttggtttccccttatgattgggaaagatgaattttcagcagaaaacattgtttgttcactttcaaagagtgatagtttctaaaacatttagagcaataaatattcatcagaggtaccaagtaagccggcagaagagttaagggttagagaaatcccttatttcatgtcttgactctaaaattatcaaagtacttttccttgtaatgtggatttcttcttatgcggatatgcaaaaacttcagttatacgtagtaatgctagcaggtaattttagtagacattttataacaactgtcactttgtttcgccacatgtagagtttgttcagctattttccagatatctccccacaaaaggaggcaaagggtaccagcttttcaatgagcattacctattacttggcaaagatgatgaagactctattaatagttcatttgataaatgttgacataaccaacaatagagattaggaagttagttttaagaaatcaatggcatatagacattaccctcatggagtttgtattctactacttgaactgattgtagctataaaagcatagttagatagctgaatagttagatcataagcaaagaaggccagaacacatctcttatcaagaaatcaatgaatagtttatctcatttttaaagcaactttatccttctttaattccttcctttcttctagtgcaaaactacttaataaggttggtgtttaggttagtgttcacaccattcctcatctggtgtgaattaccttctctttctttactatttactaccaacctagtacatgtgttgactgaattcttttcaaacaatgttgagttatcatggtgcacctaataaattaacaccacagattacagcatccttgctgattttctcagcaaagccagattagatggaaataaacaaagaaaatgatcctagagtgaatttttctagaaaatatctattatgaaccatgctgtttaaagtattagcttgaaggtgatggatccagctattcagaaaataactttcatataaccatgattttgcacagtatgaggtcttaaatgtgtggaaagagataaattttttatcattaccacaaaccccttttaaagattcaaaggtggaagaaagtgatttattttttctcttcagcatacatatataaaagacttgtcagatgtttaatttggggaggttgataatgaaacatatcaacagagtatagtagttatagtagtgtttgtgggtaaataatttcctggggtcagacatatataaacatatttgcttcaaaatgataaaggcatgaaatcagtcttaaaaattgaaatgggggtgatgggggagaaaaagaagaacaaatttgaagtgccctttcaaatctgctggatacaagtattgaagttttaagtcatcttattctgtctgaaagtgtatttttcattctacaatagacccaatcaacaagacgtataacttgagttgcatgatgttcagtttatgtaatctactgttgggatggtaagaattgatgtaggctgtggtgtaagaatgaattaaaatatagtttcactggcttttctctacatatccactatcacaatggctaggtttcctgttgctcactattggattctggagaaaaatttaatgaaagatgatatcagaggaagaataagtggaggtagagaagaaaggaatgatagaggaggggaaaaaaacaaaacatatttttgtgttatccaaaggagctttttccttattctgtcaagcattgagatcttcttcagctttcaatgtagttgctaaatacaaataatgctactaggtagtgactaaatatagcaaacacttcatcagatattagaattaggtcacactattgaggttataatctgaaggttgtgttacatagaaaccactttagattattatcaacttggactaggctttattttataatagcatagtaagtaatatctattgtgtcatttcttcaaccattttattctaagatccatgaagcttcttgaggccaaataaaataataagtttagacaagaagtagattgtgacttttttcccttagagatactatttactatctcctatcctgataggtggaaggtttactgaattggaaattggttgactattagtttttaactaaaatgtgcaataacacattgcagtttcctcaaactagtttcctatgatcattaaactcattctcagggttaagaaaggaatgtaaatttctgcctcaatttgtacttcatcaataagtttttgaagagtgcagatttttagtcaggtcttaaaaataaactcacaaatctggatgcatttctaaattctgcaaatgtttcctggggtgacttaacaaggaataatcccacaatatacctagctacctaatacatggagctggggctcaacccactgtttttaaggatttgcgcttacttgtggctgaggaaaaataagtagttcgaggaagtagtttttaaatgtgagcttatagatagaaacagaatatcaacttaattatgaaattgttagaacctgttctcttgtatctgaatctgattgcaattactattgtactgatagactccagccattgcaagtctcagatatcttagctgtgtagtgattcttgaaattctttttaagaaaaattgagtagaaagaaataaaccctttgtaaatgaggcttggcttttgtgaaagatcatccgcaggctatgttaaaaggattttagctcactaaaagtgtaataatggaaatgtggaaaatatcgtaggtaaaggaaactacctcatgctctgaaggttttgtagaagcacaattaaacatctaaaatggctttgttacaccagagccatctggtgtgaagaactctatatttgtatgttgagagggcatggaataattgtattttgctggcaatagacacattctttattatttgcagattcctcatcaaatctgtaattatgcacagtttctgttatcaataaaacaaaagaatcctgtttgtgtggtttcatgaaatcagcattgttgaatgcatgaagtaataatgctaaattaacatttttatgatgtctcaaggtttctggtcaagggaagtaaatgtaggatagtatttttacaccaaaatgacacagagagaattgagcacaccagaaagaccagaaaccacaccactggatagagattcaatatgtttctttttcaaacatttggacaagaaaaaaatgggcatttaaaaattcttccttcccctggttatggatttatctgtagtaaaacttagctttgtcgtttgagatttgcacagaatggggggagtagattacctcttcccattcattgtcataatggatctacatcactgataaacaccatacttctatatgtggttaactagctttagaataaaagacactttaaaaagtaaaaggcctagagatcttcaatgaagtgtcccttttagccaaaccaggccttgcagaaattgtcctcaaaagcaccaagggagaacaaagccaagtgcagaattacccaagggtcacacattttgtattcattttcttataatttgcccaaatgatttgaagtacagcaaaacctgaagttttgcaaagagttactgtaaactgaacttaaaaatgtcagagtgctcggtgacccacttctccagaccctgtcaacctgtgaaaatattggcctttattcagatctctcaagaagttacgcgcagagtttggaaggtctaggcaaaggttattagtcaagtgttcttacagtgtcaacgctcaattcccacaagcgtgagaaagagagacctgtcattcctgagggtgatgacatacatttactggagcttatataatttatcagataagacagcagtttccttcagggtagaaagtgtgttttctacattgatttagtacaaaacaaaaagaaaaggggatatttcaaattttataattatttttctgctaagctgattcagtgtgatttaagcatatttttcaaatcatgaatctgattccatatacatatgtgccttatattgtgataatttatttttaagtgaaatatgctatcatagcctgactttatgtatagtggtgacaacttgcaggatcgcatttctgtaaccaaacggccgacagctgaggtgtagatgcttcctatggtctgtagaataatcactgggcttgttctctagctatgtctgtatgcaatcgcgacagtgttgatcaaaacccatgatcattctctccaaaggtctttgtcactaagccactagggattctgaaaagttcgtgagctgaaacaaataaattgagttggaagattaaaaaaaaaa

SEQ ID NO: 2659 - DNA, 2759 bp, Homo Sapiens
  NM_005505
gctcaggccccgcccctgccgccggaatcctgaagcccaaggctgcccgggggcggtccggcggcgccggcgatggggcataaaaccactggccacctgccgggctgctcctgcgtgcgctgccgtcccggatccaccgtgcctctgcggcctgcgtgcccggagtccccgcctgtgtcgtctctgtcgccgtccccgtctcctgccaggcgcggagccctgcgagccgcgggtgggccccaggcgcgcagacatgggctgctccgccaaagcgcgctgggctgccggggcgctgggcgtcgcggggctactgtgcgctgtgctgggcgctgtcatgatcgtgatggtgccgtcgctcatcaagcagcaggtccttaagaacgtgcgcatcgaccccagtagcctgtccttcaacatgtggaaggagatccctatccccttctatctctccgtctacttctttgacgtcatgaaccccagcgagatcctgaagggcgagaagccgcaggtgcgggagcgcgggccctacgtgtacagggagttcaggcacaaaagcaacatcaccttcaacaacaacgacaccgtgtccttcctcgagtaccgcaccttccagttccagccctccaagtcccacggctcggagagcgactacatcgtcatgcccaacatcctggtcttgggtgcggcggtgatgatggagaataagcccatgaccctgaagctcatcatgaccttggcattcaccaccctcggcgaacgtgccttcatgaaccgcactgtgggtgagatcatgtggggctacaaggacccccttgtgaatctcatcaacaagtactttccaggcatgttccccttcaaggacaagttcggattatttgctgagctcaacaactccgactctgggctcttcacggtgttcacgggggtccagaacatcagcaggatccacctcgtggacaagtggaacgggctgagcaaggttgacttctggcattccgatcagtgcaacatgatcaatggaacttctgggcaaatgtggccgcccttcatgactcctgagtcctcgctggagttctacagcccggaggcctgccgatccatgaagctaatgtacaaggagtcaggggtgtttgaaggcatccccacctatcgcttcgtggctcccaaaaccctgtttgccaacgggtccatctacccacccaacgaaggcttctgcccgtgcctggagtctggaattcagaacgtcagcacctgcaggttcagtgcccccttgtttctctcccatcctcacttcctcaacgctgacccggttctggcagaagcggtgactggcctgcaccctaaccaggaggcacactccttgttcctggacatccacccggtcacgggaatccccatgaactgctctgtgaaactgcagctgagcctctacatgaaatctgtcgcaggcattggacaaactgggaagattgagcctgtggtcctgccgctgctctggtttgcagagagcggggccatggagggggagactcttcacacattctacactcagctggtgttgatgcccaaggtgatgcactatgcccagtacgtcctcctggcgctgggctgcgtcctgctgctggtccctgtcatctgccaaatccggagccaagagaaatgctatttattttggagtagtagtaaaaagggctcaaaggataaggaggccattcaggcctattctgaatccctgatgacatcagctcccaagggctctgtgctgcaggaagcaaaactgtagggtcctgaggacaccgtgagccagccaggcctggccgctgggcctgaccggccccccagcccctacaccccgcttctcccggactctcccagcggacagccccccagccccacagcctgagcctcccagctgccatgtgcctgttgcacacctgcacacacgccctggcacacatacacacatgcgtgcaggcttgtgcagacactcagggatggagctgctgctgaagggacttgtagggagaggctcgtcaacaagcactgttctggaaccttctctccacgtggcccacaggcctgaccacaggggctgtgggtcctgcgtccccttcctcgggtgagcctggcctgtcccgttcagccgttgggcccaggcttcctcccctccaaggtgaaacactgcagtcccggtgtggtggctccccatgcaggacgggccaggctgggagtgccgccttcctgtgccaaattcagtggggactcagtgcccaggccctggccacgagctttggccttggtctacctgccaggccaggcaaagcgcctttacacaggcctcggaaaacaatggagtgagcacaagatgccctgtgcagctgcccgagggtctccgcccaccccggccggactttgatccccccgaagtcttcacaggcactgcatcgggttgtctggcgcccttttcctccagcctaaactgacatcatcctatggactgagccggccactctctggccgaagtggccgcaggctgtgcccccgagctgcccccaccccctcacagggtccctcagattataggtgcccaggctgaggtgaagaggcctgggggccctgccttccgggcgctcctggaccctggggcaaacctgtgacccttttctactggaatagaaatgagttttatcatctttgaaaaataattcactcttgaagtaataaacgtttaaaaaaatgggaaaaaaaaaaaaaaaaaa

SEQ ID NO: 2660 - DNA, 1260 bp, Homo Sapiens
  NM_005507
ggccggcgggaagactccgttacccagcgagcgaggcggcggcgcagggccagcggactccatttcccgtcggctcgcggtgggagcgccggaagcccgccccacccctcattgtgcggctcctactaaacggaaggggccgggagaggccgcgttcagtcgggtcccggcagcggctgcagcgctctcgtcttctgcggctctcggtgccctctccttttcgtttccggaaacatggcctccggtgtggctgtctctgatggtgtcatcaaggtgttcaacgacatgaaggtgcgtaagtcttcaacgccagaggaggtgaagaagcgcaagaaggcggtgctcttctgcctgagtgaggacaagaagaacatcatcctggaggagggcaaggagatcctggtgggcgatgtgggccagactgtcgacgacccctacgccacctttgtcaagatgctgccagataaggactgccgctatgccctctatgatgcaacctatgagaccaaggagagcaagaaggaggatctggtgtttatcttctgggcccccgagtctgcgccccttaagagcaaaatgatttatgccagctccaaggacgccatcaagaagaagctgacagggatcaagcatgaattgcaagcaaactgctacgaggaggtcaaggaccgctgcaccctggcagagaagctggggggcagtgccgtcatctccctggagggcaagcctttgtgagccccttctggccccctgcctggagcatctggcagccccacacctgcccttgggggttgcaggctgcccccttcctgccagaccggaggggctggggggatcccagcagggggagggcaatcccttcaccccagttgccaaacagaccccccaccccctggattttccttctccctccatcccttgacggttctggccttcccaaactgcttttgatcttttgattcctcttgggctgaagcagaccaagttccccccaggcaccccagttgtgggggagcctgtattttttttaacaacatccccattccccacctggtcctcccccttcccatgctgccaacttctaaccgcaatagtgactctgtgcttgtctgtttagttctgtgtataaatggaatgttgtggagatgacccctccctgtgccggctggttcctctcccttttcccctggtcacggctactcatggaagcaggaccagtaagggaccttcgattaaaaaaaaaaaagacaataataaaaa

SEQ ID NO: 2661 - DNA, 1657 bp, Homo Sapiens
  NM_005508
gctcacaggaagccacgcacccttgaaaggcaccgggtccttcttagcatcgtgcttcctgagcaagcctggcattgcctcacagaccttcctcagagccgctttcagaaaagcaagctgcttctggttgggcccagacctgccttgaggagcctgtagagttaaaaaatgaaccccacggatatagcagacaccaccctcgatgaaagcatatacagcaattactatctgtatgaaagtatccccaagccttgcaccaaagaaggcatcaaggcatttggggagctcttcctgcccccactgtattccttggtttttgtatttggtctgcttggaaattctgtggtggttctggtcctgttcaaatacaagcggctcaggtccatgactgatgtgtacctgctcaaccttgccatctcggatctgctcttcgtgttttccctccctttttggggctactatgcagcagaccagtgggtttttgggctaggtctgtgcaagatgatttcctggatgtacttggtgggcttttacagtggcatattctttgtcatgctcatgagcattgatagatacctggcaattgtgcacgcggtgttttccttgagggcaaggaccttgacttatggggtcatcaccagtttggctacatggtcagtggctgtgttcgcctcccttcctggctttctgttcagcacttgttatactgagcgcaaccatacctactgcaaaaccaagtactctctcaactccacgacgtggaaggttctcagctccctggaaatcaacattctcggattggtgatccccttagggatcatgctgttttgctactccatgatcatcaggaccttgcagcattgtaaaaatgagaagaagaacaaggcggtgaagatgatctttgccgtggtggtcctcttccttgggttctggacaccttacaacatagtgctcttcctagagaccctggtggagctagaagtccttcaggactgcacctttgaaagatacttggactatgccatccaggccacagaaactctggcttttgttcactgctgccttaatcccatcatctacttttttctgggggagaaatttcgcaagtacatcctacagctcttcaaaacctgcaggggcctttttgtgctctgccaatactgtgggctcctccaaatttactctgctgacacccccagctcatcttacacgcagtccaccatggatcatgatctccatgatgctctgtagaaaaatgaaatggtgaaatgcagagtcaatgaactttccacattcagagcttacttaaaattgtattttagtaagagattcctgagccagtgtcaggaggaaggcttacacccacagtggaaagacagcttctcatcctgcaggcagctttttctctcccactagacaagtccagcctggcaagggttcacctgggctgaggcatccttcctcacaccaggcttgcctgcaggcatgagtcagtctgatgagaactctgagcagtgcttgaatgaagttgtaggtaatattgcaaggcaaagactattcccttctaacctgaactgatgggtttctccagagggaattgcagagtactggctgatggagtaaatcgctaccttttgctgtggcaaatgggccctct

SEQ ID NO: 2662 - DNA, 1590 bp, Homo Sapiens
  NM_005510
gcccgtcagtgctgggaggggcggtggcgacgcacataccagcatcacctccgccaggccgggccccacgccggccgcggattggctccctccaagggcacgcacgcccggggactcgttggcggcgtggaggggcgccggtggccacgttggtgtcaacctccttcgtgaagctcacacctcccccgccccgggaggggtttgcccgccactgtcgctgaatgattgcatcatcgaaagcagaaaaccacttttgcatccttcggcctctggcgtgcctgccatgacgtcatagctctgcggaggtggaagttggggagctttgaggacctcatggatcccagggggaccaagagaggagctgagaagacagaggtagctgagcctcggaacaaactacctcgtccagcaccttctctgcccacagaccctgccctctactctgggccctttcctttctaccggcgcccttcggaactgggctgcttctccctggatgctcaacgccagtaccatggagatgcccgagccctgcgctactatagcccaccccccactaacggtccaggccccaactttgacctcagagacggatacccggatcgataccagccccgggacgaggaggtccaggaaaggctggaccacctgctgtgctggctcctggaacaccgaggccggttggaggggggtccaggctggctggcagaggccatagtgacgtggcgggggcacctgacaaaactgctgacgacaccgtatgagcggcaggagggctggcagctggcagcctcccggttccagggaacactatacctgagtgaagtggagacaccgaacgctcgggcccagaggcttgctcggccaccgctcctccgggagcttatgtacatgggatacaaatttgagcagtacatgtgtgcagacaaacctggaagctccccagacccctctggggaggttaacaccaacgtggccttctgctctgtgctacgcagccgcctgggaagccaccctctgctcttctcaggggaggtagactgcacagacccccaagccccatccacacagcccccaacctgctatgtggagctcaagacctccaaggagatgcacagccctggccaatggaggagtttctacagacacaagctcctgaaatggtgggctcagtcattcctcccaggggtcccgaatgttgttgctggcttccgtaacccagacggttttgtctcttccctcaagacctttcctaccatgaagatgtttgaatatgtcaggaatgaccgtgacggctggaatccctctgtgtgcatgaacttctgtgccgccttccttagctttgcccagagcacggttgtccaggatgaccccaggctcgttcatctcttctcttgggagcctggcggcccagtcaccgtgtctgtacaccaagatgcaccttacgccttcctgcccatatggtatgtggaagctatgactcaggacctcccatcaccccccaagactccctctcccaaatagtaatgctttagagggaggcagtcatatctctgtgtgcagataataaaagcatatttctaagaggtt

SEQ ID NO: 2663 - DNA, 2274 bp, Homo Sapiens
  NM_005520
gcagaactcgcacaagggaccttatttaggttgcgcaggcgcccgctggccatttcgtcttagccacgcagaagtcgcgtgtctagtttgtttcgacgccggaccgcgtaagagacgatgatgttgggcacggaaggtggagagggattcgtggtgaaggtccggggcttgccctggtcttgctcggccgatgaagtgcagaggtttttttctgactgcaaaattcaaaatggggctcaaggtattcgtttcatctacaccagagaaggcagaccaagtggcgaggcttttgttgaacttgaatcagaagatgaagtcaaattggccctgaaaaaagacagagaaactatgggacacagatatgttgaagtattcaagtcaaacaacgttgaaatggattgggtgttgaagcatactggtccaaatagtcctgacacggccaatgatggctttgtacggcttagaggacttccctttggatgtagcaaggaagaaattgttcagttcttctcagggttggaaatcgtgccaaatgggataacattgccggtggacttccaggggaggagtacgggggaggccttcgtgcagtttgcttcacaggaaatagctgaaaaggctctaaagaaacacaaggaaagaatagggcacaggtatattgaaatctttaagagcagtagagctgaagttagaactcattatgatccaccacgaaagcttatggccatgcagcggccaggtccttatgacagacctggggctggtagagggtataacagcattggcagaggagctggctttgagaggatgaggcgtggtgcttatggtggaggctatggaggctatgatgattacaatggctataatgatggctatggatttgggtcagatagatttggaagagacctcaattactgtttttcaggaatgtctgatcacagatacggggatggtggctctactttccagagcacaacaggacactgtgtacacatgcggggattaccttacagagctactgagaatgacatttataattttttttcaccgctcaaccctgtgagagtacacattgaaattggtcctgatggcagagtaactggtgaagcagatgtcgagttcgcaactcatgaagatgctgtggcagctatgtcaaaagacaaagcaaatatgcaacacagatatgtagaactcttcttgaattctacagcaggagcaagcggtggtgcttacgaacacagatatgtagaactcttcttgaattctacagcaggagcaagcggtggtgcttatggtagccaaatgatgggaggcatgggcttgtcaaaccagtccagctacgggggcccagccagccagcagctgagtgggggttacggaggcggctacggtggccagagcagcatgagtggatacgaccaagttttacaggaaaactccagtgattttcaatcaaacattgcataggtaaccaaggagcagtgaacagcagctactacagtagtggaagccgtgcatctatgggcgtgaacggaatgggagggttgtctagcatgtccagtatgagtggtggatggggaatgtaattgatcgatcctgatcactgactcttggtcaaccttttttttttttttttttttttctttaagaaaacttcagtttaacagtttctgcaatacaagcttgtgatttatgcttactctaagtggaaatcaggattgttatgaagacttaaggcccagtatttttgaatacaatactcatctaggatgtaacagtgaagctgagtaaactataactgttaaacttaagttccagcttttctcaagttagttataggatgtacttaagcagtaagcgtatttaggtaaaagcagttgaattatgttaaatgttgccctttgccacgttaaattgaacactgttttggatgcatgttgaaagacatgcttttatttttttgtaaaacaatataggagctgtgtctactattaaaagtgaaacattttggcatgtttgttaattctagtttcatttaataacctgtaaggcacgtaagtttaagctttttttttttttaagttaatgggaaaaatttgagacgcaataccaatacttaggattttggtcttggtgtttgtatgaaattctgaggccttgatttaaatctttcattgtattgtgatttccttttaggtatattgcgctaagtgaaacttgtcaaataaatcctccttttaaaaactgcaaaaaaaaaaaaaaaaaaaaaaaaaa

SEQ ID NO: 2664 - DNA, 2550 bp, Homo Sapiens
  NM_005527
tttggaaaaagattactgagttggagccgtctcaaatttgcagggagggacggggtggggggtggggggaccccggttgtgcagtttgatattgagggagcccccacctactcgctggggctgcgtaatctggacgtttccaaactgaagcgaaggcgtcgggagactaggcctcagagaaccatggctactgccaagggaatcgccataggcatcgacctgggcaccacctactcctgtgtgggggtgttccagcacggcaaggtggagatcatcgccaacgaccagggcaaccgcaccacccccagctacgtggccttcacagacaccgagcggctcattggggatgcggccaagaaccaggtagcaatgaatccccagaacactgtttttgatgctaaacgtctgatcggcaggaaatttaatgatcctgttgtacaagcagatatgaaactttggccttttcaagtgattaatgaaggaggcaagcccaaagtccttgtgtcctacaaaggggagaataaagctttctaccctgaggaaatctcttcgatggtattgactaagttgaaggagactgctgaggcctttttgggccaccctgtcaccaatgcagtgattaccgtgccagcctatttcaatgactctcaacgtcaggctactaaggatgcaggtgtgattgctggacttaatgtgctaagaatcatcaatgagcccacggctgctgccattgcctatggtttagataaaggaggtcaaggagaacgacatgtcctgatttttgatctgggtggaggcacatttgatgtgtcaattctgaccatagatgatgggatttttgaggtaaaggccactgctggggacactcacctgggtggggaggactttgacaacaggcttgtgagccacttcgtggaggagttcaagaggaaacacaaaaaggacatcagccagaacaagcgagccgtgaggcggctgcgcaccgcctgcgagagggccaagaggaccctgtcgtccagcacccaggccaacctagaaattgattcactttatgaaggcattgacttctatacatccatcaccagagctcgatttgaagagttgtgtgcagacctgtttaggggtaccctggagcctgtagaaaaagcgcttcgggatgccaagatggataaggctaaaatccatgacattgttttagtagggggctccacccgcatccccaaggtgcagcggctgcttcaggactacttcaatggacgtgatctcaacaagagcatcaaccctgatgaggccgtagcatatggggctgcggtacaagcagccatcctgatgggggacaagtctgagaaggtacaggacctgctgctgctggacgtggctcccctgtccctggggctggagacggctgggggcgtgatgactgccctgataaagcgcaactccaccatccccaccaagcagacacagattttcaccacctactctgacaaccaacccggggtgctgatccaggtgtatgagggcgagagggccatgacaaaggacaacaacctgctggggcggtttgacctgactggaatccctccagcacccaggggagttcctcagatcgaggtgacgtttgacattgatgccaatggtattctcaatgtcacagccacggacaagagcaccggcaaggtgaacaagatcaccatcaccaatgacaagggccgcctgagcaaggaggagattgagcgcatggttctggatgctgagaaatataaagctgaagatgaggtccagagggagaaaattgctgcaaagaatgccttagaatcctatgcttttaacatgaagagtgttgtgagtgatgaaggtttgaagggcaagattagtgagtctgataaaaataaaatattggataaatgcaacgagctcctttcgtggctggaggtcaatcaactggcagagaaagatgagtttgatcataagagaaaggaattggagcagatgtgtaaccctatcatcacaaaactctaccaaggaggatgcactgggcctgcctgcggaacagggtatgtgcctggaaggcctgccacaggccccacaattgaagaagtagattaattctttttagaactgaagcatcctaggatgcctctacatgtatttcattcccctcatcttcaaacatcattattattcttgaccagacctgaatctaagttaccatcccttggaaattctggagaaggagtctcatgcaccacctatcacactccctcacatcctgtttctgactttggaatggactcaggaaaactaggcccctctttaaaccgtgtgatgtatttgaatgtctgttatttccagccaccctaacattcttcttcctgtgtggatgcttatttgtcaatcagtaaatttgttcgtaaagaaaattacttctggtatttaggctgtgaatgtaccttgaaggggagagttcatggagagagcatgtgttctctgattgtgaggtcactgtgaatgattaaattggtaagggtaaagtaaaaaaaaaaaaaa

SEQ ID NO: 2665 - DNA, 2701 bp, Homo Sapiens
  NM_005530
gttgctgcggagccaggaggggaagcgatggctgggcccgcgtggatctctaaggtctctcggctgctgggggcattccacaacccaaaacaggtgaccagaggttttactggtggtgttcagacagtaactttaattccaggagatggtattggcccagaaatttcagctgcagttatgaagatttttgatgctgccaaagcacctattcagtgggaggagcggaacgtcactgccattcaaggacctggaggaaagtggatgatcccttcagaggctaaagagtccatggataagaacaagatgggcttgaaaggccctttgaagaccccaatagcagccggtcacccatctatgaatttactgctgcgcaaaacatttgacctttacgcgaatgtccgaccatgtgtctctatcgaaggctataaaaccccttacaccgatgtaaatattgtgaccattcgagagaacacagaaggagaatacagtggaattgagcatgtgattgttgatggagtcgtgcagagtatcaagctcatcaccgagggggcgagcaagcgcattgctgagtttgcctttgagtatgcccggaacaaccaccggagcaacgtcacggcggtgcacaaagccaacatcatgcggatgtcagatgggctttttctacaaaaatgcagggaagttgcagaaagctgtaaagatattaaatttaatgagatgtaccttgatacagtatgtttgaatatggtacaagatccttcccaatttgatgttcttgttatgccaaatttgtatggagacatccttagtgacttgtgtgcaggattgatcggaggtctcggtgtgacaccaagtggcaacattggagccaatggggttgcaatttttgagtcggttcatgggacggctccagacattgcaggcaaggacatggcgaatcccacagccctcctgctcagtgccgtgatgatgctgcgccacatgggactttttgaccatgctgcaagaattgaggctgcgtgttttgctacaattaaggacggaaagagcttgacaaaagatttgggaggcaatgcaaaatgctcagacttcacagaggaaatctgtcgccgagtaaaagatttagattaacacttctacaactggcatttacatcagtcactctaaatggacaccacatgaacctctgtttagaatacctacgtatgtatgcattggtttgcttgtttcttgacagtacatttttagatctggccttttcttaacaaaatctgtgcaaaagatgcaggtggatgtccctaggtctgttttcaaagaactttttccaagtgcttgttttatttattaagtgtctacctggtaaatgttttttttgtaaactctgagtggactgtatcatttgctattctaaaccattttacacttaagttaaaatagtttctcttcagctgtaaataacaggatacagaattaacaagagaaaatgtctaactttttaagaaaaaccttattttcttcggtttttgaaaaacataatggaaataaaacaggatattgacataatagcacaaaatgacactcttctaaaactaaatgggcacaagagaattttcctgggaaagttcacatcaaaaagagtgaatgtggtatatttctaaatgatatggaaaatagagacagatttgtcctttacagaaattactgagtgtgaataaaaacttcagatccaagaaatatataatgagagatataatttttgttaataagacaaaggtaatatattggatacaaagacacaaatgtattgtgtgttcaattattttgttgtcttgagatttaatattctttccaagagcttttaatgaagcagagagctagtacttcattttcactggatacattttcagcatcatgagttgtcacagcctctgagcccctgatctgaagccagaagggctgagtgtattgtaaacttattcttgcatgttgctgtctgggaatggaccacactacagcaggtagttctgggggcgatactgccgaaaggcccgaacacatgtattttggctgcaattgaggaacttgggatgctattaattttgtatttcagcaactgccccttctcctatcccaaagcaccaattactgccctctgcctcagcagtaccagtataagatgacattccaaagactggaggcaactcagcctgagttaattcacaaaattatgccatgctggggcttgagcttgagcttgggcttaggcttgggctcagcttttgaccctcaggcatctcctttcccttcctgtcttcctctcccttctcctctgctgcagcatgattttcttaatcttcagacactcactattttcatgaacagttaccctctgtccccacaaccaaagacaactcatggcctcctttggcccttgtgtaacattgcaaacctgtggctttgcaaaatgtacccaggtcacaaggggatttttttttttttagcaatgatatccctgtctgggtcactttttaagcttgtaaccgcccccccagacttataatcttaaatgtattttcctttgtttaagctgctgcttcctctgtttcattggattgtgccagttatcagtggctcttgggttcaaagtaataaagaattccaaaactgaaaaaaaaaaaaaaaaaaaaaaaaaaaaaaaaaaaaa

SEQ ID NO: 2666 - DNA, 2234 bp, Homo Sapiens
  NM_005534
gttgactggaggcggaggttgcagtgagccgagatcgccccactgcactccagcctggtgactccgtctcaaaaaaaaggggaggggggcgggggagagttgaaagcttaatatgtactttgggggctattaaagcaaacatttcgactaaaggggcgaatcctcgaattgtgcgatcaagcacccgagaggagagttggggggggtcaggaggggtgggggctccagggaaagcccgggggtctgggccggggtctcgcggggcccttccggaaggatcgcggcccccgaaggtgggcgtcccgcggggctccagtctccaggacgttccgggaggctccgcgctctgggaggccggctgcgtggggtccccgcgctgcagccgcagaggccccccagggccgcggttcccggagcgggaaagtcccgcgcgggggcggtggcctcgggggcgggacggggcgggggcgggggcgcgggcggccgagccgaatcccctccaccgggacgccccgctgctgctcgggaagaggcgggccctgcgcgccctgcgctcgccatggcggtttgggcggcgacgtgagcggctccgcggaccccgagcggggccccggccgcgacctgagccgccgccgagcgcccggggccatgcgaccgacgctgctgtggtcgctgctgctgctgctcggagtcttcgccgccgccgccgcggccccgccagaccctctttcccagctgcccgctcctcagcacccgaagattcgcctgtacaacgcagagcaggtcctgagttgggagccagtggccctgagcaatagcacgaggcctgttgtctaccaagtgcagtttaaatacaccgacagtaaatggttcacggccgacatcatgtccataggggtgaattgtacacagatcacagcaacagagtgtgacttcactgccgccagtccctcagcaggcttcccaatggatttcaatgtcactctacgccttcgagctgagctgggagcactccattctgcctgggtgacaatgccttggtttcaacactatcggaatgtgactgtcgggcctccagaaaacattgaggtgaccccaggagaaggctccctcatcatcaggttctcctctccctttgacatcgctgatacctccacggcctttttttgttattatgtccattactgggaaaaaggaggaatccaacaggtcaaaggccctttcagaagcaactccatttcattggataacttaaaaccctccagagtgtactgtttacaagtccaggcacaactgctttggaacaaaagtaacatctttagagtcgggcatttaagcaacatatcttgctacgaaacaatggcagatgcctccactgagcttcagcaagtcatcctgatctccgtgggaacattttcgttgctgtcggtgctggcaggagcctgtttcttcctggtcctgaaatatagaggcctgattaaatactggtttcacactccaccaagcatcccattacagatagaagagtatttaaaagacccaactcagcccatcttagaggccttggacaaggacagctcaccaaaggatgacgtctgggactctgtgtccattatctcgtttccggaaaaggagcaagaagatgttctccaaacgctttgaaccaaagcatgggcctagcccactggctccctggaagagatcaagccatcggagctgctagagttctgtctggactttccagagaccagtattcccttttgctgcctctaaaaggcctgtccctgcagacatgagagacagcaggtctcatgggggtgacaagctttttttttttttcttaaagaattttcaaaatcaaattccagaatgattttacggagatatcccaggaaaattaaggcttctcttaaacactaaaaaggcatgtaattgcttgttagcaaaatggatatgacacatctctgatacttttttcattattggttgggctgagcagtcagaagacctggtcgtcgtcttgactttggcaaatgagccggagccccttgggcaggtcacacaacctgtcccagcgagggacaccgagtggcccttcatgtacatccatggtgtgctggcttaaaatgtaattaatcttgtaaatatactcctagtaatttaagattttgtttttaaactggaaataaaagattgtatagtgcatgttttttaaagtctaaaaaaaaaaaaaa

SEQ ID NO: 2667 - DNA, 4469 bp, Homo Sapiens
  NM_005540
aaatgtagtcactgtcccggaacctggggcagcggagtcccgtgcgccctgtggtgacagctcaggagggtgtgtgcgctcagcaggggccagcatggaccagtctgtggcaatccaggagacgctggctgagggggaatactgcgtcatcgcggtgcaaggtgtgctgtgtgagggggacagccggcagagccgcctcctgggactcgtgcgctaccgcctggagcacggcggccaggaacacgctctcttcctctatacgcaccggaggatggccattaccggggacgatgtctctctggaccagatagtgccagtctcgcgggattttacgctggaagaagtgtccccagatggtgaactctacatccttggctcagatgtgaccgtccagctggacacagcagagcttagcctcgtattccaactgccctttggttcacaaaccaggatgttcctccacgaagttgccagggcctgtccaggcttcgattctgcgacccgggatcctgaattcctgtggctgtctcggtataggtgcgcagagctggagctggagatgccaacgccgcgcggttgtaactcggccctagttacctggccagggtacgcgacaattggcggaggtggttctaactttgatggtttgagaccaaatgggaagggagtgcctatggaccaaagctccaggggtcaagataaaccagaaagcttgcaaccaagacagaataaatccaagtccgaaattactgacatggttcgctcctccactatcacagtgtcggacaaggctcatattttatccatgcagaagtttggactgcgagatacaattgtgaaatcacatctactacagaaagaagaggattacacctatatccagaacttcaggttttttgcgggaacatacaatgtaaatgggcagtcccccaaagaatgcctccggctgtggctgagcaatggtatccaggccccagatgtctattgtgtagggttccaggagcttgatctgagtaaggaagcttttttctttcacgataccccaaaggaggaagagtggttcaaagctgtgtcagagggtcttcatccagatgccaaatatgcaaaggtgaagcttatccgactggttgggattatgctgctgttatatgtcaaacaggagcatgcagcttatatctcagaagtggaagccgagactgtggggacaggaatcatggggaggatgggcaacaagggaggcgtggcgatcaggttccagttccacaacaccagcatctgcgttgtgaattctcacttggcagcccacattgaagagtatgagaggaggaaccaggactataaggacatttgttctcgaatgcagttttgtcagcctgacccaagccttccccctctcaccatcagcaaccatgatgtgatcttgtggctgggggacctcaactacaggatagaagagctggatgtggaaaaagtgaaaaagctcatcgaagagaaggactttcaaatgctgtatgcatatgatcagctgaaaattcaggtggccgcaaagactgtctttgaaggcttcacagagggtgagctcacattccagcctacttacaagtatgatacgggctctgacgactgggataccagtgagaagtgccgtgctcctgcctggtgtgatcggattctctggaaagggaagaacatcactcagctgagttaccagagccacatggccctgaagaccagtgaccacaagcctgtcagctcagtgtttgacatcggggtgagggtcgtaaatgacgagctttaccggaagacactggaggaaattgttcgctccctggataagatggaaaatgccaacattccttctgtgtccctgtccaagcgagagttctgttttcagaatgtgaagtacatgcaattgaaagtagaatcctttacaattcataatggacaagtaccctgtcattttgaattcatcaacaagcctgatgaagagtcttactgtaagcagtggctgaatgccaaccccagcagaggcttcctcctgccagattctgatgttgagattgacttggagctcttcgtaaataagatgacagctacaaagctcaactcgggtgaagacaaaattgaggacattctggttctgcacttggacaggggaaaggattactttttgtctgtgtctgggaactacctgcccagctgttttgggtctcccattcatacactgtgttacatgagagagccaatcttggacctaccacttgaaaccattagtgagctgactctgatgccagtatggactggagatgatgggagccagttggatagccccatggaaatccccaaagagctctggatgatggttgattacctgtaccgaaatgctgtccagcaggaagatctgtttcagcaaccaggcctgaggtcagaatttgaacatatcagggactgcttggatactggaatgattgataacctctctgccagcaatcattctgtagccgaagccctgctgcttttcctggagagccttccagagcctgtcatctgttacagcacctaccataactgcttggagtgttctggcaactacacagcaagcaaacaggtcatttctactctccccatattccacaaaaatgtcttccactacttgatggcgtttttgcgagaactgctgaaaaattcagcaaaaaatcatttggatgagaatattctagctagcatatttggcagcttattgcttcgaaacccagctggtcaccaaaagcttgatatgacagagaagaagaaggctcaagaatttattcaccagttcctctgcaacccactctgagcctctctctcctcctattttacttgaggctgccaattaccagccccacctgtttcagctcaagagatgccttaagataattatgtgaggccacttggtagcaagaatggcagctatttcctgagcctagtaccccaattaagcccaccattggttagcacactcagcgctgtgagtcgtgaagacacgggagaaaatccaccataataaaactgacattcaattttcaactttagttatttaacacagatttttttattttttatttttttttattttgagacggagttttgctctgtcgcgcagggtggagtgcggtggcacgatctcggctcactgcaacctctgcctcctgggtgcaagcaattatcctgcctcagcctcccgagtagctgggactgcaggcacacactgccacgcccagctaattttttgcattttagtagagacggggtttcaccgtgttgcccaggctgttctaaaactcctgaactcaggtaatctgcctgcctcggcctccccaagtgctaggattacagatgtgagccaccacgcccggccttttttttttttttttcttttttgagatggagtttcactcttgttgcccaggctggagtgcgttggcgtggtcttggctcactgcaacctctgcctccttggttcaagcaattctcctgcctcagcctctcgagtagctgggattataggcgtccgccaccatgcctggctaatttttttgtgtgtttttagtatagacacggtttcaccatgttggccaggctggtctcgaatgcctggcctcaggtgatccacctgccttggcctcccaaagtgctgggattacaggcatgaaccaccacgcctggcctaaaatgtttttaaataactgtacttgtactcactcaccctacctccagggcatagtcagtctgggctgagatccccatgatcagatatttgatggaaagtcctgaaaggccaatgagttggatggcaagaatgcaggcagaagctgctggataaaataggctacagccacctcagatgctttcagtgctctgtctgaggatgtgtatatgcatatgcaaactcgacccccgttcctgcccagataatggctcaataactctgaggctggttgctcagcctctgagggcaatacaggcatttaaaaaattaaaatgaccaggcacagtggctcacgcctgtaatctcggcactttgggagactgaggtgggagcatcacttgagaccaggagtttgggaccaggctgggcaacacagggagaccccctctctacaaaaacatttttaaaaaattagctgggtgtggtgatgcatgcctgtggtcccagttacttgggaggctgacgtgggtggctcacttgagcacaggagtttgaggctgcagtgacctatgaccacatcactgtacgccagcccgggtgagagagggagaccccgtctctaaaaataaaatgtaaaatcactgaaaaaatgagtgttcggtgaaacaagtgggattttctgggccagcaagtcttccaaactgtatatgatgcatcctgtctccatgtgtaatatattttaatgataaatgtatttttaacagtgaaaaaaaaaaaaaaa

SEQ ID NO: 2668 - DNA, 810 bp, Homo Sapiens
  NM_005543
ccaccatggacccccgtctgcccgcctgggcgctggtgctgctgggccctgccctggtgttcgcgttgggccccgcgcccaccccagagatgcgtgagaagttgtgcggccaccacttcgtacgcgcgctagtgcgcgtgtgcgggggcccccgctggtccaccgaagccaggaggcctgcgaccggaggcgaccgtgagttgctacagtggctggagagacgacatctgctccatgggctggtggccgacagtaatctcacgctgggacctggcctgcagcccctgccccagacctctcaccatcaccgccaccaccgtgcagctgccaccaaccctgcacgctactgctgcctcagtggctgtacccaacaagacctgctgaccctctgtccctactgattcctccttgggtgcagcctcagagtggcctgaggcccagagggtctggtctggtgagctcctgaggccacacagcaccataaagtctcgcatctacaggcctttgattacctcctgggatgggtgctcactatctaccccagaccaatgccacctgcagcctgtggagtcaactgcagaataaatcacaccctagccctggcttggaggatccccgctttcacagatgctggacactgacagccaaatgtcctcactccaggggagccccagacgctccgctccctgcatgtgtaacaccccttcttgctgtctcttagtaaataaacgacccaaagcagaaaaaaaaaaaaaaaaaaaaaaaaaaaaaaaaaaaaaaaaaaaaaaaaaaaaaaaaaaaaaaaaaaaa

SEQ ID NO: 2669 - DNA, 4366 bp, Homo Sapiens
  NM_005546
tgcattctttgccccaaaactctttcctttggttgtgctaagaggtgatgcccaaggtgcaccacctttcaagaactggatcatgaacaactttatcctcctggaagaacagctcatcaagaaatcccaacaaaagagaagaacttctccctcgaactttaaagtccgcttctttgtgttaaccaaagccagcctggcatactttgaagatcgtcatgggaagaagcgcacgctgaaggggtccattgagctctcccgaatcaaatgtgttgagattgtgaaaagtgacatcagcatcccatgccactataaatacccgtttcaggtggtgcatgacaactacctcctatatgtgtttgctccagatcgtgagagccggcagcgctgggtgctggcccttaaagaagaaacgaggaataataacagtttggtgcctaaatatcatcctaatttctggatggatgggaagtggaggtgctgttctcagctggagaagcttgcaacaggctgtgcccaatatgatccaaccaagaatgcttcaaagaagcctcttcctcctactcctgaagacaacaggcgaccactttgggaacctgaagaaactgtggtcattgccttatatgactaccaaaccaatgatcctcaggaactcgcactgcggcgcaacgaagagtactgcctgctggacagttctgagattcactggtggagagtccaggacaggaatgggcatgaaggatatgtaccaagcagttatctggtggaaaaatctccaaataatctggaaacctatgagtggtacaataagagtatcagccgagacaaagctgaaaaacttcttttggacacaggcaaagaaggagccttcatggtaagggattccaggactgcaggaacatacaccgtgtctgttttcaccaaggctgttgtaagtgagaacaatccctgtataaagcattatcacatcaaggaaacaaatgacaatcctaagcgatactatgtggctgaaaagtatgtgttcgattccatccctcttctcatcaactatcaccaacataatggaggaggcctggtgactcgactccggtatccagtttgttttgggaggcagaaagccccagttacagcagggctgagatacgggaaatgggtgatcgacccctcagagctcacttttgtgcaagagattggcagtgggcaatttgggttggtgcatctgggctactggctcaacaaggacaaggtggctatcaaaaccattcgggaaggggctatgtcagaagaggacttcatagaggaggctgaagtaatgatgaaactctctcatcccaaactggtgcagctgtatggggtgtgcctggagcaggcccccatctgcctggtgtttgagttcatggagcacggctgcctgtcagattatctacgcacccagcggggactttttgctgcagagaccctgctgggcatgtgtctggatgtgtgtgagggcatggcctacctggaagaggcatgtgtcatccacagagacttggctgccagaaattgtttggtgggagaaaaccaagtcatcaaggtgtctgactttgggatgacaaggttcgttctggatgatcagtacaccagttccacaggcaccaaattcccggtgaagtgggcatccccagaggttttctctttcagtcgctatagcagcaagtccgatgtgtggtcatttggtgtgctgatgtgggaagttttcagtgaaggcaaaatcccgtatgaaaaccgaagcaactcagaggtggtggaagacatcagtaccggatttcggttgtacaagccccggctggcctccacacacgtctaccagattatgaatcactgctggaaagagagaccagaagatcggccagccttctccagactgctgcgtcaactggctgaaattgcagaatcaggactttagtagagactgagtaccaggccacgggctgcagatcctgaatggaggaaggatatgtcctcattccatagagcattagaagctgccaccagcccaggaccctccagaggcagcctggcctgtggcatcagtccctgagtcaccatggaagcagcatcctgaccacagctggcagtcaagccacagctggagggtcagccaccaagctgggagctgagccagaacaggagtgatgtctctgcccttcctctagcctcttgtcacatgtggtgcacaaacctcaacctgacagctttcagacagcattcttgcacttcttagcaacagagagagacatgagtaagacccagattgctatttttattgttatttttaacatgaatctaaagtttatggttccagggactttttatttgacccaacaacacagtatcccaggatatggaggcaaggggaacaaagagcatgagtctttttccaagaaaactggtgagttaagtaagattagagtgagtgtgctctgttgctgtgatgctgtcagccacagcttcctgccgtagagaatgatagagcagctgctcacacaggaggccggatattctgagaagcagctttatgaggttttacagagtatgctgctacctctctccttgaagggagcatggcgagacccattggatggattggggtgaacagttcaggtcccatgcttggagcattgggtatctgatgtctgcaccagaacaagagaacctctgacggtggagaaccatgtggtgcaagaagagatcttaggtctcttcttttataccaagctcatcttttataccaagctgtgcaggtgactatgcctcctcttctgcacagaatgcttccaccagcatcctgagaagaaatgattacttctgaaaaacatccttttttccagcctctgggaatcagccccccctctctgcactatccgatcctcatcaacagagggcagcattgtgttggtcaatgttcccttggcgagcaattgaaacttgtttaggccctagggttgagcaattttaaggttgagactccaagtctcctaaaattctaggagagaaataaagagtctgtttttgctcaaaccatcaggatggaaacagtcaggcactgactggggtgcttccaagaggcatgagagtgcctactctggcttgagcacttctatatgcaaggtgaatatgtactgagctaggagacttccctgcaaaatctctgttcaccctgggttcacatccccatgaggtaatattattattcccattttacaaataatgtaactgaggctttaaaaagccaagacatctgcccaaagtgatggaactagaaagtctagagctggtattctagcccaaatctgtctgaccgcaatacacagattctttattcctattcgacactggcttctactgaaaatgaaacggattgcagagggaataaatacaaagatggaaagccagtaaagaagtcagtatagaaccactagcgaatagtgttgctctggcacagaccactgtggttgatggcatggccctccaacttggaataggattttccttttcctattctgtatccttaccttggtcatgttaatgactttggagttattcagttaatgaccctttaattctcacaaccaaccagtcatgttgcttgaagccatttatagacgagcttcaaagcaactttaaaagattcttctgtagaagtatgagttcttcctttaattatcattccaactttcagctgtagtcttcttgaacacttcatgaggagggacattccctgatataagagaggatggtgttgcaattggctctttctaaatcatgtgacgttttgactggcttgagattcagatgcataatttttaattataattattgtgaagtggagagcctcaagataaaactctgtcattcagaagatgattttactcagcttatccaaaattatctctgtttactttttagaattttgtacattatcttttgggatccttaattagagatgatttctggaacattcagtctagaaagaaaacattggaattgactgatctctgtggtttggtttagaaaattcccctgtgcatggtattacctttttcaagctcagattcatctaatcctcaactgtacatgtgtacattcttcacctcctggtgccctatcccgcaaaatgggcttcctgcctggtttttctcttctcacattttttaaatggtcccctgtgtttgtagagaactcccttatacagagttttggttctagttttatttcgtagattttgcattttgtaccttttgagactatgtatttatatttggatcagatgcatatttattaatgtacagtcactgctagtgttcaaaataaaaatgttacaaat

SEQ ID NO: 2670 - DNA, 2017 bp, Homo Sapiens
  NM_005548
aaattaacgtactatcctccttacttttgggtcgggccctccgggaagatggcggccgtgcaggcggccgaggtgaaagtggatggcagcgagccgaaactgagcaagaatgagctgaagagacgcctgaaagctgagaagaaagtagcagagaaggaggccaaacagaaagagctcagtgagaaacagctaagccaagccactgctgctgccaccaaccacaccactgataatggtgtgggtcctgaggaagagagcgtggacccaaatcaatactacaaaatccgcagtcaagcaattcatcagctgaaggtcaatggggaagacccatacccacacaagttccatgtagacatctcactcactgacttcatccaaaaatatagtcacctgcagcctggggatcacctgactgacatcaccttaaaggtggcaggtaggatccatgccaaaagagcttctgggggaaagctcatcttctatgatcttcgaggagagggggtgaagttgcaagtcatggccaattccagaaattataaatcagaagaagaatttattcatattaataacaaactgcgtcggggagacataattggagttcaggggaatcctggtaaaaccaagaagggtgagctgagcatcattccgtatgagatcacactgctgtctccctgtttgcatatgttacctcatcttcactttggcctcaaagacaaggaaacaaggtatcgccagagatacttggacttgatcctgaatgactttgtgaggcagaaatttatcatccgctctaagatcatcacatatataagaagtttcttagatgagctgggattcctagagattgaaactcccatgatgaacatcatcccagggggagccgtggccaagcctttcatcacttatcacaacgagctggacatgaacttatatatgagaattgctccagaactctatcataagatgcttgtggttggtggcatcgaccgggtttatgaaattggacgccagttccggaatgaggggattgatttgacgcacaatcctgagttcaccacctgtgagttctacatggcctatgcagactatcacgatctcatggaaatcacggagaagatggtttcagggatggtgaagcatattacaggcagttacaaggtcacctaccacccagatggcccagagggccaagcctacgatgttgacttcaccccacccttccggcgaatcaacatggtagaagagcttgagaaagccctggggatgaagctgccagaaacgaacctctttgaaactgaagaaactcgcaaaattcttgatgatatctgtgtggcaaaagctgttgaatgccctccacctcggaccacagccaggctccttgacaagcttgttggggagttcctggaagtgacttgcatcaatcctacattcatctgtgatcacccacagataatgagccctttggctaaatggcaccgctctaaagagggtctgactgagcgctttgagctgtttgtcatgaagaaagagatatgcaatgcgtatactgagctgaatgatcccatgcggcagcggcagctttttgaagaacaggccaaggccaaggctgcaggtgatgatgaggccatgttcatagatgaaaacttctgtactgccctggaatatgggctgccccccacagctggctggggcatgggcattgatcgagtcgccatgtttctcacggactccaacaacatcaaggaagtacttctgtttcctgccatgaaacccgaagacaagaaggagaatgtagcaaccactgatacactggaaagcacaacagttggcacttctgtctagaaaataataattgcaagttgtataactcaggcgtctttgcatttctgcgaaagatcaaggtctgcaagggaattcttgtgtgctgctttccatttgacaccgcagttctgttcagccatcagaagagagacaaggaattaaaaatttctttttaatcctgttaccaaataaaaaa

SEQ ID NO: 2671 - DNA, 11426 bp, Homo Sapiens
  NM_005560
agacccgccgggctcccgccgcgcgcgctgtccctggagctcggggacgcggcccggagccgggaagatggcgaagcggctctgcgcggggagcgcactgtgtgttcgcggcccccggggccccgcgccgctgctgctggtcgggctggcgctgctgggcgcggcgcgggcgcgggaggaggcgggcggcggcttcagcctgcacccgccctacttcaacctggccgagggcgcccgcatcgccgcctccgcgacctgcggagaggaggccccggcgcgcggctccccgcgccccaccgaggacctttactgcaagctggtagggggccccgtggccggcggcgaccccaaccagaccatccggggccagtactgtgacatctgcacggctgccaacagcaacaaggcacaccccgcgagcaatgccatcgatggcacggagcgctggtggcagagtccaccgctgtcccgcggcctggagtacaacgaggtcaacgtcaccctggacctgggccaggtcttccacgtggcctacgtcctcatcaagtttgccaactcaccccggccggacctctgggtgctggagcggtccatggacttcggccgcacctaccagccctggcagttctttgcctcctccaagagggactgtctggagcggttcgggccacagacgctggagcgcatcacacgggacgacgcggccatctgcaccaccgagtactcacgcatcgtgcccctggagaacggagagatcgtggtgtccctggtgaacggacgtccgggcgccatgaatttctcctactcgccgctgctacgtgagttcaccaaggccaccaacgtccgcctgcgcttcctgcgtaccaacacgctgctgggccatctcatggggaaggcgctgcgggaccccacggtcacccgccggtattattacagcatcaaggatatcagcatcggaggccgctgtgtctgccacggccacgcggatgcctgcgatgccaaagaccccacggacccgttcaggctgcagtgcacctgccagcacaacacctgcgggggcacctgcgaccgctgctgccccggcttcaatcagcagccgtggaagcctgcgactgccaacagtgccaacgagtgccagtcctgtaactgctacggccatgccaccgactgttactacgaccctgaggtggaccggcgccgcgccagccagagcctggatggcacctatcagggtgggggtgtctgtatcgactgccagcaccacaccaccggcgtcaactgtgagcgctgcctgcccggcttctaccgctctcccaaccaccctctcgactcgccccacgtctgccgccgctgcaactgcgagtccgacttcacggatggcacctgcgaggacctgacgggtcgatgctactgccggcccaacttctctggggagcggtgtgacgtgtgtgccgagggcttcacgggcttcccaagctgctacccgacgccctcgtcctccaatgacaccagggagcaggtgctgccagccggccagattgtgaattgtgactgcagcgcggcagggacccagggcaacgcctgccggaaggacccaagggtgggacgctgtctgtgcaaacccaacttccaaggcacccattgtgagctctgcgcgccagggttctacggccccggctgccagccctgccagtgttccagccctggagtggccgatgaccgctgtgaccctgacacaggccagtgcaggtgccgagtgggcttcgagggggccacatgtgatcgctgtgcccccggctactttcacttccctctctgccagttgtgtggctgcagccctgcaggaaccttgcccgagggctgcgatgaggccggccgctgcctatgccagcctgagtttgctggacctcattgtgaccggtgccgccctggctaccatggtttccccaactgccaagcatgcacctgcgaccctcggggagccctggaccagctctgtggggcgggaggtttgtgccgctgccgccccggctacacaggcactgcctgccaggaatgcagccccggctttcacggcttccccagctgtgtcccctgccactgctctgctgaaggctccctgcacgcagcctgtgacccccggagtgggcagtgcagctgccggccccgtgtgacggggctgcggtgtgacacatgtgtgcccggtgcctacaacttcccctactgcgaagctggctcttgccaccctgccggtctggccccagtggatcctgcccttcctgaggcacaggttccctgtatgtgccgggctcacgtggaggggccgagctgtgaccgctgcaaacctgggttctggggactgagccccagcaaccccgagggctgtacccgctgcagctgcgacctcaggggcacactgggtggagttgctgagtgccagccgggcaccggccagtgcttctgcaagccccacgtgtgcggccaggcctgcgcgtcctgcaaggatggcttctttggactggatcaggctgactattttggctgccgcagctgccggtgtgacattggcggtgcactgggccagagctgtgaaccgaggacgggcgtctgccggtgccgccccaacacccagggccccacctgcagcgagcctgcgagggaccactacctcccggacctgcaccacctgcgcctggagctggaggaggctgccacacctgagggtcacgccgtgcgctttggcttcaaccccctcgagttcgagaacttcagctggaggggctacgcgcagatggcacctgtccagcccaggatcgtggccaggctgaacctgacctcccctgaccttttctggctcgtcttccgatacgtcaaccggggggccatgagtgtgagcgggcgggtctctgtgcgagaggagggcaggtcggccacctgcgccaactgcacagcacagagtcagcccgtggccttcccacccagcacggagcctgccttcatcaccgtgccccagaggggcttcggagagccctttgtgctgaaccctggcacctgggccctgcgtgtggaggccgaaggggtgctcctggactacgtggttctgctgcctagcgcatactacgaggcggcgctcctgcagctgcgggtgactgaggcctgcacataccgtccctctgcccagcagtctggcgacaactgcctcctctacacacacctccccctggatggcttcccctcggccgccgggctggaggccctgtgtcgccaggacaacagcctgccccggccctgccccacggagcagctcagcccgtcgcacccgccactgatcacctgcacgggcagtgatgtggacgtccagcttcaagtggcagtgccacagccaggccgctatgccctagtggtggagtacgccaatgaggatgcccgccaggaggtgggcgtggccgtgcacaccccacagcgggccccccagcaggggctgctctccctgcacccctgcctgtacagcaccctgtgccggggcactgcccgggatacccaggaccacctggctgtcttccacctggactcggaggccagcgtgaggctcacagccgaacaggcacgcttcttcctgcacggggtcactctggtgcccattgaggagttcagcccggagttcgtggagccccgggtcagctgcatcagcagccacggcgcctttggccccaacagtgccgcctgtctgccctcgcgcttcccaaagccgccccagcccatcatcctcagggactgccaggtgatcccgctgccgcccggcctcccgctgacccacgcgcaggatctcactccagccatgtccccagctggaccccgacctcggccccccaccgctgtggaccctgatgcagagcccaccctgctgcgtgagccccaggccaccgtggtcttcaccacccatgtgcccacgctgggccgctatgccttcctgctgcacggctaccagccagcccaccccaccttccccgtggaagtcctcatcaacgccggccgcgtgtggcagggccacgccaacgccagcttctgtccacatggctacggctgccgcaccctggtggtgtgtgagggccaggccctgctggacgtgacccacagcgagctcactgtgaccgtgcgtgtgcccaagggccggtggctctggctggattatgtactcgtggtccctgagaacgtctacagctttggctacctccgggaggagcccctggataaatcctatgacttcatcagccactgcgcagcccagggctaccacatcagccccagcagctcatccctgttctgccgaaacgctgctgcttccctctccctcttctataacaacggagcccgtccatgtggctgccacgaagtaggtgctacaggccccacgtgtgagcccttcgggggccagtgtccctgccatgcccatgtcattggccgtgactgctcccgctgtgccaccggatactggggcttccccaactgcaggccctgtgactgcggtgcccgcctctgtgacgagctcacgggccagtgcatctgcccgccacgcaccatcccgcccgactgcctgctgtgccagccccagacctttggctgccaccccctggtcggctgtgaggagtgtaactgctcagggcccggcatccaggagctcacagaccctacctgtgacacagacagcggccagtgcaagtgcagacccaacgtgactgggcgccgctgtgatacctgctctccgggcttccatggctacccccgctgccgcccctgtgactgtcacgaggcgggcactgcgcctggcgtgtgtgaccccctcacagggcagtgctactgtaaggagaacgtgcagggccccaaatgtgaccagtgcagccttgggaccttctcactggatgctgccaaccccaaaggttgcacccgctgcttctgctttggggccacggagcgctgccggagctcgtcctacacccgccaggagttcgtggatatggagggatgggtgctgctgagcactgaccggcaggtggtgccccacgagcggcagccagggacggagatgctccgtgcagacctgcggcacgtgcctgaggctgtgcccgaggctttccccgagctgtactggcaggccccaccctcctacctgggggaccgggtgtcatcctacggtgggaccctccgttatgaactgcactcagagacccagcggggagatgtctttgtccccatggagagcaggccggatgtggtgctgcagggcaaccagatgagcatcacattcctggagccggcataccccacgcctggccacgttcaccgtgggcagctgcagctggtggaggggaacttccggcatacggagacgcgcaacactgtgtcccgcgaggagctcatgatggtgctggccagcctggagcagctgcagatccgtgccctcttctcacagatctcctcggctgtcttcctgcgcagggtggcactggaggtggccagcccagcaggccagggggccctggccagcaatgtggagctgtgcctgtgccccgccagctaccggggggactcatgccaggaatgtgcccccggcttctatcgggacgtcaaaggtctcttcctgggccgatgtgtcccttgtcagtgccatggacactcagaccgctgcctccctggctctggcgtctgtgtggactgccagcacaacaccgaaggggcccactgtgagcgctgccaggctggcttcgtgagcagcagggacgaccccagcgccccctgtgtcagctgcccctgccccctctcagtgccttccaacaacttcgccgagggctgtgtcctgcgaggcggccgcacccagtgcctctgcaaacctggttatgcaggtgcctcctgcgagcggtgtgcgcccggattctttgggaacccactggtgctgggcagctcctgccagccatgcgactgcagcggcaacggtgaccccaacttgctcttcagcgactgcgaccccctgacgggcgcctgccgtggctgcctgcgccacaccactgggccccgctgcgagatctgtgcccccggcttctacggcaacgccctgctgcccggcaactgcacccggtgcgactgtaccccatgtgggacagaggcctgcgacccccacagcgggcactgcctgtgcaaggcgggcgtgactgggcggcgctgtgaccgctgccaggagggacattttggtttcgatggctgcgggggctgccgcccgtgtgcttgtggaccggccgccgagggctccgagtgccacccccagagcggacagtgccactgccgaccagggaccatgggaccccagtgccgcgagtgtgcccctggctactgggggctccctgagcagggctgcaggcgctgccagtgccctgggggccgctgtgaccctcacacgggccgctgcaactgccccccggggctcagcggggagcgctgcgacacctgcagccagcagcatcaggtgcctgttccaggcgggcctgtgggccacagcatccactgtgaagtgtgtgaccactgtgtggtcctgctcctggatgacctggaacgggccggcgccctcctccccgccattcacgagcaactgcgtggcatcaatgccagctccatggcctgggcccgtctgcacaggctgaacgcctccatcgctgacctgcagagccagctccggagccccctgggcccccgccatgagacggcacagcagctggaggtgctggagcagcagagcacaagcctcgggcaggacgcacggcggctaggcggccaggccgtggggacccgagaccaggcgagccaattgctggccggcaccgaggccacactgggccatgcgaagacgctgttggcggccatccgggctgtggaccgcaccctgagcgagctcatgtcccagacgggccacctggggctggccaatgcctcggctccatcaggtgagcagctgctccggacactggccgaggtggagcggctgctctgggagatgcgggcccgggacctgggggccccgcaggcagcagctgaggctgagttggctgcagcacagagattgctggcccgggtgcaggagcagctgagcagcctctgggaggagaaccaggcactggccacacaaacccgcgaccggctggcccagcacgaggccggcctcatggacctgcgagaggctttgaaccgggcagtggacgccacacgggaggcccaggagctcaacagccgcaaccaggagcgcctggaggaagccctgcaaaggaagcaggagctgtcccgggacaatgccaccctgcaggccactctgcatgcggctagggacaccctggccagcgtcttcagattgctgcacagcctggaccaggctaaggaggagctggagcgcctcgccgccagcctggatggggctcggaccccactgctgcagaggatgcagaccttctccccggcgggcagcaagctgcgtctagtggaggccgccgaggcccacgcacagcagctgggccagctggcactcaatctgtccagcatcatcctggacgtcaaccaggaccgcctcacccagagggccatcgaggcctccaacgcctacagccgcatcctgcaggccgtgcaggctgccgaggatgctgctggccaggccctgcagcaggcggaccacacgtgggcgacggtggtgcggcagggcctggtggaccgagcccagcagctcctggccaacagcactgcactagaagaggccatgctccaggaacagcagaggctgggccttgtgtgggctgccctccagggtgccaggacccagctccgagatgtccgggccaagaaggaccagctggaggcgcacatccaggcggcgcaggccatgcttgccatggacacagacgagacaagcaagaagatcgcacatgccaaggctgtggctgctgaagcccaggacaccgccacccgtgtgcagtcccagctgcaggccatgcaggagaatgtggagcggtggcagggccagtacgagggcctgcggggccaggacctgggccaggcagtgcttgacgcaggccactcagtgtccaccctggagaagacgctgccccagctgctggccaagctgagcatcctggagaaccgtggggtgcacaacgccagcctggccctgtccgccagcattggccgcgtgcgagagctcattgcccaggcccggggggctgccagtaaggtcaaggtgcccatgaagttcaacgggcgctcaggggtgcagctgcgcaccccacgggatcttgccgaccttgctgcctacactgccctcaagttctacctgcagggcccagagcctgagcctgggcagggtaccgaggatcgctttgtgatgtacatgggcagccgccaggccactggggactacatgggtgtgtctctgcgtgacaagaaggtgcactgggtgtatcagctgggtgaggcgggccctgcagtcctaagcatcgatgaggacattggggagcagttcgcagctgtcagcctggacaggactctccagtttggccacatgtccgtcacagtggagagacagatgatccaggaaaccaagggtgacacggtggcccctggggcagaggggctgctcaacctgcggccagacgacttcgtcttctacgtcggggggtaccccagtaccttcacgccccctcccctgcttcgcttccccggctaccggggctgcatcgagatggacacgctgaatgaggaggtggtcagcctctacaacttcgagaggaccttccagctggacacggctgtggacaggccttgtgcccgctccaagtcgaccggggacccgtggctcacggacggctcctacctggacggcaccggcttcgcccgcatcagcttcgacagtcagatcagcaccaccaagcgcttcgagcaggagctgcggctcgtgtcctacagcggggtgctcttcttcctgaagcagcagagccagttcctgtgcttggccgtgcaagaaggcagcctcgtgctgttgtatgactttggggctggcctgaaaaaggccgtcccactgcagcccccaccgcccctgacctcggccagcaaggcgatccaggtgttcctgctggggggcagccgcaagcgtgtgctggtgcgtgtggagcgggccacggtgtacagcgtggagcaggacaatgatctggagctggccgacgcctactacctggggggcgtgccgcccgaccagctgcccccgagcctgcgacggctcttccccaccggaggctcagtccgtggctgcgtcaaaggcatcaaggccctgggcaagtatgtggacctcaagcggctgaacacgacaggcgtgagcgccggctgcaccgccgacctgctggtggggcgcgccatgactttccatggccacggcttccttcgcctggcgctctcgaacgtggcaccgctcactggcaacgtctactccggcttcggcttccacagcgcccaggacagtgccctgctctactaccgggcgtccccggatgggctatgccaggtgtccctgcagcagggccgtgtgagcctacagctcctgaggactgaagtgaaaactcaagcgggcttcgccgatggtgccccccattacgtcgccttctacagcaatgccacgggagtctggctgtatgtcgatgaccagctccagcagatgaagccccaccggggaccaccccccgagctccagccgcagcctgaggggcccccgaggctcctcctgggaggcctgcctgagtctggcaccatttacaacttcagtggctgcatcagcaacgtcttcgtgcagcggctcctgggcccacagcgcgtatttgatctgcagcagaacctgggcagcgtcaatgtgagcacgggctgtgcacccgccctgcaagcccagaccccgggcctggggcctagaggactgcaggccaccgcccggaaggcctcccgccgcagccgtcagcccgcccggcatcctgcctgcatgctgcccccacacctcaggaccacccgagactcctaccagtttgggggttccctgtccagtcacctggagtttgtgggcatcctggcccgacataggaactggcccagtctctccatgcacgtcctcccgcgaagctcccgaggcctcctcctcttcactgcccgtctgaggcccggcagcccctccctggcgctcttcctgagcaatggccacttcgttgcacagatggaaggcctcgggactcggctccgcgcccagagccgccagcgctcccggcctggccgctggcacaaggtctccgtgcgctgggagaagaaccggatcctgctggtgacggacggggcccgggcctggagccaggaggggccgcaccggcagcaccagggggcagagcacccccagccccacaccctctttgtgggcggcctcccggccagcagccacagctccaaacttccggtgaccgtcgggttcagcggctgtgtgaagagactgaggctgcacgggaggcccctgggggcccccacacggatggcaggggtcacaccctgcatcttgggccccctggaggcgggcctgttcttcccaggcagcgggggagttatcactttagacctcccaggagctacactgcctgatgtgggcctggaactggaggtgcggcccctggcagtcaccggactgatcttccacttgggccaggcccggacgcccccctacttgcagttgcaggtgaccgagaagcaagtcctgctgcgggcggatgacggagcaggggagttctccacgtcagtgacccgcccctcagtgctgtgtgatggccagtggcaccggctagcggtgatgaaaagcgggaatgtgctccggctggaggtggacgcgcagagcaaccacaccgtgggccccttgctggcggctgcagctggtgccccagcccctctgtacctcgggggcctgcctgagcccatggccgtgcagccctggccccccgcctactgcggctgcatgaggaggctggcggtgaaccggtcccccgtcgccatgactcgctctgtggaggtccacggggcagtgggggccagtggctgcccagccgcctaggacacagccaaccccggcccctggtcaggcccctgcagctgcctcacaccgccccttgtgctcgcctcataggtgtctatttggactctaagctctacgggtgacagatcttgtttctgaagatggtttaagttatagcttcttaaacgaaagaataaaatactgcaaaatgtttttatatttggcccttccacccatttttaattgtgagagatttgtcaccaatcatcactggttcctccttaaaaattaaaaagtaacttctgtgtaa

SEQ ID NO: 2672 - DNA, 840 bp, Homo Sapiens
  NM_005564
actcgccacctcctcttccacccctgccaggcccagcagccaccacagcgcctgcttcctcggccctgaaatcatgcccctaggtctcctgtggctgggcctagccctgttgggggctctgcatgcccaggcccaggactccacctcagacctgatcccagccccacctctgagcaaggtccctctgcagcagaacttccaggacaaccaattccaggggaagtggtatgtggtaggcctggcagggaatgcaattctcagagaagacaaagacccgcaaaagatgtatgccaccatctatgagctgaaagaagacaagagctacaatgtcacctccgtcctgtttaggaaaaagaagtgtgactactggatcaggacttttgttccaggttgccagcccggcgagttcacgctgggcaacattaagagttaccctggattaacgagttacctcgtccgagtggtgagcaccaactacaaccagcatgctatggtgttcttcaagaaagtttctcaaaacagggagtacttcaagatcaccctctacgggagaaccaaggagctgacttcggaactaaaggagaacttcatccgcttctccaaatctctgggcctccctgaaaaccacatcgtcttccctgtcccaatcgaccagtgtatcgacggctgagtgcacaggtgccgccagctgccgcaccagcccgaacaccattgagggagctgggagaccctccccacagtgccacccatgcagctgctccccaggccaccccgctgatggagccccaccttgtctgctaaataaacatgtgccctcaggccaaaaaaaaaaaaaaaaaa

SEQ ID NO: 2673 - DNA, 2226 bp, Homo Sapiens
  NM_005566
gtctgccggtcggttgtctggctgcgcgcgccacccgggcctctccagtgccccgcctggctcggcatccacccccagcccgactcacacgtgggttcccgcacgtccgccggccccccccgctgacgtcagcatagctgttccacttaaggcccctcccgcgcccagctcagagtgctgcagccgctgccgccgattccggatctcattgccacgcgcccccgacgaccgcccgacgtgcattcccgattccttttggttccaagtccaatatggcaactctaaaggatcagctgatttataatcttctaaaggaagaacagaccccccagaataagattacagttgttggggttggtgctgttggcatggcctgtgccatcagtatcttaatgaaggacttggcagatgaacttgctcttgttgatgtcatcgaagacaaattgaagggagagatgatggatctccaacatggcagccttttccttagaacaccaaagattgtctctggcaaagactataatgtaactgcaaactccaagctggtcattatcacggctggggcacgtcagcaagagggagaaagccgtcttaatttggtccagcgtaacgtgaacatctttaaattcatcattcctaatgttgtaaaatacagcccgaactgcaagttgcttattgtttcaaatccagtggatatcttgacctacgtggcttggaagataagtggttttcccaaaaaccgtgttattggaagcggttgcaatctggattcagcccgattccgttacctaatgggggaaaggctgggagttcacccattaagctgtcatgggtgggtccttggggaacatggagattccagtgtgcctgtatggagtggaatgaatgttgctggtgtctctctgaagactctgcacccagatttagggactgataaagataaggaacagtggaaagaggttcacaagcaggtggttgagagtgcttatgaggtgatcaaactcaaaggctacacatcctgggctattggactctctgtagcagatttggcagagagtataatgaagaatcttaggcgggtgcacccagtttccaccatgattaagggtctttacggaataaaggatgatgtcttccttagtgttccttgcattttgggacagaatggaatctcagaccttgtgaaggtgactctgacttctgaggaagaggcccgtttgaagaagagtgcagatacactttgggggatccaaaaggagctgcaattttaaagtcttctgatgtcatatcatttcactgtctaggctacaacaggattctaggtggaggttgtgcatgttgtcctttttatctgatctgtgattaaagcagtaatattttaagatggactgggaaaaacatcaactcctgaagttagaaataagaatggtttgtaaaatccacagctatatcctgatgctggatggtattaatcttgtgtagtcttcaactggttagtgtgaaatagttctgccacctctgacgcaccactgccaatgctgtacgtactgcatttgccccttgagccaggtggatgtttaccgtgtgttatataacttcctggctccttcactgaacatgcctagtccaacattttttcccagtgagtcacatcctgggatccagtgtataaatccaatatcatgtcttgtgcataattcttccaaaggatcttattttgtgaactatatcagtagtgtacattaccatataatgtaaaaagatctacatacaaacaatgcaaccaactatccaagtgttataccaactaaaacccccaataaaccttgaacagtgactactttggttaattcattatattaagatataaagtcataaagctgctagttattatattaatttggaaatattaggctattcttgggcaaccctgcaacgattttttctaacagggatattattgactaatagcagaggatgtaatagtcaactgagttgtattggtaccacttccattgtaagtcccaaagtattatatatttgataataatgctaatcataattggaaagtaacattctatatgtaaatgtaaaatttatttgccaactgaatataggcaatgatagtgtgtcactatagggaacacagatttttgagatcttgtcctctggaagctggtaacaattaaaaacaatcttaaggcagggaaaaaaaaaaaaaaaaaa

SEQ ID NO: 2674 - DNA, 2277 bp, Homo Sapiens
  NM_005567
aatcgaaagtagactcttttctgaagcatttcctgggatcagcctgaccacgctccatactgggagaggcttctgggtcaaaggaccagtctgcagagggatcctgtggctggaagcgaggaggctccacacggccgttgcagctaccgcagccaggatctgggcatccaggcacggccatgacccctccgaggctcttctgggtgtggctgctggttgcaggaacccaaggcgtgaacgatggtgacatgcggctggccgatgggggcgccaccaaccagggccgcgtggagatcttctacagaggccagtggggcactgtgtgtgacaacctgtgggacctgactgatgccagcgtcgtctgccgggccctgggcttcgagaacgccacccaggctctgggcagagctgccttcgggcaaggatcaggccccatcatgctggatgaggtccagtgcacgggaaccgaggcctcactggccgactgcaagtccctgggctggctgaagagcaactgcaggcacgagagagacgctggtgtggtctgcaccaatgaaaccaggagcacccacaccctggacctctccagggagctctcggaggcccttggccagatctttgacagccagcggggctgcgacctgtccatcagcgtgaatgtgcagggcgaggacgccctgggcttctgtggccacacggtcatcctgactgccaacctggaggcccaggccctgtggaaggagccgggcagcaatgtcaccatgagtgtggatgctgagtgtgtgcccatggtcagggaccttctcaggtacttctactcccgaaggattgacatcaccctgtcgtcagtcaagtgcttccacaagctggcctctgcctatggggccaggcagctgcagggctactgcgcaagcctctttgccatcctcctcccccaggacccctcgttccagatgcccctggacctgtatgcctatgcagtggccacaggggacgccctgctggagaagctctgcctacagttcctggcctggaacttcgaggccttgacgcaggccgaggcctggcccagtgtccccacagacctgctccaactgctgctgcccaggagcgacctggcggtgcccagcgagctggccctactgaaggccgtggacacctggagctggggggagcgtgcctcccatgaggaggtggagggcttggtggagaagatccgcttccccatgatgctccctgaggagctctttgagctgcagttcaacctgtccctgtactggagccacgaggccctgttccagaagaagactctgcaggccctggaattccacactgtgcccttccagttgctggcccggtacaaaggcctgaacctcaccgaggatacctacaagccccggatttacacctcgcccacctggagtgcctttgtgacagacagttcctggagtgcacggaagtcacaactggtctatcagtccagacgggggcctttggtcaaatattcttctgattacttccaagccccctctgactacagatactacccctaccagtccttccagactccacaacaccccagcttcctcttccaggacaagagggtgtcctggtccctggtctacctccccaccatccagagctgctggaactacggcttctcctgctcctcggacgagctccctgtcctgggcctcaccaagtctggcggctcagatcgcaccattgcctacgaaaacaaagccctgatgctctgcgaagggctcttcgtggcagacgtcaccgatttcgagggctggaaggctgcgattcccagtgccctggacaccaacagctcgaagagcacctcctccttcccctgcccggcagggcacttcaacggcttccgcacggtcatccgccccttctacctgaccaactcctcaggtgtggactagacggcgtggcccaagggtggtgagaaccggagaaccccaggacgccctcactgcaggctcccctcctcggcttccttcctctctgcaatgaccttcaacaaccggccaccagatgtcgccctactcacctgagcgctcagcttcaagaaattactggaaggcttccactagggtccaccaggagttctcccaccacctcaccagtttccaggtggtaagcaccaggacgccctcgaggttgctctgggatccccccacagcccctggtcagtctgcccttgtcactggtctgaggtcattaaaattacattgaggttcctacaaaaaaaaaaaaaaaaaa

SEQ ID NO: 2675 - DNA, 3701 bp, Homo Sapiens
  NM_005569
taggcggtgcatcccgttcgcgcctggggctgtggtcttcccgcgcctgaggcggcggcggcaggagctgaggggagttgtagggaactgaggggagctgctgtgtcccccgcctcctcctccccatttccgcgctcccgggaccatgtccgcgctggcgggtgaagatgtctggaggtgtccaggctgtggggaccacattgctccaagccagatatggtacaggactgtcaacgaaacctggcacggctcttgcttccggtgttcagaatgccaggattccctcaccaactggtactatgagaaggatgggaagctctactgccccaaggactactgggggaagtttggggagttctgtcatgggtgctccctgctgatgacagggccttttatggtggctggggagttcaagtaccacccagagtgctttgcctgtatgagctgcaaggtgatcattgaggatggggatgcatatgcactggtgcagcatgccaccctctactgtgggaagtgccacaatgaggtggtgctggcacccatgtttgagagactctccacagagtctgttcaggagcagctgccctactctgtcacgctcatctccatgccggccaccactgaaggcaggcggggcttctccgtgtccgtggagagtgcctgctccaactacgccaccactgtgcaagtgaaagaggtcaaccggatgcacatcagtcccaacaatcgaaacgccatccaccctggggaccgcatcctggagatcaatgggacccccgtccgcacacttcgagtggaggaggtggaggatgcaattagccagacgagccagacacttcagctgttgattgaacatgaccccgtctcccaacgcctggaccagctgcggctggaggcccggctcgctcctcacatgcagaatgccggacacccccacgccctcagcaccctggacaccaaggagaatctggaggggacactgaggagacgttccctaaggcgcagtaacagtatctccaagtcccctggccccagctccccaaaggagcccctgctgttcagccgtgacatcagccgctcagaatcccttcgttgttccagcagctattcacagcagatcttccggccctgtgacctaatccatggggaggtcctggggaagggcttctttgggcaggctatcaaggtgacacacaaagccacgggcaaagtgatggtcatgaaagagttaattcgatgtgatgaggagacccagaaaacttttctgactgaggtgaaagtgatgcgcagcctggaccaccccaatgtgctcaagttcattggtgtgctgtacaaggataagaagctgaacctcctgacagagtacattgaggggggcacactgaaggactttctgcgcagtatggatccgttcccctggcagcagaaggtcaggtttgccaaaggaatcgcctccggaatggcctatttgcactctatgtgcatcatccaccgggatctgaactcgcacaactgcctcatcaagttggacaagactgtggtggtggcagactttgggctgtcacggctcatagtggaagagaggaaaagggcccccatggagaaggccaccaccaagaaacgcaccttgcgcaagaacgaccgcaagaagcgctacacggtggtgggaaacccctactggatggcccctgagatgctgaacggaaagagctatgatgagacggtggatatcttctcctttgggatcgttctctgtgagatcattgggcaggtgtatgcagatcctgactgccttccccgaacactggactttggcctcaacgtgaagcttttctgggagaagtttgttcccacagattgtcccccggccttcttcccgctggccgccatctgctgcagactggagcctgagagcagaccagcattctcgaaattggaggactcctttgaggccctctccctgtacctgggggagctgggcatcccgctgcctgcagagctggaggagttggaccacactgtgagcatgcagtacggcctgacccgggactcacctccctagccctggcccagccccctgcaggggggtgttctacagccagcattgcccctctgtgccccattcctgctgtgagcagggccgtccgggcttcctgtggattggcggaatgtttagaagcagaacaagccattcctattacctccccaggaggcaagtgggcgcagcaccagggaaatgtatctccacaggttctggggcctagttactgtctgtaaatccaatacttgcctgaaagctgtgaagaagaaaaaaacccctggcctttgggccaggaggaatctgttactcgaatccacccaggaactccctggcagtggattgtgggaggctcttgcttacactaatcagcgtgacctggacctgctgggcaggatcccagggtgaacctgcctgtgaactctgaagtcactagtccagctgggtgcaggaggacttcaagtgtgtggacgaaagaaagactgatggctcaaagggtgtgaaaaagtcagtgatgctccccctttctactccagatcctgtccttcctggagcaaggttgagggagtaggttttgaagagtcccttaatatgtggtggaacaggccaggagttagagaaagggctggcttctgtttacctgctcactggctctagccagcccagggaccacatcaatgtgagaggaagcctccacctcatgttttcaaacttaatactggagactggctgagaacttacggacaacatcctttctgtctgaaacaaacagtcacaagcaaaggaagaggctgggggactagaaagaggccctgccctctagaaagctcagatcttggcttctgttactcatactcgggtgggctccttagtcagatgcctaaaacattttgcctaaagctcgatgggttctggaggacagtgtggcttgtcacaggcctagagtctgagggaggggagtgggagtctcagcaatctcttggtcttggcttcatggcaaccactgctcacccttcaacatgcctggtttaggcagcagcttgggctgggaagaggtggtggcagagtctcaaagctgagatgctgagagagatagctccctgagctgggccatctgacttctacctcccatgtttgctctcccaactcattagctcctgggcagcatcctcctgagccacatgtgcaggtactggaaaacctccatcttggctcccagagctctaggaactcttcatcacaactagatttgcctcttctaagtgtctatgagcttgcaccatatttaataaattgggaatgggtttggggtattaatgcaatgtgtggtggttgtattggagcagggggaattgataaaggagagtggttgctgttaatattatcttatctattgggtggtatgtgaaatattgtacatagacctgatgagttgtgggaccagatgtcatctctggtcagagtttacttgctatatagactgtacttatgtgtgaagtttgcaagcttgctttagggctgagccctggactcccagcagcagcacagttcagcattgtgtggctggttgtttcctggctgtccccagcaagtgtaggagtggtgggcctgaactgggccattgatcagactaaataaattaagcagttaacataactggcaa

SEQ ID NO: 2676 - DNA, 3420 bp, Homo Sapiens
  NM_005573
ggagcgggggataaggttaccacgcccgcggtggccggggacactctgagtttcgcgtgtggcttttagggacgtttatatttgaatttccctgaaccgccgagtgtgggcggtggcgcagatccgtcccggaaacctccgggctccttcccgcctttctcaggcccggcccctccaaggggtccccgcggggcggcgggagggccctgggcccagagccgcgcgggtgggcagtcccaggcgtccttccttacagccctgagcctggtccgggaaccgcccagccgggagggccgagctgacggttgcccaagggccagattttaaatttacaggcccggcccccgaaccgccgaagcgcgctgcctgctccccattggcccatggtagtcacgtggaggcgccggggcgtgccggccatgttggggagtgcggcgccgcggcccgcgccacctccgccccccgcggcttgcctccagcccgcccctcccggccctcctccccccgcccgccgctccgtgcagcctgagaggaaacaaagtgctgcgagcaggagacggcggcggcgcgaaccctgctgggcctccagtcaccctcgtcttgcattttcccgcgtgcgtgtgtgagtgggtgtgtgtgttttcttacaaagggtatttcgcgatcgatcgattgattcgtagttcccccccgcgcgcctttgccctttgtgctgtaatcgagctcccgccatcccaggtgcttctccgttcctctaaacgccagcgtctggacgtgagcgcaggtcgccggtttgtgccttcggtccccgcttcgccccctgccgtcccctccttatcacggtcccgctcgcggcctcgccgccccgctgtctccgccgcccgccatggcgactgcgacccccgtgccgccgcggatgggcagccgcgctggcggccccaccacgccgctgagccccacgcgcctgtcgcggctccaggagaaggaggagctgcgcgagctcaatgaccggctggcggtgtacatcgacaaggtgcgcagcctggagacggagaacagcgcgctgcagctgcaggtgacggagcgcgaggaggtgcgcggccgtgagctcaccggcctcaaggcgctctacgagaccgagctggccgacgcgcgacgcgcgctcgacgacacggcccgcgagcgcgccaagctgcagatcgagctgggcaagtgcaaggcggaacacgaccagctgctcctcaactatgctaagaaggaatctgatcttaatggcgcccagatcaagcttcgagaatatgaagcagcactgaattcgaaagatgcagctcttgctactgcacttggtgacaaaaaaagtttagagggagatttggaggatctgaaggatcagattgcccagttggaagcctccttagctgcagccaaaaaacagttagcagatgaaactttacttaaagtagatttggagaatcgttgtcagagccttactgaggacttggagtttcgcaaaagcatgtatgaagaggagattaacgagaccagaaggaagcatgaaacgcgcttggtagaggtggattctgggcgtcaaattgagtatgagtacaagctggcgcaagcccttcatgagatgagagagcaacatgatgcccaagtgaggctgtataaggaggagctggagcagacttaccatgccaaacttgagaatgccagactgtcatcagagatgaatacttctactgtcaacagtgccagggaagaactgatggaaagccgcatgagaattgagagcctttcatcccagctttctaatctacagaaagagtctagagcatgtttggaaaggattcaagaattagaggacttgcttgctaaagaaaaagacaactctcgtcgcatgctgacagacaaagagagagagatggcggaaataagggatcaaatgcagcaacagctgaatgactatgaacagcttcttgatgtaaagttagccctggacatggaaatcagtgcttacaggaaactcttagaaggcgaagaagagaggttgaagctgtctccaagcccttcttcccgtgtgacagtatcccgagcatcctcaagtcgtagtgtacgtacaactagaggaaagcggaagagggttgatgtggaagaatcagaggcgagtagtagtgttagcatctctcattccgcctcagccactggaaatgtttgcatcgaagaaattgatgttgatgggaaatttatccgcttgaagaacacttctgaacaggatcaaccaatgggaggctgggagatgatcagaaaaattggagacacatcagtcagttataaatatacctcaagatatgtgctgaaggcaggccagactgttacaatttgggctgcaaacgctggtgtcacagccagccccccaactgacctcatctggaagaaccagaactcgtggggcactggcgaagatgtgaaggttatattgaaaaattctcagggagaggaggttgctcaaagaagtacagtctttaaaacaaccatacctgaagaagaggaggaggaggaagaagcagctggagtggttgttgaggaagaacttttccaccagcagggaaccccaagagcatccaatagaagctgtgcaattatgtaaaattttcaactgtcttcctcaaaataaagaagtatggtaatctttacctgtatacagtgcagagccttctcagaagcacagaatatttttatatttcctttatgtgaatttttaagctgcaaatctgatggccttaatttcctttttgacactgaaagttttgtaaaagaaatcatgtccatacactttgttgcaagatgtgaattattgacactgaacttaataactgtgtactgttcggaaggggttcctcaaattttttgactttttttgtatgtgtgttttttctttttttttaagttcttatgaggaggggagggtaaataaaccactgtgcgtcttggtgtaatttgaagattgccccatctagactagcaatctcttcattattctctgctatatataaaacggtgctgtgagggaggggaaaagcatttttcaatatattgaacttttgtactgaatttttttgtaataagcaatcaaggttataattttttttaaaatagaaattttgtaagaaggcaatattaacctaatcaccatgtaagcactctggatgatggattccacaaaacttggttttatggttacttcttctcttagattcttaattcatgaggagggtgggggagggaggtggagggagggaagggtttctctattaaaatgcattcgttgtgttttttaagatagtgtaacttgcttaaatttcttatgtgacattaacaaataaaaaagctcttttaatattgaaaaaaaaaaaaaaaaaa

SEQ ID NO: 2677 - DNA, 2303 bp, Homo Sapiens
  NM_005574
gaattcgtccaaactgaggatcacaagtctccacattctgagtaggaggatgagggtctgagttaggatttgggtcctgcagggcttgctaaggaatcccctgatggcctaggattccacgcagagcacatctggtgtgagagagctcgctgcaagggtgaaggctccgccctatcagatagacaaccaggccaccaagaggcccagccctccaaaccctggatttgcaacatcctcaaagaacagcaacgggccttgagcagaattgagaaggaaatacccccacctgccctcagccgttaagtgggctttgctattcacaagggcctctgggtgtcctggcagagaggggagatggcacaggcaccaggtgctagggtgccagggcctcccgagaaggaacaggtgcaaagcaggcaattagcccagaaggtatccgtggggcaggcagcctagatctgatgggggaagccaccaggattacatcatctgctgtaacaactgctctgaaaagaagatatttttcaacctgaacttgcagtagctagtggagaggcaggaaaaaggaaatgaaaccagagacagagggaagctgagcgaaaatagaccttcccgagagaggaggaagcccggagagagacgcacggtcccctccccgcccctaggccgccgccccctctctgccctcggcggcgagcagcgcgccgcgacccgggccgaaggtgcgaggggctccgggcggccgggcgggcgcacaccatccccgcgggcggcgcggagccggcgacagcgcgcgagagggaccgggcggtggcggcggcgggaccgggatggaagggagcgcggtgactgtccttgagcgcggaggggcgagctcgccggcggagcgccggagcaagcggaggcgcaggagcggcggcgacggcggcggcggcggcggcgcccgagcacccgagggggtccgagccccggcagccggccagccccgcgccacaaagggagcgcccccgccgcccggcaccccgcctccctccccaatgtcctcggccatcgaaaggaagagcctggacccttcagaggaaccagtggatgaggtgctgcagatccccccatccctgctgacatgcggcggctgccagcagaacattggggaccgctacttcctgaaggccatcgaccagtactggcacgaggactgcctgagctgcgacctctgtggctgccggctgggtgaggtggggcggcgcctctactacaaactgggccggaagctctgccggagagactatctcaggctttttgggcaagacggtctctgcgcatcctgtgacaagcggattcgtgcctatgagatgacaatgcgggtgaaagacaaagtgtatcacctggaatgtttcaaatgcgccgcctgtcagaagcatttctgtgtaggtgacagatacctcctcatcaactctgacatagtgtgcgaacaggacatctacgagtggactaagatcaatgggatgatataggcccgagtccccgggcatctttggggaggtgttcactgaagacgccgtctccatggcatcttcgtcttcactcttaggcactttgggggtttgagggtggggtaagggatttcttaggggatggtagacctttattgggtatcaagacatagcatccaagtggcataattcaggggctgacacttcaaggtgacagaaggaccagcccttgagggagaacttatggccacagcccatccatagtaactgacatgattagcagaagaaaggaacatttaggggcaagcaggcgctgtgctatcatgatggaatttcatatctacagatagagagttgttgtgtacagacttgttgtgactttgacgcttgcgaactagagatgtgcaattgatttcttttcttcctggctttttaactcccctgtttcaatcactgtcctccacacaagggaaggacagaaaggagagtggccattctttttttcttggcccccttcccaaggccttaagctttggacccaaggaaaactgcatggagacgcatttcggttgagaatggaaaccacaacttttaaccaaacaattatttaaagcaatgctgatgaatcactgtttttagacaccttcattttgaggggaggagttccacagattgtttctatacaaatataaatcttaaaaagttgttcaactattttattatcctagattatatcaaagtatttgtcgtgtgtagaaaaaaaaacagctctgcaggcttaataaaaatgacagactgaaaaaaaaaaaa

SEQ ID NO: 2678 - DNA, 18278 bp, Homo Sapiens
  NM_005578
gtcacttttatttgggggtgtggacagctgctttcccaggggagtacttcttacagtgggatttcaagacaagatcggcctgaagaaaaattatatttgtatattttttaaaaagtgggaactttgaggctcagagacagagcagaagacagaacctggtcttctgattccctgtgttctgcttttttcattgttccactggacgctcatcagagggaagatctttttcctcaattgattccaacaatgtctcacccatcttggctgccacccaaaagcactggtgagcccctcggccatgtgcctgcacggatggagaccacccattcctttgggaaccccagcatttcagtgtctacacaacagccacccaaaaagtttgccccggtagttgctccaaaacctaagtacaacccatacaaacaacctggaggtgagggtgattttcttccacccccacctccacctctagatgattccagtgcccttccatctatctctggaaactttcctcctccaccacctcttgatgaagaggctttcaaagtacaggggaatcccggaggcaagacacttgaggagaggcgctccagcctggacgctgagattgactccttgaccagcatcttggctgaccttgagtgcagctccccctataagcctcggcctccacagagctccactggttcaacagcctctcctccagtttcgaccccagtcacaggacacaagagaatggtcatcccgaaccaaccccctctaacagcaaccaagaagtctacattgaaaccacagcctgcaccccaggctggacccatccctgtggctccaatcggaacactcaaaccccagcctcagccagtcccagcctcctacaccacggcctccacttcttcaaggcctacctttaatgtgcaggtgaagtcagcccagcccagccctcattatatggctgccccttcatcaggacaaatttatggctcagggccccagggctataacactcagccagttcctgtctctgggcagtgtccacctccttcaacacggggaggcatggattatgcctacattccaccaccaggacttcagccggagcctgggtatgggtatgcccccaaccagggacgctattatgaaggctactatgcagcagggccaggctatgggggcagaaatgactctgaccctacctatggtcaacaaggtcacccaaatacctggaaacgggaaccagggtacactcctcctggagcagggaaccagaaccctcctgggatgtatccagtcactggtcccaagaagacctatatcacagatcctgtttcagccccctgtgcgccaccattgcagccaaagggtggccattcagggcaactggggccttcgtcagttgccccttcattccgcccagaggatgagcttgagcacctgaccaaaaagatgctgtatgacatggaaaatccacctgctgacgaatactttggccgctgtgctcgctgtggagaaaacgtagttggggaaggtacaggatgcactgccatggatcaggtcttccacgtggattgttttacctgcatcatctgcaacaacaagctccgagggcagccattctatgctgtggaaaagaaagcatactgcgagccctgctacattaatactctggagcagtgcaatgtgtgttccaagcccatcatggagcggattctccgagccaccgggaaggcctatcatcctcactgtttcacctgcgtgatgtgccaccgcagcctggatgggatcccattcactgtggatgctggcgggctcattcactgcattgaggacttccacaagaaatttgccccgcgatgttctgtgtgcaaggagcctattatgccagccccgggccaggaggagactgtccgtattgtggctttggatcgagatttccatgttcactgctaccgatgcgaggattgcggtggtctcctgtctgaaggagataaccaaggctgctaccccttggatgggcacatcctctgcaagacctgcaactctgcccgcatcagggtgttgaccgccaaggcgagcactgacctttagattcagtcacctgttcagccggcactgagaagaacgaacacaagaaaaagataagaaatactagagtaaaggccatcaaactacgcgatagtctctgttcttcatctgctattaaccttgccttagaaacacataaattatgagattttttttaaaagttgttaccaaatacacatttcacattgaatcatgtaggatcttgatgggcctttgttcccaaggacttccacatttttgcacagattatgctccatcccattcacttctgcattcctgtaacttttaatccctatgtttgtctcacttttcatctggttgaatggcttttcttagtgtggtatttgctgtcacatagtttttcctgggtgagtctgccaactcacaggtgcttttaggcttgaaatctccatcctatcatttccgttttgcctgtgactgtaaagagtagccattcttttcccatgtattgaagaggatattcttctcttgctttatactactcacgtccttggggagggaaatgcacaatttttttttgttaggctgtaaagaatttaagctgtaaattacataagttagaacaagcccaaatttaatttgcaaccatcagaattcagaatctatagtgaccagtgatcaaggctaattggaaaagagttatcggcccatagctaataagtagtgacagacaaccaagcttcaatatttttctaaagaaattacaggtgggatatgctagaaaaggcattttggggttatgtttaaaaaaacattattgtcccacaatattaccttaagatttttcttttccgcactacctgaacattgtaatacagacaaacttgatttcttctagaagataacattttcaatactgtcccacttctcatcttaaaaatattgtcatgtttattctaatatccaacacaactatcaaaattgcctttttctctagaggatgaaggctgtgaaaaaaccgttcaaattctcttctttttcttttttattaccaggtccattttgcctgacaattgcaaatcagagcatacaaaataaaactgtgcagttttgtttggtttactttcaaaagagtagaaagcttgaaaagattctgaaaccacagtttcattattctcataatccttctgcaactgaaattacatattgcaggagacattttcatatcatcaatgtgacatttacaccacactttcaaagacaatcactgaaacaaaaattgtctttatgagctaaaaatatgcagaatctctgcctagaatctttattcaaacttttattagccagtgaaacacttgcttgccaactgccaagccatacttattaagttcgaacatgtttcacttaaggagagacacctagcttagtcatggcaagttgccattttgtaaactaaggattttggactgagatttcttaaatctttcttcaaatctcccacaagtatatacttttaaattatggagtattttaagtctacaaaaaggtataaataataatataatgaattcctatatacctaatacccagtttaagacaccaaatataacaagtataattacatcctccaatgtaccgtttccttattccacagatatctttttcattattgtgaagtgatgttcagatttctagttttttttctagtttttaattttaacatcagaactgaaataaaaaattatggatacgtgttttgaattgcaaactattcctcaggaattccaattaaatttattttacttgaataggaatgatcataaaagtgattctttttttgtgactagaaattcttaagccgatggtcactatagctcatccttaatgtatggctcatttgcttttgtcactaaacggttttgtgttagaaccaccaaaattatagcttttaagagcttcctttgaccactgtctttttcttaccctagttctcttatctttgatcgtatatttctcataatgtgaaatatgatgagattcacttaggggcagcatgttagttttgggaggcaatgtcaactgtgtctctgaattcctgtcttccaaattgaagccagaccatgctgatgacctcaagtagcactgactatttgacaatagggctgataatgtaatcggcttgaattttgacttagtaactttttatgtaatactttcggagaaattctctttaggacaaagcagagagtccaatttattgagggatagattgtatctcttaaagtggtcatattattattaattttgccaaaagaagaagaatttattgaatatttatactataaaatgcagtaacattctacttgcttattacatttaaatccttgtgtaactgaatgtttacatgtcaagaggaaaagctgtaagaaaatgctgtcacagacccatccctgtggcatcgtcagcagaatactgcttgcttacaatctttattatgcattcttataacataacctcagagtatctttaccaaaggtttttaaagtaaatctctttttaagatagacttattcttttataataatgaatgtgcactcatacatatgtagaaacatttagatttagagttttttttttctttcacaaggtataataaggaaaggatcctacaatattttattctagggtttcttaaatatatgatttatattactgtcttttctattaatcatttgatttaaacaatgccaagtcactcttttttagttgcatgaaattttgcctgcaacagagagaaaaagattgtattactttaatgattataatcatactgtctgctgatataatatcataattgttgtggtttaaatacataaatagtagaaaaatcagagtctataacagaaagtttgtaaaaatatactgattttgaaaagtatcaggaatataaatatttggtaattctgtgtaacaagagagacatggaaaaggaaaaaaatccactatatcatgggctctgcagaacatatcaaaataggatttcttaaatttttcaacccccagaccatactgactcaacatggagtctcactggccaagaaaattgcctttaaaactcgaaaataaggccaggtgtggtgactcacacttgtaatcccagcaatttgggaggctgagacaggaggattgcctgaggccaggagtttgacaccagcctgggcaacatagtgagaccttgtctctacaaaaaataaaataaaataaaaaccaaattagccagacatggtggcatgcgcttgtttaaaaaaacaaataaataaataatcgactcaaaaataagtcatgtgtcccagcataaggcatcaggttgttagatgctggcatctctgcagctcaaagatgtgggttctttttcttgtcattaacacattgttatttctgtaggagcaacttctctgatcaaaattacttttctgggtatgtgctgattaagggggtggacttatcaacactataattgttccctatgaaagattccacagagatgtttatggtgaggtttaaaggatatgaaactctacatttaaacaagtattttatatttgggtacagaggaagaaagagagggctttttccatggggctatagtagagagttagtggaatatagacaggactctgaaaacacaacttccagccatttttttagttagtaaaaatcctattaatgtgaaccagccaggaataacagtgttatttctattggatatggtttgggcttctcttgtcaaatctgtgtcggctgccccctgatccttccattatcaagttttgaagggtgttggggaaattatggcagctgctagggagatcagggaaacactgatgtaacctcaaagcctctcaccattcctcttggcttggaaaggctttattttttcatatacatttctagaaatattgctattctaccttagtatttcacatttgtagttcaaacaagcgattgtccatctgttgcctagagctatagtacatgtgtgttatgaatgaaatatgacagcatgttccatacccctgctttagccatctgtgggaaaccagcaaactgaaaaagacacctctgcaaaatgtgcctcaagtccatttcttgggatcgctcgtttggtgcactctcgtgggagacaatcagagaacaacatatacttgtgccttattttcaaagaatctatttacactactatgaatattccactgaagagtcaatgatgtaaatgataaccaccaaatctcaaaaatatactcaccaaaaagtaaaaaagtaaaaaaaaaaaaaaaagaaagaaagaaaagaaagagagagaagtcaacttttcatcttaatatattctagtagtatttattttttccttgtcttggaagtatctcataggtctttaaatgagtaaaacatttttatgccagaaggtgatataatggatgttagtgttttttatttgattttacagtagttttagtcagataatgaggacagagacttcaacttgattctttaccaccattcagcatattttttaattgtcttcattgtatttgcttaatagtggtccagacaagttcaaaacttgttctcagtgaggcattaatatggtgcaaccatgaatatttcaggccaagttattcacttgacagataactagaatgaaacttttctcatgaggctgttgtttggttagcatagccttatttcaaaccttaaaaagttacctgactgaagctactatgacttggtaaggattcttcctctcttgctttcttcctcccttcctttcttcctcttccttcctcctcttcttattttctttcctactttccatcctacctattagtgttgctgtacttggattttttgtaaattaaatcaatgcattatgattttagggaattatgattatattcataaggggaaggctaccagaaaatatatgtggcatccataaaatcttcttttataggggcatattttttaggttgtatttattcgtaaagtgaaatgagataatagagtctttctgtttcatgttaatgaattttcatcagggactgaggtcatagattcttggaaaattcatttgtgactgatctagttttctcagctgtatgcaaagtaatctttcaaagactaggttaagattttttttttaagtctgaagcaatgtaaccccaaaaaattataattttaatgatggcattttattttattccattgcagcttgataactttccttatagcaaaggaataactattgtattttcagaattttaacacagattaacacttagcctgtaagactaataatatattgtaatagttgatactaaaatatttttcagcaggttggacagcaccagtttttcttagatcacagactacaggcagaatttcccttcaatccagaaaaaaggacactaatttccttttctatttaattttcctggcccttgtgcaaaaaattgtggactctatcttagttacaacatgcatgtcccttattttgtggagagctgtgtgaaagatgcgttttttttctttttttcttttttttttttttgagacggagtctggctctgtcacccaggctggagtgcaatggcacgatctcctctcactgcaagctccgcctcccaggttcacgccattctcctgtctcagcctcccgagtagctgggactacaggcgcctgccaccacgcccggctaatttttttgtatttttagtagagatggagtttcacagtgttagccaggatggcctcgatctcctgacctcgtgatccacccgcctcggcctcccaaagtgctgggattacaggcgtgagccaccgtgccccgcgtgtttttttctttagctgattgacaggtccccttcaaagttacaaaaaaaagtgctaatttttgctgttaaattctggttgttatttaattgacagaagtctcttgatgcacgaataaatatctctacatctagcctttgttaaaaataaaaattaatattctacaaacacctacatatactagagaggggtgaaacactgcagctaattcctttataatactttcagatgattgcattaagcctttcatgttatgtggcattgttaatttttcctagatacccatccacttaagggccagagaaatccttattcatttaactctggtgggcatttatgtaacatacccaaataaaaacgttattaaacagccacaatcgcattcagtcaacttggcactgaatgtagcttctaaaatcagttctctaccctacgaatggaatgttctaccaagaaagagaagcatcaccatgtcatcttgtgttctacaccactatagagagttacagttgcccccaaacacgaatgctattcccaaataaaatagaatcatgctttgggaggccaaggcgggccgatcacgaggtcaggagatcgagaccatcctggctaacacggtgaaaccccgtctctactaaaaaaaaaaaaaaatacaaaaaattagcctggctcagtggcgggcgcctgtagtcccagctactcaggaggctgaggcaggagaatggcgtgaacccgggaagcggagctttcagtgagccgagatagcgccactgcagtccggcctgggcgaaagagcgagactccgtctcaaaaaaaaaaaaaaaaaaataggatcatggcccttttaaagatctgaatcttctctgttattttcctgatgaatcaccatcccatatcttcttagtcctggccagtatgtagttgcgctcacatacgtctattctagctctgtagctccacaaaacaagtcttaagtccaaatctttgcctcttcatgtctgatatcaccaactcattcagcttttcttcacttattgacatagtgtcatgtcctatcactctctgctgcttctttaaacagtggacacaaacatattttctaattttcagtgtactcagtgaaacttggcagttcaccatgagtcaggctaggttgaaaggctttctttagggttgaaagtaaacgaaattggaatcacccaaagagaatttccccaaaaaacctcagacccagaagtgtaaaagctacagaaggatagaactcccatgtctacagacagttctgttactttttgttctgtactattttggatgttgccaaaatcaaattcatcctgaaaacaggaagcaagctaatgcatatgccatccatgagattcccacttctgggtcagttcatattccattcaaccttttccttttatccttgtcttcttcagaataagacatttttcctccatattttcatattaaatattaacactttataggttctactttaatatatggacactttacaggttatacataaatatttgctggttgattgatttcgagattcattcattctgtgctcaaatatttgtacctagagacgttacatgttagaaaaagtgagcagcttctttctctaatcatttaggagtccatatttttcttttctttttgttctcccaacatccttatctcttactcagctcttcaatttataattaccaaataatcactgttagagaatcagcccctaagtaactttgattctggccaactgtaataagatccaaccacttaaatctgtacttactcaataggaaggaatgtgacatcaggaagagtcattccagtgacattagtaagactttatggagtacataaaatttgataagaaatcttgagctgattctttgacttgatttagaagttgagaaaagagtatttaaggcacaacagggaaacatgggctatactcagagaagaccctctgcattggccaaaatatcatggattctggaaattccttcttaacagaaaaaaaaggcttccaaataatcaggctgaatgggaagaaaaaggcatagaggaagcctgaggaagtatttacttgcttttcccatctctttataattggaagagaagatgatctgccaaaatataacccagcatgcacagtatggacaggaagcagccctccatgaactttattatcacagaatatgagcattcttattgatccacagctacatcttctattcttgcagcaagggtacatgtcctttgaccctccacaaaagaacaagcaggacatctctattttcctattgagtctgagtccattattagaaaggacttcccagccatcttttctacttggtattaaaattcccttacagattcattgctaagtgccaattctttttttttcttttgagacggagtcttgctctgtcgcccaggctggagtgcagtggcgcaatctcggctcactgcaagctccgcttctcgggttcacgccattctcctgcctcagcctcccgagtagctgggactacagacgcccgccaccgcgcccagctaattttttttgtacttttagtagagacggggtttcaccgtggtctcgatctcctgacctcgtgatccgcccgcctcggcctcccaaagtgccaattctgactctacttaaacatcacctgtatcagggagctcattattccttgaggtcttacatttctttcagcacattttgttccaagctacacgactttaaaacagagccagcctttggggcatatgttctctttggtgccacacaaaacctgtagtacatgatacagtgttgcttcccccctccttttccttccatatatatttgttttgttttgggcattgcattacttttttgaatttttaagaatctctaaaattagtctgaaggatgttctgagggccagacattagaatttgtgagtttttttgttgctggttgtactttcctatttagaagacagaccgttctgacagttgttgtgtagcttcatgccttccccagtaactaacccatgaacagtacaccccttttatctgacttgttgataatgaccttaaaaatgttaggaaatgggccgggcgcggtggctcgtgcctgtaatccagcactttgggaggccgaggcgagcggatcatgaggtcaagagatcgagaccatcctggtcaacatggtgaaaccccgactctactaaaaaaaatacaaaaattagccgggcgtgttggcgggcgcctgtagtcccaactacttgggaggctgaggcaggagaatcacctgaacccaggaggcagaggttgcagtgagcagagattgcgccactgcactccagcctgggcgacagaacgagactccgtctcaaaaaaaaaaaaaaaaaaaaaaggttgggaaatattggtgtataatccccatgtctaacaaggaagaagtcaaaagcaaaagatagtggtattgccgaaaactcattatttctagttagttcatctgtggaaaaggatatcgttcttgaggagaggggttctattatgctatagttttctatggaaatgtacaaatgctttcctcattgctctggatgactatttagtttaaataatatacctttgtcatggggaagaccatgattgtggcttcttctaccccaactttgaatgagagagcactgtaagcagaaactgccatcagtctcctgggcaggacctggaggtaactttctgagctgtaaaatagtaattcctaagagagcttacaaactgcttccacacagaaaatagcgcagggaggacagttattagtacccctattctagaagagaaagctgaggctcaagccattaagtgacttgccaaaagctgtgacatagctgggaagtggcagatttggggatataaccaggtcttgcaagtccagtgctgtctccaaagtagccacgctcacagctgagaacaccttagaggacaatatcgacttcttacagactaccaagcccccagtcatccagggaaattcagagaccaattgactgccaggtggcaaatccacatgtgtactgcggtctttagagatcatttagagcttgcacacatctgtgtcttcttgtgggaaacctctaggtattctgtctgatcagcactgtgaggaagttggtgggaaaaggccactgataagaacaaacaatgggcagaaggaagcacattgcaataaatttccccagagagagttcctttacattccattcaccaaaaacctctctggaactgtcaggttcagaatatcaaccaagaccatatcatttagaattcattggcatgtagaggtgactcgattcctaaaagaagcctctctcccatgaaccacgatgtacgttccacagaggcagaaaccgccgtaggttagcaatgcattttagtctttctctccattcacatttactgagagcacaccacgtgcatgttgctgcaacaggcatttccgatagagccgatccatgagctaacaatgtctgaaaacaaatgttatggaactgttggcatttctgagatttggcctttgccatttgatagactttgcttcccaggatgctgtcattttgtgattttttataattacaaggaatttggtaccatgttgttttcaaaaaacctcctagaaagtctccatgtatgctctagaagttgctctacgtaacagttcagcaagcaagtgttccttctcttgagctgcgtccctcaggaagctgtacctttagggtgtgctttccactttttatttcctctcatttcactcctttcattgtttgctatatcctaaaatatgtgaagtgagagaaaaaatatcatttcttctcattaaatctcctgcattaaatctaagaatcctttaaaataatcacacctgataagtgttttatgcatttccctccctggagtgttatcatccatcaagccagtatcatcatccacctgcttattccttgggactaatgagagccaagttaaatagcaaatgacttctcaccccttcctagtcctcatgcctgaggaataagggcgacattaatgggagcgggagagtggtggctttggttgagatgcacgttcacagactagaaaagtgcctcacctccatggtgtatatgtgccaccttttcttaatccagtctatcattgttggacatttgggttggttccaagtctttgctattgtgaatagtgccgcaataaacataagtgtgcatgtgtctttatagcagcatgatttataatcctttgggtatatacccagtaatgggatggctgggtcaaatggtatttctagttctagatccctgaggaatctccacactgacttccacaatggttgaactagttcacagtcccaccaacagtgtaaaagtgttcttatttctccacatcctctccagcacctgttgtttcctgactttttaatgattgccattctaactggtgtgagatggtatctcatagtggttttgatttgcatttctctgatggccagtgatggtgagcattttttcatgtgtttcttggctgcataaatgtcttcttttgagaagtgtctgttcaatactatgcagccataaaaaatgatgagttcatgtcctttgtagggacatggatgaaattggaaatcatcattctcagtaaactatctcaaggacaaaaaaccaaacaccacatgttctcactcacaggtgggaattgaacaatgagaacacatggacacaggaaggggaacatcacactctggggactgttgtggggtggagggaggagggagggatagcattaggagatatacctaatgctaaatgacgagttaatgggtgcagcacaccagcatggcacatgtatacatatgtaactaacctgcacattgtgcacatgtaccctaaaacttaaagtataataataatgaaataaaattaaaaaaaaaaaagaaaagtgcctcacctccctgtgaggcttgatgaatattgtggccagtgagtggaaaatgattcttgtcgaatagacagagtattcccaccccaggaatggattaatagaagacacaatttgagcacttctcagaattatctagtatgcctgagtagagactcacatgggtggaatctgtgttgtctcatcagagggaataaaaagacaatgaggtggtaaatgtgaaaaaagcagccttttagaaaaacattattttcaaatacctttataaatcatctaatttatcttcacataatataaagaaaaaactaataaaaattttcgtatttcactttacataatatgttctcccatatttagggatcatacaattgtattgtcttcaaaacacacacacacacacatacacacacacacacacacacacacacaccccttccaagaaagctgatccttcagaaaataaatcttatttttaagcacttgggttttcaggccagaaaattaataaatcctaaacctgacccatttttgtaacagctaaaaaggagaagaaaaagctagttaaattttgtgtggatccatttatctcttaaaatatgccaaagcaatttgaggtgggggtggaaacaggtatttatctctcatgcgtgattctctctttatatttctatctgttgggaaaagggtaaagaactattcttggtcattattgatgtattgtgttgccactttgtatggtgcctgctgtgctttatcccgaggcatagcagtaatcgttactatcttgactctttccttcatcacaagagagtaaatatgaagtctgaatgtcgttcctcacccccaaattgtttaactctgcttccaaactagtttaagaaatgcaaaatgggaagagctagcttttcttagatacatttcttccttttttattctttcttgggagacgttaagtataaaagggaaaaagtcagttccttcttctctctctttctctttgggtgacagcaatgctcacttagtaattataaactggaaataggagagtagcttgagcaggttatgatatatctgcccaatgtgtttcattccttcaaacataaactttgagagtaaaagagatttttataatttaaatgccaacgacaggaatggcctcatgttttaactttcaaataataaatggggagttggtatttgggcagagtttgcattttactaatcctatatactttgagcttagtttttagaattgtgtcaaatacatcaacatatcaggattatagtgccaaaaatagttaaagtgccttggtcctccctctgtaggcagcaaattgaaactaacatgggaccatgccatccttctagcataatggagaagtctgaactgaggagtatctttgatgaaagacatttaggaccctagaaactaaatcttgtcaccaagactttatagtaaagtagtagcaaaattatttttaaaagactttcttccttttactacccatttcctctcttgggaaagctgatgagcaaattatccaagactcatttctttattaggcaaagtcagaatatttcccctctgaaaatctgaattatgccctcattctttttcaagaaatatctcaaagagcaaatagaattaaacatgacacttgattgtctgattatttggcatgtataaaattatcatgtggcttaatgtgccttaagtgaaaatttaaacttagacctgaaacctttacagttggatgtagcgttgagcttttgcatgttttctgtataataaaccacttttgttttgtttgttttgtcttttaacctacacctttatcattactctaacagatttagggcttctctttctctacagctaagtaagggaatatgtgcaattatgagacatacaaaaaaggaaagggaaaggactttctaagtagcaaatctgtgccatgaagtagatgtggcgtgaagatacagagcctgaggatagtaattttccctgagccacgcacacaggcttttatttcatgccttttctctttctgtgccgtcacctttgagaaaaacgattgcaccttctccaagtctgcctttttaacagctacagttaagttggcaagacttccccagctctgaatatagccatttgccgactccggcctctttgcgagactgactcaaatctgtgatcttctgttcagcatacacatcagcaaagtgagaagatgagcactaaatataggctctattaactttacttttagatttactgccttcaaaaagtgcctattctgagcaacataaacgttattccttacatatgtatgtacacacggtacccagagtcgtactgtgcagccttcaaaaacataccatcagaaagagtaggtgctgagataaggaaactttgccaaatgaaagaaagtcactcacttccaatatcccctctcaagcggctaccgtgaaacgggctgcaaacacattccctgagcatcccttgctgatacagcttctttatatttatatcctactggatggtagcatattgctaaggtttcctgtactctgcttcaagggaatgtaagctttatggcattgaaacatttagggaaaaaaaagatgtttaagagaattaatagagccgtagtctgtattaggatgtgtgtcatatgtgtgttctataaactaagcatcggtgggtttagagtgttaaagtgtcagcacattccttctccttttgtctctcaggctaacatgagagaaaatagaaaagtcttggctgtggggattggaagctcagggggccaaatgtccttgccagatccttagagcattactttgactcctaaaaatagtagtgtatgttatttgatggcttttgtttccatagttccatcactgacaaaactgtcaatactgttgatggagcagcagcatagcctagagtgatgcattcttacccagaggtggcaataggagagggtccatgtaaataggacgaggtagacagtgcatgattgtaggagaagggttgaagggaggacatgattccaaaaaagatcgttctcaatgtgtcgtctgactcaaccagctggcagattacacttgccaagtcgttccctttccttctaagtcagttggctccatattcacttgaatatgcctctgtttgggcaaagcaagatacctccacttaacctttatccaaggaagctcttggtgtcctcttggtcataaagttgtctcctacctaacccagttttaccaaatggaagtaaaaggggacaaactatggaagatggactccatgccattgcagtcagccaccattctcttttccatataaggagccccattacataagctacgggtgaggttggaacagctatgtttcataatttcaagagtgtgaccaccctgctctagtcatcatcattggatgaatccagttgactctttggcaaaagggtgatacttttcactaaaaatgcctactcttcctgttgatgttccttttctgtttttaccttgtccaatttccacactagtcattttttttattttttagaggatcagattttagcgctggaaaatgagttcaaaaatttcagtgtaatgtcataaggatgttgggatacagagattttttttttccttggaaacaaatggactgggaagaaacacagcatggctttgctctgagtttcaatctgatgattatgaccatggaagatagtcttatgtaaaggttaaatggtgtttacaagtggatagataaggcggagatggtgagaagccgggttttctctatgctaaatgtgtctactaagagcagcacttcctactagctaagcacaatcatagccccaccgtgatgagctgctagtctgaataacattccctgacttagggaaaggcacacaaaaacatataaagaatatgtctattttcatatgtgtgatactgacagagccatggtattcctaaaatataggtttctcttttttcttgtattcttagcaaattgcatttattcactacattacaaaccatcactgatgtatccaaaatagcacacatagttcagtatgaaaataagagaataaaatctgttataagcaagtgatttaggtattttcttttgtgtttatgcattatctgactatattaaaacctgtttttctatttaccttctatcagttttctctaccaattatgttttttcaatgctctataagaatgaatatggaaattatatttcttttttctgtaaaagagttgcaactactttattatatttagaaatccaataaacttcttattacattta

SEQ ID NO: 2679 - DNA, 5569 bp, Homo Sapiens
  NM_005587
agaacgagttccggtctggccgaggcttgtctcctaaaaatagccccggtgtggggatccgtgcgcggatgtcccggcgagtcccgggctgaaagaggcggctccgggcggcgcgaagcgctggtggcgggcccgggctgcggcgtgtgcgcgcccgccagctgctccggagatacggaattgcattttgtgaaaaaagaacaagaattttctgcaaggatcatatctaagtgcactttttgctgatacttcatttctaatcttgtagaaaatttcagctgtagcccttggactagaagctgaaataacagaagctgtgtacgatgcattagggtattgaagaaaattaacttttgaattaaatatttggaatataaggaaataaggaaagttgactgaaaatggggcggaagaaaatacaaatcacacgcataatggatgaaaggaaccgacaggtcacttttacaaagagaaagtttggattaatgaagaaagcctatgaacttagtgtgctctgtgactgtgaaatagcactcatcattttcaacagctctaacaaactgtttcaatatgctagcactgatatggacaaagttcttctcaagtatacagaatataatgaacctcatgaaagcagaaccaactcggatattgttgaggctctgaacaagaaggaacacagagggtgcgacagcccagaccctgatacttcatatgtgctaactccacatacagaagaaaaatataaaaaaattaatgaggaatttgataatatgatgcggaatcataaaatcgcacctggtctgccacctcagaacttttcaatgtctgtcacagttccagtgaccagccccaatgctttgtcctacactaacccagggagttcactggtgtccccatctttggcagccagctcaacgttaacagattcaagcatgctctctccacctcaaaccacattacatagaaatgtgtctcctggagctcctcagagaccaccaagtactggcaatgcaggtgggatgttgagcactacagacctcacagtgccaaatggagctggaagcagtccagtggggaatggatttgtaaactcaagagcttctccaaatttgattggagctactggtgcaaatagcttaggcaaagtcatgcctacaaagtctccccctccaccaggtggtggtaatcttggaatgaacagtaggaaaccagatcttcgagttgtcatccccccttcaagcaagggcatgatgcctccactaaatacccaaaggatcagtagttctcaagccactcaacctcttgctaccccagtcgtgtctgtgacaaccccaagcttgcctccgcaaggacttgtgtactcagcaatgccgactgcctacaacactgattattcactgaccagcgctgacctgtcagcccttcaaggcttcaactcgccaggaatgctgtcgctgggacaggtgtcggcctggcagcagcaccacctaggacaagcagccctcagctctcttgttgctggagggcagttatctcagggttccaatttatccattaataccaaccaaaacatcagcatcaagtccgaaccgatttcacctcctcgggatcgtatgaccccatcgggcttccagcagcagcagcagcagcagcagcagcagcagccgccgccaccaccgcagccccagccacaacccccgcagccccagccccgacaggaaatggggcgctcccctgtggacagtctgagcagctctagtagctcctatgatggcagtgatcgggaggatccacggggcgacttccattctccaattgtgcttggccgacccccaaacactgaggacagagaaagcccttctgtaaagcgaatgaggatggacgcgtgggtgacctaaggcttccaagctgatgtttgtacttttgtgttactgcagtgacctgccctacatatctaaatcggtaaataaggacatgagttaaatatatttatatgtacatacatatatatatccctttacatatatatgtatgtgggtgtgagtgtgtatgtgtgggtgtgtgttacatacacagaatcaggcacttacctgcaaactccttgtaggtctgcagatgtgtgtcccatggcagacaaagcaccctgtaggcacagacaagtctggcacttccttggactacttgtttcgtaaagataaccagtttttgcagagaaacgtgtacccatatataattctcccacactagcttgcagaaacctagagggccccctacttgttttatttaactgtgcagtgactgtagttacttaagagaaaatgctttgtagaacagagcagtagaaaagcaggaaccaagaaagcaatactgtacataaaatgtcatttatattttccaacctggcatgggtgtctgttgcaaaggggtgcatgggaaagggctgttgatattaaaaacaaacaaaacaaaaaagccccacacataactgttttgcacgtgcaaaaatgtattgggtcaagaagtgatctttagctaataaagaaagagaatagaaaacacgcatgagatattcagaaaatactagcctagaaatatagagcattaacaaagtaaaattaatatattaagttataattggaatatgtcagaagtttctttttacattcatatcttaaaaattaaagaaactgattttagctcatgtatattttatatgaaagaaaacacccttatgaattgatgactatatataaaattatattcactacttttgaacacattctgctatgaattatttatataagccaaagctatatgttgtaacttttttttagagaatagctttatcttggtttaactctttagttttattttaagaggggaaaacaaaaatatcttgcaagcagaaccttggaaaaaaaaagccatgaacacttattctaaatgtaaattaaaagttgagccaaactctttgtgtatatagcatcttaaatatattatcacctttgatgtaagtacctatgtattgtatggtcaccagattaaaaagtatatttttgtggattgccgccaatctggggggaaaaggcgaggtcctttattaagtattcactgtttaatatttactattttgttaaatatactgtactttggattttaattattagcccagttttttcagaggattgtataaaggggtttctcccctcactggtggtgaatgtgtgatgttacattgtaatctttgtgctgtatgggttgagcatcattatatattttgtatgtgtacataaatagcaaagtggcaaaaaaaattggtgttaagttcatcctgcataagtataaaatgtgttgtaacagattttgtaaggcattatttaaaacttgccttttgtgaggaaaaaatgtagtagaaaaagctgacctaatttaattaatattagagaaaatggcaaaatagtagatgagcacaaaggttttataagtggtaaatgattaggggaaaataatcatggggaaagggatcttttttccttgaccctctgaaaacagaacgatgcagctggttacaaaatcctaccgttatcagctcttctgcacattgcagtgatgctttggtatgcggggagaaacactcttagggtgctggtccttggcatgactcttgccattctaattggaattagtgccaccctcagcttggattttgaacaaggccttattctttcaggaagacaactaatggatgatagcaagttcatccacttactgggcttgtgccatgagcaaaattcaaagtcctgtatatctttcattgtagatttttaaatactccttttcctaaaaaactcaagggtttaaaaattgctattttatattttaaatgatattgagcagctacctacaatttctatgtacattttgttcccccccccccaccccccccccaaattacgttccttttgacattttcctcatctgctgtttgtgacaagtcatcagccagatttcctgactgacacataggtatgatcagtgcaggagagacctgcgcaccacaggctgcaaactggaggttctgttctcatggcagtttgggcagtaacttttgagagaggccaaaaaaaggaggatgacatgctgtctcctctcttcagtatagacattaggctcttattcagaaaggatttttctttaaaaatgtacttactttactgaactacttacaggcacatttcttcataaggccacacctaatccaaacaagacagtctcccaacactgaagttccaaaataatccttaccactttgtaaaccatttatagctttgaaagtgttaagtgattccttcgttattatttatgcatgttcatgaacttctgctgtacattggaataggagttaacacattcacatttactgtctattttcttgtgtgccttatgagatggcttttctgactgtatctcaatagtctttctttctatgcaggtttataatcagtacaactactgttttctaaaatactactactcaaggctcggagtttgtatttaaattacactgaccaagtaacaatgtattccatttcaggaactgaatatttgactgttaacctttttcccatacgtccagtgtggcatggagcatatggacttgacagacatctctcacccagacgcccacgtgtgaacacacccacatccacatctctgggtggaaaccagcctagagaggggacgacgctaatggtgttgctttagaaccgtcttttcttacccttttagactcgtgttttgtatgagacaccattgcaagaaaattttatccctccagaagtattttattactaaagaacaaaagcaaaaaaagcttaaattgcactggttaaagtacagtttccaacagctgtccttcctcagtactctaatggccactccaccgcgagtggaagtcactgttgtgtgtacacaggtggtcccaatcaaaactccatcttttgagcccaattatgtccattttgttatagactaaatcaggggtttgttctacaagaacaatacatgttttaccctttcctttaactagaaggataactagtaatgcatcaacataatttctgtattaaccatcatgcgcacaagaaatacatagtaaataaggaagctgaaaactcctggcattggatcttaagctagatgattagaatgtgaaaaagattttacaaatgtaaaacttctatttctctgtagaaactttcttcactttgctgtgcaagaagacactgctttgctatatttaaaatggcttttttaaaagagatttatgtatttggtaaatgtttgtagtcaacagttcacacaagaagctgtacacggtttgatcatgtaaaaccgtttggcggcacaagctggactttgttgccatccttgagatgaaccttttaagaaaaataagttaatctcaatttttccctgaatgtgttgtttttcttcattatacaataaatataatagtgaactttttatcaaatggtgaagacaatgctaaaaaaaaaaaaaaaaa

SEQ ID NO: 2680 - DNA, 2183 bp, Homo Sapiens
  NM_005589
ccaatgaggaagcctggcaggatggagggcgaggcctggcagctgtagtgcttctgggcagtagaggcgcggggtgcggagctagggcggccgagagccatggcggcgctattggcggcggcggcagtgcgagcccggatcctgcaggtttcttccaaggtgaaatccagtcccacctggtattcagcatcttccttctcttcttcagtgccaactgtaaagctcttcattggtgggaaattcgttgaatccaaaagtgacaaatggatcgatatccacaacccagccaccaatgaggtcattggtcgggtccctcaggccaccaaggcagaaatggatgcagccattgcttcctgcaaacgtgcttttcctgcatgggcagacacttcagtattaagccgccagcaggtcttgctccgctatcaacaacttattaaagaaaacttgaaagaaattgccaagttaatcacattggaacaagggaagaccctagctgatgctgaaggagatgtatttcgaggccttcaggtggttgagcatgcctgtagtgtgacatccctcatgatgggagagaccatgccatccatcaccaaagacatggacctttattcctaccgtctgcctctgggagtgtgtgcaggcattgctccattcaattttcctgccatgatccccctttggatgtttcccatggccatggtgtgtggaaataccttcctaatgaaaccatctgagcgagtccctggagcaactatgcttcttgctaagttgctccaggattctggtgcccctgatggaacattaaacatcatccatggacagcatgaagctgtaaattttatttgcgatcatccggacatcaaagcaatcagctttgtgggatccaacaaggcaggagagtatatcttcgagagaggatcaagacatggcaagagggttcaagccaatatgggagccaagaaccatggggtagtcatgccagatgccaataaggaaaataccctgaaccagctggttggggcagcatttggagctgctggtcagcgctgcatggctctttcaacagcagtccttgtgggagaagccaagaagtggctgccagagctggtggagcatgccaaaaacctgagagtcaatgcaggagatcagcctggagctgatcttggccctctgatcactccccaggccaaagagcgagtctgtaatctgattgatagtggaacaaaggagggagcttccatccttcttgatggacgaaaaattaaagtgaaaggctatgaaaatggcaactttgttggaccaaccatcatctcgaatgtcaagccaaatatgacctgttacaaagaggagatttttggtccagttcttgtggttctggagacagaaacattggatgaagccatccagattgtaaataacaacccatatggaaatggaactgccatcttcaccaccaatggagccactgctcggaaatatgcccacttggtggatgttggacaggtgggagtgaatgtccccattccagtgcctttgccaatgttctcattcaccggctctcgatcctccttcaggggagacaccaatttctatggcaaacagggcatccaattctacactcagttaaagaccattacttctcagtggaaagaagaagatgctactctttcctcacctgctgttgtcatgcctaccatgggccgttagaaacaagtttgtttaagactgactccatcctgagtaatctccctttatttttgaccagcttcatttgtcagctttgctcagatcagatcgatgggattggaatacattgtaactaaaatcttcctcaggactattaacccccgcaaagtttctatagggaactgcctagtgtaacaatgaaaccagatttctcacttgctcttcatacttctattttgaggtaactgttgtaactatgaaatgcttatctgaaagtagtgcttaaacctgatttctaaaaattatcccattttctgatgatttgaaggggagaaaagccagtgtatgtaaagaaaatgttccagccaggcgcggtggctcacgcctgtaattccatcattttgggaggccacagtgggcagattgcttgagcccaggagttgaagaacgtggcgaaaccccgtatctattatttaaaaaaattgaaaaagtaaaaa

SEQ ID NO: 2681 - DNA, 5164 bp, Homo Sapiens
  NM_005590
acgttatccatgaagtgtcgcgagagaaacggacgccgttctctcccgcggaattcaggtttacggccctgcgggttctcagaggcaagttcagaccgtgttgttttcttttcacggatcctgccctttcttcccgaaaagaagacagccttgggtcgcgattgtggggcttcgaagagtccagcagtgggaatttctagaatttggaatcgagtgcattttctgacatttgagtacagtacccaggggttcttggagaagaacctggtcccagaggagcttgactgaccataaaaatgagtactgcagatgcacttgatgatgaaaacacatttaaaatattagttgcaacagatattcatcttggatttatggagaaagatgcagtcagaggaaatgatacgtttgtaacactcgatgaaattttaagacttgcccaggaaaatgaagtggattttattttgttaggtggtgatctttttcatgaaaataagccctcaaggaaaacattacatacctgcctcgagttattaagaaaatattgtatgggtgatcggcctgtccagtttgaaattctcagtgatcagtcagtcaactttggttttagtaagtttccatgggtgaactatcaagatggcaacctcaacatttcaattccagtgtttagtattcatggcaatcatgacgatcccacaggggcagatgcactttgtgccttggacattttaagttgtgctggatttgtaaatcactttggacgttcaatgtctgtggagaagatagacattagtccggttttgcttcaaaaaggaagcacaaagattgcgctatatggtttaggatccattccagatgaaaggctctatcgaatgtttgtcaataaaaaagtaacaatgttgagaccaaaggaagatgagaactcttggtttaacttatttgtgattcatcagaacaggagtaaacatggaagtactaacttcattccagaacaatttttggatgacttcattgatcttgttatctggggccatgaacatgagtgtaaaatagctccaaccaaaaatgaacaacagctgttttatatctcacaacctggaagctcagtggttacttctctttccccaggagaagctgtaaagaaacatgttggtttgctgcgtattaaagggaggaagatgaatatgcataaaattcctcttcacacagtgcggcagtttttcatggaggatattgttctagctaatcatccagacatttttaacccagataatcctaaagtaacccaagccatacaaagcttctgtttggagaagattgaagaaatgcttgaaaatgctgaacgggaacgtctgggtaattctcaccagccagagaagcctcttgtacgactgcgagtggactatagtggaggttttgaacctttcagtgttcttcgctttagccagaaatttgtggatcgggtagctaatccaaaagacattatccattttttcaggcatagagaacaaaaggaaaaaacaggagaagagatcaactttgggaaacttatcacaaagccttcagaaggaacaactttaagggtagaagatcttgtaaaacagtactttcaaaccgcagagaagaatgtgcagctctcactgctaacagaaagagggatgggtgaagcagtacaagaatttgtggacaaggaggagaaagatgccattgaggaattagtgaaataccagttggaaaaaacacagcgatttcttaaagaacgtcatattgatgccctcgaagacaaaatcgatgaggaggtacgtcgtttcagagaaaccagacaaaaaaatactaatgaagaagatgatgaagtccgtgaggctatgaccagggccagagcactcagatctcagtcagaggagtctgcttctgcctttagtgctgatgaccttatgagtatagatttagcagaacagatggctaatgactctgatgatagcatctcagcagcaaccaacaaaggaagaggccgaggaagaggtcgaagaggtggaagagggcagaattcagcatcgagaggagggtctcaaagaggaagagcctttaaatctacaagacagcagccttcccgaaatgtcactactaagaattattcagaggtgattgaggtagatgaatcagatgtggaagaagacatttttcctaccacttcaaagacagatcaaaggtggtccagcacatcatccagcaaaatcatgtcccagagtcaagtatcgaaaggggttgattttgaatcaagtgaggatgatgatgatgatccttttatgaacactagttctttaagaagaaatagaagataatatatttaatggcactgagaaacatgcaagatacaggaaaaatgaaaatgttacaagctaagagtttacagtttaagattttaagtattgtttcctgagcataactccataagtaagaaatttctagttcacagacatacaatagcattgattcaccttgtttttttaacctggttgttgtagtaagagctttgtttcaatatcactcttgagtaaagattaaaataaagctaccattttacatttctatttcataatgaaaaactatgtcagtattttaatatggttacatttagccaaagttgagggaaagagcttataaaatttaacttcttcataattttagtaatttcctagaggttctgggttttctgaaagtaaaacaatttatgcgaacctatgtctaaattcactgtttgttactatgtatgtttttttccaatgcttcttataagactaaatgattagaagtacctaatagtttgaacagatatgtttttatttaaaagagtagaataacctttcagaattactgagttttttattccagttgtagcaaagatttcaaaagattgtgttcccattaagtggtagtaatttcctttattattctgtatccttaatggtgttctctctctctctctctctctctctctctccctctcccccccgttccccactcttcctttctcctttgctttttcttctctttcatacatatatgcgtgcctagttctaggaggaaacgggttaaaaattgttttaaactacatcttgaaaatattgaagaatttgttttaggtagagtggtcagttgaaccttacagtaaagtatagaaatatatttaatgtggaatgtcaatgccaggatttctcattaacaatattttatctcaactttggttcctgtgatacatttctgaatgggcaattccagaaatcttagtagcccatgttaagcttctattttttacttgttttcggggagaaataagaattagacatcttcagatttaagttaaataatcccattctttataatcctctgtaaaaagatccctgagattattccttcttctagttttatgcgacagctttactttaaaattcaagttatacatcttgggagtacaatggcccgacatttcttcataggtagaaacaaatacttgactcagtgatactcatgaccattagaatagtcatacctggaatgtgtcaaattataagagacagacacttggttagtggctgcctcatatagcacttttgaagaggcctaagtcaaaacttgcaatataacattctattgactttcttaaaaatattttttctgtacctaacttgagcataagggttatttgagcaagtaacattaactcagtggaaggcattgtcctgtgaaatattcttaggcagatctgcccacatctttattgaacttgaaatctaatatttctagtatttgaacaaagcagaaggttaagtcagggaagagcagtgctgtccatgatgtaatggaagctaccaggggaggcagtgtctggatgatgctgtgctacctacccctgcacaagccatgctggctcagtctgagctgtgggccacatcagctagtggctcttctcatgcatcagttaggtgggtctgggtgagagttatagtgagggaatggtcactaaagtatcctgacaagttcctaggaaaaaaggaataaagtttttttccttaaaaaaaaaaaaattgctcttggctgtgaaaagaggtactaaatgcgattcagttcaccgctaaggaaagtgatgacatagcagttacagagggtgataaatctctccagctaattcaggtcattttgtgaatactatgtatcaagccctgaaaatatggtaaataaaacgtgacagggaaacctttttttgattgaatattgttacatagttaaatgtgctatatatccttaatattttatattgatcctgcaaaatctgttggttttaggggagttttgttttttgtttctaacaattttcagacctgttggtataggaatgtagaagtctttcagatgatttgaaagcagctgcatttgctcttggaggctttgggagagcaggaatgaaaacattcagaggaagacatctgtagggaattcttctgttacttaccaaagaataagtgtctttctggtgttttatttcctatcataaaaatacaacagtgcatttacaaggttaaagattcctcgaagttctaggaaattcttgaaaatataagtggtgcttagaaaattcaagcatttaggaatgtgacctttaattcaggtatgtaaaagacttttttcccaaacttttaaaagtaggaaatacaataaatacagaaaagtcatatggttgaataaataattataaattgagcactgatggaatccctctacaggtcaagaaatagcgcagtgtcctggatgcccattatattgttttctcctttctgggtaacaagccctaacttctgtaatttaaaagctcctacttttgccacaaggtggtgcttctgccattagacgcagttaggaggatgcaactgcaaatctaaaattacgaagttagtgtagttgcaataaacttagaacatatgcattaatactaaacctatgcagtaataccataattagccttctaatcatgtaatttgctttacttaggtatttcatttggttcagcctgttatggaatttaccagcttgataaatttgcctataaagttttataaagaaaaggaatattttgttttcataaagaggaaaatccattcttagaaaaaaa

SEQ ID NO: 2682 - DNA, 5141 bp, Homo Sapiens
  NM_005591
acgttatccatgaagtgtcgcgagagaaacggacgccgttctctcccgcggaattcaggtttacggccctgcgggttctcagagaatttctagaatttggaatcgagtgcattttctgacatttgagtacagtacccaggggttcttggagaagaacctggtcccagaggagcttgactgaccataaaaatgagtactgcagatgcacttgatgatgaaaacacatttaaaatattagttgcaacagatattcatcttggatttatggagaaagatgcagtcagaggaaatgatacgtttgtaacactcgatgaaattttaagacttgcccaggaaaatgaagtggattttattttgttaggtggtgatctttttcatgaaaataagccctcaaggaaaacattacatacctgcctcgagttattaagaaaatattgtatgggtgatcggcctgtccagtttgaaattctcagtgatcagtcagtcaactttggttttagtaagtttccatgggtgaactatcaagatggcaacctcaacatttcaattccagtgtttagtattcatggcaatcatgacgatcccacaggggcagatgcactttgtgccttggacattttaagttgtgctggatttgtaaatcactttggacgttcaatgtctgtggagaagatagacattagtccggttttgcttcaaaaaggaagcacaaagattgcgctatatggtttaggatccattccagatgaaaggctctatcgaatgtttgtcaataaaaaagtaacaatgttgagaccaaaggaagatgagaactcttggtttaacttatttgtgattcatcagaacaggagtaaacatggaagtactaacttcattccagaacaatttttggatgacttcattgatcttgttatctggggccatgaacatgagtgtaaaatagctccaaccaaaaatgaacaacagctgttttatatctcacaacctggaagctcagtggttacttctctttccccaggagaagctgtaaagaaacatgttggtttgctgcgtattaaagggaggaagatgaatatgcataaaattcctcttcacacagtgcggcagtttttcatggaggatattgttctagctaatcatccagacatttttaacccagataatcctaaagtaacccaagccatacaaagcttctgtttggagaagattgaagaaatgcttgaaaatgctgaacgggaacgtctgggtaattctcaccagccagagaagcctcttgtacgactgcgagtggactatagtggaggttttgaacctttcagtgttcttcgctttagccagaaatttgtggatcgggtagctaatccaaaagacattatccattttttcaggcatagagaacaaaaggaaaaaacaggagaagagatcaactttgggaaacttatcacaaagccttcagaaggaacaactttaagggtagaagatcttgtaaaacagtactttcaaaccgcagagaagaatgtgcagctctcactgctaacagaaagagggatgggtgaagcagtacaagaatttgtggacaaggaggagaaagatgccattgaggaattagtgaaataccagttggaaaaaacacagcgatttcttaaagaacgtcatattgatgccctcgaagacaaaatcgatgaggaggtacgtcgtttcagagaaaccagacaaaaaaatactaatgaagaagatgatgaagtccgtgaggctatgaccagggccagagcactcagatctcagtcagaggagtctgcttctgcctttagtgctgatgaccttatgagtatagatttagcagaacagatggctaatgactctgatgatagcatctcagcagcaaccaacaaaggaagaggccgaggaagaggtcgaagaggtggaagagggcagaattcagcatcgagaggagggtctcaaagaggaagagcagacactggtctggagacttctacccgtagcaggaactcaaagactgctgtgtcagcatctagaaatatgtctattatagatgcctttaaatctacaagacagcagccttcccgaaatgtcactactaagaattattcagaggtgattgaggtagatgaatcagatgtggaagaagacatttttcctaccacttcaaagacagatcaaaggtggtccagcacatcatccagcaaaatcatgtcccagagtcaagtatcgaaaggggttgattttgaatcaagtgaggatgatgatgatgatccttttatgaacactagttctttaagaagaaatagaagataatatatttaatggcactgagaaacatgcaagatacaggaaaaatgaaaatgttacaagctaagagtttacagtttaagattttaagtattgtttcctgagcataactccataagtaagaaatttctagttcacagacatacaatagcattgattcaccttgtttttttaacctggttgttgtagtaagagctttgtttcaatatcactcttgagtaaagattaaaataaagctaccattttacatttctatttcataatgaaaaactatgtcagtattttaatatggttacatttagccaaagttgagggaaagagcttataaaatttaacttcttcataattttagtaatttcctagaggttctgggttttctgaaagtaaaacaatttatgcgaacctatgtctaaattcactgtttgttactatgtatgtttttttccaatgcttcttataagactaaatgattagaagtacctaatagtttgaacagatatgtttttatttaaaagagtagaataacctttcagaattactgagttttttattccagttgtagcaaagatttcaaaagattgtgttcccattaagtggtagtaatttcctttattattctgtatccttaatggtgttctctctctctctctctctctctctctctccctctcccccccgttccccactcttcctttctcctttgctttttcttctctttcatacatatatgcgtgcctagttctaggaggaaacgggttaaaaattgttttaaactacatcttgaaaatattgaagaatttgttttaggtagagtggtcagttgaaccttacagtaaagtatagaaatatatttaatgtggaatgtcaatgccaggatttctcattaacaatattttatctcaactttggttcctgtgatacatttctgaatgggcaattccagaaatcttagtagcccatgttaagcttctattttttacttgttttcggggagaaataagaattagacatcttcagatttaagttaaataatcccattctttataatcctctgtaaaaagatccctgagattattccttcttctagttttatgcgacagctttactttaaaattcaagttatacatcttgggagtacaatggcccgacatttcttcataggtagaaacaaatacttgactcagtgatactcatgaccattagaatagtcatacctggaatgtgtcaaattataagagacagacacttggttagtggctgcctcatatagcacttttgaagaggcctaagtcaaaacttgcaatataacattctattgactttcttaaaaatattttttctgtacctaacttgagcataagggttatttgagcaagtaacattaactcagtggaaggcattgtcctgtgaaatattcttaggcagatctgcccacatctttattgaacttgaaatctaatatttctagtatttgaacaaagcagaaggttaagtcagggaagagcagtgctgtccatgatgtaatggaagctaccaggggaggcagtgtctggatgatgctgtgctacctacccctgcacaagccatgctggctcagtctgagctgtgggccacatcagctagtggctcttctcatgcatcagttaggtgggtctgggtgagagttatagtgagggaatggtcactaaagtatcctgacaagttcctaggaaaaaaggaataaagtttttttccttaaaaaaaaaaaaattgctcttggctgtgaaaagaggtactaaatgcgattcagttcaccgctaaggaaagtgatgacatagcagttacagagggtgataaatctctccagctaattcaggtcattttgtgaatactatgtatcaagccctgaaaatatggtaaataaaacgtgacagggaaacctttttttgattgaatattgttacatagttaaatgtgctatatatccttaatattttatattgatcctgcaaaatctgttggttttaggggagttttgttttttgtttctaacaattttcagacctgttggtataggaatgtagaagtctttcagatgatttgaaagcagctgcatttgctcttggaggctttgggagagcaggaatgaaaacattcagaggaagacatctgtagggaattcttctgttacttaccaaagaataagtgtctttctggtgttttatttcctatcataaaaatacaacagtgcatttacaaggttaaagattcctcgaagttctaggaaattcttgaaaatataagtggtgcttagaaaattcaagcatttaggaatgtgacctttaattcaggtatgtaaaagacttttttcccaaacttttaaaagtaggaaatacaataaatacagaaaagtcatatggttgaataaataattataaattgagcactgatggaatccctctacaggtcaagaaatagcgcagtgtcctggatgcccattatattgttttctcctttctgggtaacaagccctaacttctgtaatttaaaagctcctacttttgccacaaggtggtgcttctgccattagacgcagttaggaggatgcaactgcaaatctaaaattacgaagttagtgtagttgcaataaacttagaacatatgcattaatactaaacctatgcagtaataccataattagccttctaatcatgtaatttgctttacttaggtatttcatttggttcagcctgttatggaatttaccagcttgataaatttgcctataaagttttataaagaaaaggaatattttgttttcataaagaggaaaatccattcttagaaaaaaa

SEQ ID NO: 2683 - DNA, 1535 bp, Homo Sapiens
  NM_005600
cttgcgtcacgtccggcctgcgagttaccgcccactcgctgcggcgcttctggctccagaccgccctccggatcggaccctgcgaatggttttggctatatcttcatgctgggcttcatcaccaggcctcctcacagattcctgtcccttctgtgtcctggactccggatacctcaactctcagtactttgtgctcagcccaggcccagagccatggctatctcctcttcctcctgcgaactgcccctggtggctgtgtgccaggtaacatcgacgccagacaagcaacagaactttaaaacatgtgctgagctggttcgagaggctgccagactgggtgcctgcctggctttcctgcctgaggcatttgacttcattgcacgggaccctgcagagacgctacacctgtctgaaccactgggtgggaaacttttggaagaatacacccagcttgccagggaatgtggactctggctgtccttgggtggtttccatgagcgtggccaagactgggagcagactcagaaaatctacaattgtcacgtgctgctgaacagcaaaggggcagtagtggccacttacaggaagacacatctgtgtgacgtagagattccagggcaggggcctatgtgtgaaagcaactctaccatgcctgggcccagtcttgagtcacctgtcagcacaccagcaggcaagattggtctagctgtctgctatgacatgcggttccctgaactctctctggcattggctcaagctggagcagagatacttacctatccttcagcttttggatccattacaggcccagcccactgggaggtgttgctgcgggcccgtgctatcgaaacccagtgctatgtagtggcagcagcacagtgtggacgccaccatgagaagagagcaagttatggccacagcatggtggtagacccctggggaacagtggtggcccgctgctctgaggggccaggcctctgccttgcccgaatagacctcaactatctgcgacagttgcgccgacacctgcctgtgttccagcaccgcaggcctgacctctatggcaatctgggtcacccactgtcttaagacttgacttctgtgagtttagacctgcccctcccacccccaccctgccactatgagctagtgctcatgtgacttggaggcaggatccaggcacagctcccctcacttggagaaccttgactctcttgatggaacacagatgggctgcttgggaaagaaactttcacctgagcttcacctgaggtcagactgcagtttcagaaaggtggaattttatatagtcattgtttatttcatggaaactgaagttctgctgagggctgagcagcactggcattgaaaaatataataatcataaagtctgtgtctggacatcgcctttgggaactagaaggggagttggtattgtaccagctggactaagctccagttctagacctcctggctcattcaacatgcctccctacctaaataaaagtgcaacactcaaaaaaaaaaaaaaaaaa

SEQ ID NO: 2684 - DNA, 826 bp, Homo Sapiens
  NM_005601
tcatgtgacaaagcgcaggacccctcactgccccaactgcttgctgttctctctttcttgggctctaaggacccaggagtctgggtgcacagcctccttctctctgagattcaagagtctgatcagcagcctcttcctcctccaggacccagaagccctgagcttatccccatggagctctgccggtccctggccctgctggggggctccctgggcctgatgttctgcctgattgctttgagcaccgatttctggtttgaggctgtgggtcccacccactcagctcactcgggcctctggccaacagggcatggggacatcatatcaggctacatccacgtgacgcagaccttcagcattatggctgttctgtgggccctggtgtccgtgagcttcctggtcctgtcctgcttcccctcactgttccccccaggccacggcccgcttgtctcaaccaccgcagcctttgctgcagccatctccatggtggtggccatggcggtgtacaccagcgagcggtgggaccagcctccacacccccagatccagaccttcttctcctggtccttctacctgggctgggtctcagctatcctcttgctctgtacaggtgccctgagcctgggtgctcactgtggcggtccccgtcctggctatgaaaccttgtgagcagaaggcaagagcggcaagatgagttttgagcgttgtattccaaaggcctcatctggagcctcgggaaagtctggtcccacatctgcccgcccttccagcccttccccagcccctcctcttgtttcttcattcattcaacaaaatttggctggaa

SEQ ID NO: 2685 - DNA, 2221 bp, Homo Sapiens
  NM_005605
cacgagggcccgggccgcgagcagccgcggctgtcccggtcgccacccttagcagcggtcgaggtcggtgccgaagcggtgttccccgccttagccgctggcgcctcccaagagagcggccggtgggccctcgtcctgtcagtggcgtcggaggccggcgctgcggtggccgcgcccttctggtgctcggacaccgctgaggagccggggccgggcacggctggctgacggctccgggcagctaaggctgcccgaggagaaggcggcggccgcggcgtaggcgcacgtccggcgggctcctggagcctggaggaggccgaggggaccatgtccgggaggcgcttccacctctccaccaccgaccgcgtcatcaaagctgtcccctttcctccaacccaacggcttactttcaaggaagtatttgagaatgggaaacctaaagttgatgttttaaaaaaccatttggtaaaggaaggacgactggaagaggaagtagccttaaagataatcaatgatggggctgccatcctgaggcaagagaagactatgatagaagtagatgctccaatcacagtatgtggtgatattcatggacaattctttgacctaatgaagttatttgaagttggaggatcacctagtaacacacgctacctctttctgggtgactatgtggacagaggctatttcagtatagagtgtgtgctgtatttatggagtttaaagattaatcatcccaaaacattgtttctgcttcggggaaatcatgaatgcaggcatcttacagactatttcaccttcaaacaggaatgtcgaatcaaatattcggaacaggtgtatgatgcctgtatggagacatttgactgtcttcctcttgctgccctcttaaaccagcagtttctctgtgtacatggaggaatgtcacctgaaattacttctttagatgacattaggaaattagacaggtttacggaacctcccgcctttggacctgtgtgtgacctgctttggtctgatccctcagaggattatggcaatgagaagaccttggagcactatacccacaacactgtccgagggtgctcttatttctacagttaccctgcagtttgtgaatttttgcagaacaataatttactatcaattatcagagcccatgaagcccaagatgctgggtatcgaatgtacaggaagagccaagccacaggctttccatcacttattacaattttctctgcccccaattacctagatgtctataacaataaagctgctgtgttgaaatatgaaaacaatgtcatgaatatcaggcagtttaactgttctccacacccctactggcttccaaactttatggatgttttcacatggtctttgccttttgttggggaaaaagtcacagagatgctggtaaatgtgctcaacatatgctctgatgacgaactgatttctgatgatgaagcagaaggaagcactacagttcgtaaggagatcatcaggaataagatcagagccattgggaagatggcacgggtcttttcaattcttcggcaagaaagtgagagtgtgctgactctcaagggcctgactcccacaggcacactccctctgggcgtcctctcaggaggcaagcagactatcgagacagccacagtagaagcggtagaggcccgggaagccatcagagggttctcgcttcagcacaagatccggagttttgaagaagcgcgaggtctggaccgaattaatgagcgaatgccaccccgaaaggatagcatacacgctggtgggccaatgaaatctgtaacctcagcacactcacatgctgcgcacaggagcgaccaagggaagaaagcccattcatgacttagagtcctgccgtggctcaggtggatctaaaactcaagaacaaattctatttatttattattggaaaatgaaaagcaactcaaaacaacttcaacctggaggtgcatttataattcagtctgcatttattctgtaaaaaggtgactgttttataaattcttttaatttatgttcaatatatataaaaagtgcatctgttttgtttttcccttttttctccataattttaagaaatgaatctgattgttgtcaacacatttgtgaagtcttgtgctataaaggggaacttcccctaataaaagggccttggaaacctcaaaaaaaaaaaaaaaaaaaaaaaaaaaaaaaaaaa

SEQ ID NO: 2686 - DNA, 917 bp, Homo Sapiens
  NM_005608
acttctcgctcgacacagccagagctggaggtgggtgcccggcacggaggggcctgcggaccaatggctctgccctgcaccttagggctcgggatgctgctggccctgccaggggccttgggctcgggtggcagcgcggaggacagcgtgggctccagctctgtcaccgttgtcctgctgctgctgctgctcctactgctggccactggcctagcactggcctggcgccgcctcagccgtgactcagggggctactaccacccggcccgcctaggtgccgcgctgtggggccgcacgcggcgcctgctctgggccagccccccaggtcgctggctgcaggcccgagctgagctggggtccacagacaatgaccttgagcgacaggaggatgagcaggacacagactatgaccacgtcgcggatggtggcctgcaggctgaccctggggaaggcgagcagcaatgtggagaggcgtccagcccagagcaggtccccgtgcgggctgaggaagccagagacagtgacacggagggcgacctggtcctcggctccccaggaccagcgagcgcagggggcagtgctgaggccctgctgagtgacctgcacgcctttgctggcagcgcagcctgggatgacagcgccagggcagctgggggccagggcctccatgtcaccgcactgtagaggccggtcttggtgtcccatccctgtcacagccgctcactccccgtgcctctgcttcccaagatgccatggctggactggacccccagcccacatgaccatgcctcagactgtcaccccctaccagttcccaagtccatgtgtaccccgctcaccacgggaacggccccccccaaccacaggcatcaggcaaccatttgaaataaaactccttcagcctgtgaaaaaaaaaa

SEQ ID NO: 2687 - DNA, 1065 bp, Homo Sapiens
  NM_005615
gttttcagtcatgttgtttctttaagttggtttagccttcctgtatacatgtgataatgatactgttttaaagaacaggtgtgaaagtctaagagtttaatccagactctgcacaagaagttaatctgccaaaccctaggattctccttctgaaagctcagaatatttcttccccttccctatacacacagggctcgaagggttagagaagaaaggcagacaacagcttctgagctttggactaatcacagcctctgttctcagcaggagccccaacactgagaccagaaaagatggtgctatgctttcctcttcttttactgctgctggttctatggggaccagtgtgtccacttcatgcttggcctaagcgtctcaccaaggctcactggtttgaaattcagcatatacagccaagtcctctccaatgcaacagggcaatgagtggcatcaacaattatacccagcactgtaagcatcaaaatacctttctgcatgactctttccagaatgtggctgctgtctgtgatttgctcagcattgtctgcaaaaatcgtcggcacaactgccaccagagctcaaagcctgtcaacatgactgactgcagactcacttcaggaaagtatccccagtgccgctatagtgctgctgcccagtacaaattcttcattgttgcctgtgacccccctcagaagagcgatcccccctacaagttggttcctgtacacttagatagtattctctaaggcatccactgcatttcctttcatttgacatagcttctgttacaattgcatccatgttttcttttcttttgttgattttcttgttcccgtagaagaaagaagaaaggtgtttggagaattcgagtgcctaggatgccagaccagagttgagacaaaaagaaataagattattttctgctttgtagttctgtacttttcgagagaagggaatagggaagacagcaaagaaagattcagatttctaaccctgcaacttttgccaagctttattgccctgtgttcacagcaataaaaccacttcctgctgcattctaaaaaa

SEQ ID NO: 2688 - DNA, 3366 bp, Homo Sapiens
  NM_005618
cgtgggatttccagaccgcggctttctaatcggctcgggaggaagctctgcagctctcttgggaattaagctcaatctctggactctctctctttctctttctccccctccctctcctgcgaagaagctcaagacaaaaccaggaagccggcgaccctcacctcctcgggggctgggaggaaggaggaaaacgaaagtcgccgccgccgcgctgtcccccgagagctgcctttcctcgggcatccctggggctgccgcgggacctcgcagggcggatataaagaaccgcggccttgggaagaggcggagaccggcttttaaagaaagaagtcctgggtcctgcggtctggggcgaggcaagggcgcttttctgcccacgctccccgtggcccatcgatcccccgcgcgtccgccgctgttctaaggagagaagtgggggccccccaggctcgcgcgtggagcgaagcagcatgggcagtcggtgcgcgctggccctggcggtgctctcggccttgctgtgtcaggtctggagctctggggtgttcgaactgaagctgcaggagttcgtcaacaagaaggggctgctggggaaccgcaactgctgccgcgggggcgcggggccaccgccgtgcgcctgccggaccttcttccgcgtgtgcctcaagcactaccaggccagcgtgtcccccgagccgccctgcacctacggcagcgccgtcacccccgtgctgggcgtcgactccttcagtctgcccgacggcgggggcgccgactccgcgttcagcaaccccatccgcttccccttcggcttcacctggccgggcaccttctctctgattattgaagctctccacacagattctcctgatgacctcgcaacagaaaacccagaaagactcatcagccgcctggccacccagaggcacctgacggtgggcgaggagtggtcccaggacctgcacagcagcggccgcacggacctcaagtactcctaccgcttcgtgtgtgacgaacactactacggagagggctgctccgttttctgccgtccccgggacgatgccttcggccacttcacctgtggggagcgtggggagaaagtgtgcaaccctggctggaaagggccctactgcacagagccgatctgcctgcctggatgtgatgagcagcatggattttgtgacaaaccaggggaatgcaagtgcagagtgggctggcagggccggtactgtgacgagtgtatccgctatccaggctgtctccatggcacctgccagcagccctggcagtgcaactgccaggaaggctgggggggccttttctgcaaccaggacctgaactactgcacacaccataagccctgcaagaatggagccacctgcaccaacacgggccaggggagctacacttgctcttgccggcctgggtacacaggtgccacctgcgagctggggattgacgagtgtgaccccagcccttgtaagaacggagggagctgcacggatctcgagaacagctactcctgtacctgcccacccggcttctacggcaaaatctgtgaattgagtgccatgacctgtgcggacggcccttgctttaacgggggtcggtgctcagacagccccgatggagggtacagctgccgctgccccgtgggctactccggcttcaactgtgagaagaaaattgactactgcagctcttcaccctgttctaatggtgccaagtgtgtggacctcggtgatgcctacctgtgccgctgccaggccggcttctcggggaggcactgtgacgacaacgtggacgactgcgcctcctccccgtgcgccaacgggggcacctgccgggatggcgtgaacgacttctcctgcacctgcccgcctggctacacgggcaggaactgcagtgcccccgtcagcaggtgcgagcacgcaccctgccacaatggggccacctgccacgagaggggccaccgctatgtgtgcgagtgtgcccgaggctacgggggtcccaactgccagttcctgctccccgagctgcccccgggcccagcggtggtggacctcactgagaagctagagggccagggcgggccattcccctgggtggccgtgtgcgccggggtcatccttgtcctcatgctgctgctgggctgtgccgctgtggtggtctgcgtccggctgaggctgcagaagcaccggcccccagccgacccctgccggggggagacggagaccatgaacaacctggccaactgccagcgtgagaaggacatctcagtcagcatcatcggggccacgcagatcaagaacaccaacaagaaggcggacttccacggggaccacagcgccgacaagaatggcttcaaggcccgctacccagcggtggactataacctcgtgcaggacctcaagggtgacgacaccgccgtcagggacgcgcacagcaagcgtgacaccaagtgccagccccagggctcctcaggggaggagaaggggaccccgaccacactcaggggtggagaagcatctgaaagaaaaaggccggactcgggctgttcaacttcaaaagacaccaagtaccagtcggtgtacgtcatatccgaggagaaggatgagtgcgtcatagcaactgaggtgtaaaatggaagtgagatggcaagactcccgtttctcttaaaataagtaaaattccaaggatatatgccccaacgaatgctgctgaagaggagggaggcctcgtggactgctgctgagaaaccgagttcagaccgagcaggttctcctcctgaggtcctcgacgcctgccgacagcctgtcgcggcccggccgcctgcggcactgccttccgtgacgtcgccgttgcactatggacagttgctcttaagagaatatatatttaaatgggtgaactgaattacgcataagaagcatgcactgcctgagtgtatattttggattcttatgagccagtcttttcttgaattagaaacacaaacactgcctttattgtcctttttgatacgaagatgtgctttttctagatggaaaagatgtgtgttattttttggatttgtaaaaatatttttcatgatatctgtaaagcttgagtattttgtgatgttcgttttttataatttaaattttggtaaatatgtacaaaggcacttcgggtctatgtgactatatttttttgtatataaatgtatttatggaatattgtgcaaatgttatttgagttttttactgttttgttaatgaagaaattcctttttaaaatatttttccaaaataaattttatgaatgacaaaaaaaaaaaaaaaaaaaaaaaaaaaaaaaaaaaaaaaaaaaaaaaaaaaaaaaaaa

SEQ ID NO: 2689 - DNA, 595 bp, Homo Sapiens
  NM_005620
gggcaaggctgggccgggaagggcgtgggttgaggagaggctccagacccgcacgccgcgcgcacagagctctcagcgccgctcccagccacagcctcccgcgcctcgctcagctccaacatggcaaaaatctccagccctacagagactgagcggtgcatcgagtccctgattgctgtcttccagaagtatgctggaaaggatggttataactacactctctccaagacagagttcctaagcttcatgaatacagaactagctgccttcacaaagaaccagaaggaccctggtgtccttgaccgcatgatgaagaaactggacaccaacagtgatggtcagctagatttctcagaatttcttaatctgattggtggcctagctatggcttgccatgactccttcctcaaggctgtcccttcccagaagcggacctgaggaccccttggccctggccttcaaacccaccccctttccttccagcctttctgtcatcatctccacagcccacccatcccctgagcacactaaccacctcatgcaggccccacctgccaatagtaataaagcaatgtcacttttttaaaacatgaaa

SEQ ID NO: 2690 - DNA, 466 bp, Homo Sapiens
  NM_005621
accactgctggctttttgctgtagctccacattcctgtgcattgaggggttaacattaggctgggaagatgacaaaacttgaagagcatctggagggaattgtcaatatcttccaccaatactcagttcggaaggggcattttgacaccctctctaagggtgagctgaagcagctgcttacaaaggagcttgcaaacaccatcaagaatatcaaagataaagctgtcattgatgaaatattccaaggcctggatgctaatcaagatgaacaggtcgactttcaagaattcatatccctggtagccattgcgctgaaggctgcccattaccacacccacaaagagtaggtagctctctgaaggctttttacccagcaatgtcctcaatgagggtcttttctttccctcaccaaaacccagccttgcccgtggggagtaagagttaataaacacactcacgaaaagtt

SEQ ID NO: 2691 - DNA, 1351 bp, Homo Sapiens
  NM_005623
gtgatggagagcaccagcaaagccttagggcccatccctggcctcctgttacccacagaggggtaggcccttggctctcttccactatgacgtcagcttccattcttcctttcttatagacaattttccatttcaaggaaatcagagcccttaatagttcagtgaggtcactttgctgagcacaatcccatacccttcagcctctgctccacagagcctaagcaaaagatagaaactcacaacttccttgttttgttatctggaaattatcccaggatctggtgcttactcagcatattcaaggaaggtcttacttcattcttccttgattgtgaccatgcccaggctctctgctccctataaaaggcaggcagagccaccgaggagcagagaggttgagaacaacccagaaaccttcacctctcatgctgaagctcacacccttgccctccaagatgaaggtttctgcagcgcttctgtgcctgctgctcatggcagccactttcagccctcagggacttgctcagccagattcagtttccattccaatcacctgctgctttaacgtgatcaataggaaaattcctatccagaggctggagagctacacaagaatcaccaacatccaatgtcccaaggaagctgtgatcttcaagaccaaacggggcaaggaggtctgtgctgaccccaaggagagatgggtcagggattccatgaagcatctggaccaaatatttcaaaatctgaagccatgagccttcatacatggactgagagtcagagcttgaagaaaagcttatttattttccccaacctcccccaggtgcagtgtgacattattttattataacatccacaaagagattatttttaaataatttaaagcataatatttcttaaaaagtatttaattatatttaagttgttgatgttttaactctatctgtcatacatcctagtgaatgtaaaatgcaaaatcctggtgatgtgttttttgtttttgttttcctgtgagctcaactaagttcacggcaaaatgtcattgttctccctcctacctgtctgtagtgttgtggggtcctcccatggatcatcaaggtgaaacactttggtattctttggcaatcagtgctcctgtaagtcaaatgtgtgctttgtactgctgttgttgaaattgatgttactgtatataactatggaattttgaaaaaaaatttcaaaaagaaaaaaatatatataatttaaaactaaaaaaaaaaaaaaaaaaaaaaaaaaaaaaaaaaaaaaaaaaaaaaaaaaaaaaaaaaaaaaaaaaaaaaaaaaaaaaaaaaaaaaaaaaaaaaaaaaaaaa

SEQ ID NO: 2692 - DNA, 2414 bp, Homo Sapiens
  NM_005627
ttttttataaggccgagcgcgcggcctggcgcagcatacgccgagccggtctttgagcgctaacgtctttctgtctccccgcggtggtgatgacggtgaaaactgaggctgctaagggcaccctcacttactccaggatgaggggcatggtggcaattctcatcgctttcatgaagcagaggaggatgggtctgaacgactttattcagaagattgccaataactcctatgcatgcaaacaccctgaagttcagtccatcttgaagatctcccaacctcaggagcctgagcttatgaatgccaacccttctcctccaccaagtccttctcagcaaatcaaccttggcccgtcgtccaatcctcatgctaaaccatctgactttcacttcttgaaagtgatcggaaagggcagttttggaaaggttcttctagcaagacacaaggcagaagaagtgttctatgcagtcaaagttttacagaagaaagcaatcctgaaaaagaaagaggagaagcatattatgtcggagcggaatgttctgttgaagaatgtgaagcaccctttcctggtgggccttcacttctctttccagactgctgacaaattgtactttgtcctagactacattaatggtggagagttgttctaccatctccagagggaacgctgcttcctggaaccacgggctcgtttctatgctgctgaaatagccagtgccttgggctacctgcattcactgaacatcgtttatagagacttaaaaccagagaatattttgctagattcacagggacacattgtccttactgacttcggactctgcaaggagaacattgaacacaacagcacaacatccaccttctgtggcacgccggagtatctcgcacctgaggtgcttcataagcagccttatgacaggactgtggactggtggtgcctgggagctgtcttgtatgagatgctgtatggcctgccgcctttttatagccgaaacacagctgaaatgtacgacaacattctgaacaagcctctccagctgaaaccaaatattacaaattccgcaagacacctcctggagggcctcctgcagaaggacaggacaaagcggctcggggccaaggatgacttcatggagattaagagtcatgtcttcttctccttaattaactgggatgatctcattaataagaagattactcccccttttaacccaaatgtgagtgggcccaacgacctacggcactttgaccccgagtttaccgaagagcctgtccccaactccattggcaagtcccctgacagcgtcctcgtcacagccagcgtcaaggaagctgccgaggctttcctaggcttttcctatgcgcctcccacggactctttcctctgaaccctgttagggcttggttttaaaggattttatgtgtgtttccgaatgttttagttagccttttggtggagccgccagctgacaggacatcttacaagagaatttgcacatctctggaagcttagcaatcttattgcacactgttcgctggaagctttttgaagagcacattctcctcagtgagctcatgaggttttcatttttattcttccttccaacgtggtgctatctctgaaacgagcgttagagtgccgccttagacggaggcaggagtttcgttagaaagcggacgctgttctaaaaaaggtctcctgcagatctgtctgggctgtgatgacgaatattatgaaatgtgccttttctgaagagattgtgttagctccaaagcttttcctatcgcagtgtttcagttctttattttcccttgtggatatgctgtgtgaaccgtcgtgtgagtgtggtatgcctgatcacagatggattttgttataagcatcaatgtgacacttgcaggacactacaacgtgggacattgtttgtttcttccatatttggaagataaatttatgtgtagacttttttgtaagatacggttaataactaaaatttattgaaatggtcttgcaatgactcgtattcagatgcttaaagaaagcattgctgctacaaatatttctatttttagaaagggtttttatggaccaatgccccagttgtcagtcagagccgttggtgtttttcattgtttaaaatgtcacctgtaaaatgggcattatttatgtttttttttttgcattcctgataattgtatgtattgtataaagaacgtctgtacattgggttataacactagtatatttaaacttacaggcttatttgtaatgtaaaccaccattttaatgtactgtaattaacatggttataatacgtacaatccttccctcatcccatcacacaactttttttgtgtgtgataaactgattttggtttgcaataaaaccttgaaaaatatttacatataaaaaaaa

SEQ ID NO: 2693 - DNA, 3347 bp, Homo Sapiens
  NM_005637
gagaggccggcgtctctcccccagtttgccgttcacccggagcgctcgggacttgccgatagtggtgacggcggcaacatgtctgtggctttcgcggccccgaggcagcgaggcaagggggagatcactcccgctgcgattcagaagatgttggatgacaataaccatcttattcagtgtataatggactctcagaataaaggaaagacctcagagtgttctcagtatcagcagatgttgcacacaaacttggtataccttgctacaatagcagattctaatcaaaatatgcagtctcttttaccagcaccacccacacagaatatgcctatgggtcctggagggatgaatcagagcggccctcccccacctccacgctctcacaacatgccttcagatggaatggtaggtgggggtcctcctgcaccgcacatgcagaaccagatgaacggccagatgcctgggcctaaccatatgcctatgcagggacctggacccaatcaactcaatatgacaaacagttccatgaatatgccttcaagtagccatggatccatgggaggttacaaccattctgtgccatcatcacagagcatgccagtacagaatcagatgacaatgagtcagggacaaccaatgggaaactatggtcccagaccaaatatgagtatgcagccaaaccaaggtccaatgatgcatcagcagcctccttctcagcaatacaatatgccacagggaggcggacagcattaccaaggacagcagccacctatgggaatgatgggtcaagttaaccaaggcaatcatatgatgggtcagagacagattcctccctatagacctcctcaacagggcccaccacagcagtactcaggccaggaagactattacggggaccaatacagtcatggtggacaaggtcctccagaaggcatgaaccagcaatattaccctgatggaaattcacagtatggccaacagcaagatgcataccagggaccacctccacaacagggatatccaccccagcagcagcagtacccagggcagcaaggttacccaggacagcagcagggctacggtccttcacagggtggtccaggtcctcagtatcctaactacccacagggacaaggtcagcagtatggaggatatagaccaacacagcctggaccaccacagccaccccagcagaggccttatggatatgaccagggacagtatggaaattaccagcagtgaaaaagtacttacattccagtagccagtatctattagcagccatattgtcacctcagcactgtggacacctccctgtgaagagatccttccattccatctagtttttggaaaaaccttgtggataagtggctgtttcatcagtaagcagcctttgtggtttagttataaaaggctttagtagctcaaaaatactcttgatttcacatttctactctagatggcaacattggacagaaaatgcaatgacataaccaatttgtaatgattttggaactgtgtttcaaatggactgttacagactgaaaggtgtgaacagctttgtatgtttatgaagggtaagggaatttaatacttttccacagatttttttgtaaggggaagagggaaatgtacactttttacagcagcaatattttgtatattatgtttatttcatgtggtgaatatgcaaggcggtacactacgcactggacagcatcagaaatcctctgttaatgtggactggagcatggtagatgcttgattgttttggtctcaaaatggtgtgctataaagataaaggtgaggggaagacaaagcacaccatatgtccactgttctgttctcatagaggaaattcaaatcccttttatctattagataatcaagggcactgtgatacagttttgagtaaaaagacattttttaaaagccttccagttttgtggattaaacctttttataaagatcatttataatactgttttaaaatgtgaggcaataagaattactttgtgttggatctgaggaggctttggtaaaacagtttcatctaaatgaaagtggtaatcctcttctaaaatagcaataactgaaaatgaaagtgttaattttaccttgtttgagttatcagggaacttagtaagtaatatcaaagcattttataaatgatatcaaagaagagtcaacattgatccagtcattttattttgtaatattgagggataattggttattaaactgaatagttcaggagactttacaaacctttgtttcaactttcttatctggaaataatatcatttataaagggacacttttatgtttttcccttttttatgttggttgatataacacaaagagatatttaggaaaatgcttattgatgaggtttattctatctgtttttaaagcaccgaggttgcattctagataaccttgtttattagcatggcatattttaatcattatttgagactgtcctgtgcctgattattttagctaaattcagggagattgcgtggggcaggaaagcatgcattgaaaaatttctaaccacggttatttaagcataatctgaaaacatctagcccaaaggtaagttgctattttcatcacagttgcctatgcccagggaataagatgtattctttataattgaattggtttttcccacgtctaactggaaacaaaacagaaggggcgtcataaatttgaataagcagaacatactgttctcaacatactgtaatcaaaaggaggaatttcagtgggtctctgtgtgtgtatgagagagagagtgtgtgtttgtgtgtttcaaggtcagaacaggtttttttgtttttgttttttgttctttgtttttttttttgagatggagtcttgctcttgtcgcccaggctggagtgcagtggcgcaatctcagctcactgcaacctccgcctcccaggttcaagcagttctcctgcctcagcctcctgagtagctgggatgacaggcacccgccaccacacccagctaatttttgtacttttagtagagacgaggtttcgccatgttggccaggctggtctcgaactcctgacctcaggtgatccacccgcctcggccttccaaagtgctgggattacaggcgtgagccaccgtgcctggccagaataggttttttctttcaacttgatcagtagaaaatggacatcaagtttgaacagataaatcatggacagccttattgtgattgaaatgcttgtaggttctgtgccaattttccaccactgtgtactttgttgctatttaaaactgtatcaactctaacggaagaataaattatttgtgattttaaaaaa

SEQ ID NO: 2694 - DNA, 2664 bp, Homo Sapiens
  NM_005638
attggaggagcgctcccactcccaagaggccacgcgtagacggggcgcttcatgcggaagtcagcggcgtccggtcccagcctcctctgggagcgggcagttggcgaccctgcactgacccgcgtccctccgtcccgagcccgcgcgccctcagagggtgcccggacagactgaagccatggcgattctttttgctgttgttgccagggggaccactatccttgccaaacatgcttggtgtggaggaaacttcctggaggtgacagagcagattctggctaagataccttctgaaaataacaaactaacgtactcacatggcaattatttgtttcattacatctgccaagacaggattgtatatctttgtatcactgatgatgattttgaacgttcccgagcctttaattttctgaatgagataaagaagaggttccagactacttacggttcaagagcacagacagcacttccatatgccatgaatagcgagttctcaagtgtcttagctgcacagctgaagcatcactctgagaataagggcctagacaaagtgatggagactcaagcccaagtggatgaactgaaaggaatcatggtcagaaacatagatctggtagctcagcgaggagaaagattggaattattgattgacaaaacagaaaatcttgtggattcttctgtcaccttcaaaactaccagcagaaatcttgctcgagccatgtgtatgaagaacctcaagctcactattatcatcatcatcgtatcaattgtgttcatctatatcattgtttcacctctctgtggtggatttacatggccaagctgtgtgaagaaataggaaagaagaagttaccattaaccaaggatatgagagaacaaggagttaaaagcaatccatgtgactcaagcctttcacatactgacagatggtatctgccagtctcttcaaccctcttctcactttttaaaatcttgttccatgcctccaggtttatctttgtcttatctaccagtttattcctgtgaacttcagattgaaccattcattgcagcagtagccttaaaaaggcttttgtttatttctttggtttgttaactagtgtcatctatttagagaaacatttttgtttttaattgctcaaagctgtcgccgctagtcttatgagctatctactaaaactatggagaaactttgtatgtgcacacaaaagtattcaagagacagtattgctaacatctcatcttaatgtcttttgttattgagaagttttaggtgcttcaaaacaatataaatggataatagttgttatttggggaattgtaatgatgttggtgctgcttccttctaagagctcagacaagtaaagtatgaaacattcttatttcagttagatggggaacattttgctagcccattagaagcacacagaattatccttgtcctcctaatattgactttcaggaataaagttcagtgtgctgatcattcacaatacagtggatagcttgatatcttctgttttcccattgcagttgatttgagaagatgaaggtttaaatattgttgaaagttgcagttttttaaatgtgttcctttttcttctgtgaatatttagggcaatcgtgtcgctaatagaatatgtagtagagggggtggggaggtaaattcctctgacttgccaaagaaaaagaagggaaccacagtggatatgctagcattttagctgtgcaaagggaggtagtgtgggaaaagtgtttccattctgggaaaagcccaaaccgaatacggtcagcagtcaactccagggtttgggcttgattcctgttgaataatagttttgagcattctttgtggttaaataaattcttaaatctgcctagttttgatgaattcttttgtgaaacttgaaagagaatagacagtatgacatatagaattaatacaaaacagtttaacaaccatttaactgcagtgtaagaaaattggactgtaatcatatcgctactggcatctgttatctagtatgcatttctggtgtgtatctgaaaggaagacattttctaccctagatccaattgcatttatttatcaataagtgccattaaattgaaattatattacattttacactttctcaatgaatgaacaaattagtctgtagaatctagccacctgtttagcctagtcatgtgccttgaacatatatgtgtcccataatctggctcatggtacctgttcttctatccaaacctttcaattcatgctacctgattcatttatttgacatagatcttaggcccacttgaactcttttcttgtttatctagcatagcacaaacgtttttccagtcttctttatcaacactaatgcctcttaattgcatcagtatttcctattggaaaatacatctgttccagaaaaacatttggcattcctgaataatttccaaatgtttttaatccaaagaaaaaggtttaaagcttatttccctttcttatacacacctgaataaaattgatgtgcatgttttagggatcaattacctaactgttccttggtctatttatgtataagaatgctttttaaagcacatgtctcattttaaatgacgcacaaactgaagatgttaataaaatttaagagtaatacaatgaaaaaa

SEQ ID NO: 2695 - DNA, 2310 bp, Homo Sapiens
  NM_005642
acttccgtttttgctgggtaggcgacccggacggagggccggcgaggtgcggggtctggtgatgcgagctgcgcctctcggcaagatttcgcgctgcccatcccgggccctttcatcagtaatcggtagtggatcactctgccaagcggcaggaagaattaaggaaacgacaaggagacgctcggctctctcccgcttggctccttgcggcctcctcttcccttcgctccggcccggtgaaactgaacttataatcgtcactggattgtaagtacccgaggcgaagagagctcgctgagccctgattttttgagtgtctttgttccgggagagtttgtgagttgaaagtatctctgctgggctttctgggccgaaaaccgttccgggggagccgccatttgctttcctgttccctagctagctagctagctctctccgcgttgtccggcagcggcacctagaggttgggacttggcattgcatctgatttaatgaacttaagtctgtgaataagcctttgtgttaacgactggtattcggtcacagcatatttagagaaaagacttggagcttaaataaaaactaaggcaaaatagacgcttagctgctgatctacagagaacttcttgtaattaaaagatttcaattcatagcaaactggtgttttaaactattgcagtagctggaactttttagtgtaaccagcatttattggagaagtgaatcacaaggaaataaagatgagtaaaagcaaagatgatgctcctcacgaactggagagccagtttatcttacgtctgcctccagaatatgcctctactgtgagaagggcagtacagtctggtcatgtcaacctcaaggacagactgacaattgagttacatcctgatgggcgtcatggaatcgtcagagtggaccgtgttccattggcctcaaaattagtagacctgccctgtgttatggaaagcttgaaaaccattgataaaaaaactttttacaagacagctgatatctgtcagatgcttgtatccacagttgatggtgatctctatcctcctgtggaggagccagttgctagcactgatcctaaagcaagcaagaaaaaggataaggacaaagagaaaaagtttatctggaaccacggaattactctgcctctaaagaatgtcaggaagagaaggttccggaagacagcaaagaagaaatatattgaatctccagatgttgaaaaagaagtgaaacgattgctgagtacagatgctgaagctgttagtactcggtgggaaataattgccgaagatgaaacaaaggaggcagaaaatcaaggcctggatatctcttctccaggaatgtctggtcacaggcagggccatgactcattagaacatgatgagcttcgggagatattcaatgacctcagcagcagcagtgaggatgaagatgagacccagcatcaagatgaagaagatataaacatcattgacacggaggaagatctggagagacagctacaggacaagctaaatgaatcagatgaacagcaccaggaaaatgaaggaaccaatcagctggttatgggaattcagaagcagattgacaacatgaaaggcaagctccaagagacccaggacagggcaaaacgacaagaggatctcatcatgaaagtggaaaatctggctctcaagaacagatttcaggctgtactggatgagctcaaacaaaaggaagaccgagaaaaggagcaactcagctctttgcaagaggagctagaatcactcctagagaagtaaaaagaactgatatttaatttcagtcttcagactggtcagcattagaaaattcttggctttattgtactgggtattaagaccttgctcttcctagtccttttaatgctgtgtgttctgttaagttctttcatttgtttgtaattttgtttttcagcaaatttatattgttttgctaggtgttcatcctataagaagcaggattgtataggcagaaaaatgattgtaggaaagttgcaggattagcggaatgtatggttcaaccttaattatagcttcattgcaggactttactgtttctccattttctagaagctgctgttgctgctttgtgatgacgtgagatcaataagaagaacctagtctagagacaatgatgctagtttgcatatgttttcctatgcaataattgttttcccagttattcaaagcagctttctatatgtagagatgcaaattattaagttgtttccaatacaataaataaaagcatctgtttttcactttaaaaaaaaaaaaaaaa

SEQ ID NO: 2696 - DNA, 1129 bp, Homo Sapiens
  NM_005644
cggaagtagtcggggagggccgcgcagtcggaccggctgctgagacgaacgcttcactggggcagtctctgcatatcatggggagatagacgctgctgcctttaattggccttggtcctcacagctccaaaaagaaacaggatctcgataagctctatgagctgaagtccaaagctcggcagattatgaaccagtttggcccctcagccctaatcaacctctccaatttctcatccataaaaccggaaccagccagcacccctccacaaggctccatggccaatagtactgcagtggtaaagataccaggcactcctggggcaggaggtcgtcttagccctgaaaacaatcaggtattgaccaagaagaaattacaggacttagtaagagaagtggatcctaatgagcagttggatgaagatgtggaggagatgctgctgcagattgctgatgattttatcgagagtgtggtgacagcagcctgtcagcttgcgcggcatcgcaagtctagcaccctggaggtgaaagatgtccagctgcatttagagcgccagtggaacatgtggatcccaggatttggctctgaagaaatccgaccctacaaaaaagcttgcaccacagaagctcacaaacagagaatggcattgatccggaaaacaaccaagaaataacacacggaaaggtcagggaatggacagcaatgtatttggagatacttgagctgagaactcagccatctcatccttggatttttttttttaatgctttacagagaagcatatattttttattaacagtgcagcaatatctataatgactgagaggatctgccaaaagaataaagcctcctaccccaacttccggtcccttttccctgccatctcaaagaggagcaatgtatcttccagagaagattttatttgtggtttattatataagtgactgaatatgggacaaagcattatggtctttttgggtaagacagtattagcaggatttgtaaagggttttgtttccttctcccttccccttttccctgtactttgtaatgtcagtgtttatatgaatatgactttcatttgcttttccagaataaagaagttattaatcgaaaaaaaaaaaaaaaaaa

SEQ ID NO: 2697 - DNA, 5130 bp, Homo Sapiens
  NM_005646
atggagtgggtgctcgcggaagcgctgctctcgcagagccgggacccccgggccctgcttggggcgctgtgccaaggggaggcatccgcggagcgcgtggagacgctgcgcttccttctgcagcggctcgaggacgaggaggcgcgcggcagcgggggcgcaggcgcgctcccggaggcggcgcgcgaggtggctgcagggtacctcgtgccactgctgcggagcctgcgcggacgccccgcgggcggcccggaccccagtctgcagcctcgccaccgccggcgcgtgctgagggcggcgggcgcggccctgcgctcgtgcgtccgcctggccgggcgtccgcagctggcggccgcgctggctgaggaggcgctgcgcgatctgctcgccgggtggcgcgcgcctggcgccgaggctgccgtggaagtgctagcagccgtcgggccatgtttgcggccccgcgaggacgggccgctactggagcgcgtggcggggaccgccgtcgccctggcgctgggcgggggcggggacggggatgaggccgggcctgccgaggacgcggcggcgctggtggccgggcgactgctgccagtgctggtccaatgtggcggggcggcgctgcgggccgtgtggggcgggctggccgcgcctggggcgtccctggggtccggccgcgtagaggagaagctgctggtcctgagcgccctggccgagaagctgttgcccgagcccggcggcgaccgcgcccgcggcgcgcgcgaggcgggcccggacgcccggcgctgctggcgcttctggaggacggtgcaggcggggctgggccaggcggacgccctgacgcgcaagcgagcgcgctacctgctgcagagggcggtggaggtgtcggcggagctgggggccgactgcacctgcgggccccaggaaggaaacggcccaagtctgttttggtggtctgagaggaaaaaagatgagcttctaaagttttgggaaaattatattttaattatggagactttagaaggaaatcagatacatgttataaagccagttttaccaaagctaaacaatctgtttgaatatgcggtgtcagaggaaaatggatgttggctctttcacccatcctggcatatgtgtatttataaaagaatgtttgaaagtgaaaacaaaatcctgtccaaagaaggtgttatccattttttggagctgtatgaaacaaagattcttccattttcaccagaattttctgagtttattattggaccattaatggatgcgctttcagagagctctctgtatagcaggtccccaggccagccaataggaagctgttctccattgggactgaaattacagaagtttttagtcacttatatttctcttcttccagaagaaataaagagtagcttcctattgaagtttattcggaagatgacaagtaggcattggtgtgctgttcccattttgtttctatctaaggctttggcaaatgtcccaagacataaggccctgggtatagatgggcttcttgctctcagggatgttattcattgcactatgatcacacatcagattctcctgagaggggcagcccaatgctaccttcttcaaacagctatgaatttgctagatgtggagaaagtgtcactttctgatgtctcaacttttctcatgtctctgagacaagaggaatccttaggacgaggaacttcattgtggacagagctgtgtgactggctacgtgttaatgaaagctattttaagccatcccctacgtgtagctccattggacttcacaagacatctttaaatgcttatgtaaagagcattgttcaagagtatgttaagtcatctgcttgggaaacaggagaaaactgctttatgcctgattggtttgaagccaagcttgtttctctgatggtcttgctggctgtggatgtggaaggaatgaagactcagtatagcggaaagcagagaacagagaatgtattgcggatattcttagaccctcttctggatgtgcttatgaagtttagtaccaatgcctacatgcccttgctgaagactgacagatgcctccagctgctgttgaagctgttgaacacatgcaggttgaaaggttccagtgcccaagatgatgaggtgtctactgttcttcagaactttttcatgtctactacagagagcatttctgaatttattctcagaagacttactatgaatgagctaaatagtgtttcagatctggatcgttgccatttatacctgatggtgttaactgagcttataaatctgcatttgaaggttgggtggaaaaggggtaaccctatctggagagttatttctcttttgaaaaatgcatccattcagcatcttcaagagatggacagtggacaggagccaacagttggaagtcagattcagagagtagtgagcatggctgccttggccatggtgtgtgaggccatagaccagaagcctgagctgcagctggactctctccatgctgggcccctggaaagcttcctttcctctcttcagctcaatcagacgctgcagaagccccacgcagaggagcagagcagttatgctcaccccttggagtgcagcagtgttttggaagaatcgtcatcttcccaaggatggggaaaaatagttgcacaatatattcatgatcaatgggtgtgcctctctttcctgttgaaaaaatatcacacccttataccaaccacagggagtgaaattctggaaccgtttctacctgccgttcagatgccaataaggactttgcagtctgcactagaagccctcacagttctttcttctgatcaagttttaccagtgttccattgcttgaaagtgttggttcccaagcttctgacttcctctgaatcactctgcatagagtcttttgacatggcgtggaaaattatatcttctttaagcaacactcagctgatattctgggctaatttaaaagcttttgttcagtttgtttttgataacaaagttcttaccattgctgccaaaatcaagggccaggcatatttcaaaataaaagagattatgtacaagataattgaaatgtctgctataaagactggagtcttcaatacactgataagttactgctgtcagtcttggatagtgtctgcttcaaatgtgtcccaaggatctttatcaagtgctaaaaattatagcgaacttatccttgaggcttgtatatttggaactgtgtttaggcgtgatcaaagacttgttcaggatgtacagaccttcatagaaaaccttggacatgactgtgcggcaaatattgttatggaaaatactaagagagaagaccattatgtgagaatttgtgctgtcaaattcctgtgtttattagatggctccaatatgtcccacaagttgtttattgaggatcttgcaatcaagctattagataaagatgaattagtgtccaagtccaaaaaacgctactatgtgaattctctacagcacagagtgaaaaaccgagtgtggcagactctgctggtacttttccctagacttgaccagaatttcttgaatggaattattgacaggattttccaggctggtttcaccaacaatcaagcatccataaaatattttatagaatggattattatattgattcttcataaattccctcaatttcttccaaagttctgggattgtttttcttatggtgaagaaaatcttaaaacaagcatttgtacgtttttagcagttttatcacatttagacattattactcaaaatattccagaaaagaaactaattctgaagcaagcccttatagttgtgctgcagtggtgtttcaatcacaattttagtgttcgactgtatgctttagttgctcttaagaaactctggactgtgtgtaaagtgttaagtgttgaagaatttgatgccctgactcctgtgattgaatccagcctccatcaagtggaaagcatgcacggagcagggaatgccaagaagaattggcaacgcattcaggagcatttcttttttgcaacatttcacccactcaaggattattgtctagagaccatattttacatccttccacgcctttcaggccttattgaagatgaatggatcaccattgataaatttaccagattcactgatgttcctttagctgcgggatttcagtggtacctttctcaaactcaacttagtaaactaaaaccaggtgactggtctcagcaagacataggtactaatttggtcgaagcagataaccaagcggagtggaccgacgttcagaagaagattatcccgtggaacagtcgtgtttccgacttagacctggagctcctgtttcaggatcgtgctgccagacttggaaagtcaattagtagactcatcgttgtggcctcgctcatcgacaaaccgaccaatttaggaggactgtgcaggacctgtgaggtatttggggcttcagtgctcgttgttggcagccttcagtgtatcagcgacaaacagtttcagcacctcagtgtctctgcagaacagtggcttcctctagtggaggtaaaaccacctcagctaattgattatctgcagcagaagaaaacagaaggttataccatcattggagtggaacaaactgccaaaagtttagacctaacccaatattgctttcctgagaaatctctgctcttgttgggaaatgaacgtgagggaattccagcaaatctgatccaacagttggacgtttgtgtggaaattcctcaacagggcattatccgctccctgaatgtccatgtgagtggagccctgctgatctgggagtacaccaggcagcagctgctctcgcacggagataccaagccatgatgtgccttccttagtgaactgctgctgctgttcagacttttttaaaaaaaactatttggactaaagaaacagattctgaaatttattgtgataatttgtatttcttttttcttgcaatttaatgccaaaagtttgccatgtgccttaaacatattactatatattttcccctttaataaacactttttgttaaattgtattcttcctttaataaaatattttaagcaattgtggaaataaaacaatggattttttaagagagaa

SEQ ID NO: 2698 - DNA, 668 bp, Homo Sapiens
  NM_005648
cggggacccggctgcggtggctgcgggactgacgagaaactactaaagttcctggggaagcaaagtagaatttcataagaacaaaatggatggagaggagaaaacctatggtggctgtgaaggacctgatgccatgtatgtcaaattgatatcatctgatggccatgaatttattgtaaaaagagaacatgcattaacatcaggcacgataaaagccatgttgagtggcccaggtcagtttgctgagaacgaaaccaatgaggtcaattttagagagataccttcacatgtgctatcgaaagtatgcatgtattttacgtacaaggttcgctacactaacagctccaccgagattcctgaattcccaattgcacctgaaattgcactggaactgctgatggctgcgaacttcttagattgttaaataaaataaattataataaactgttaactcttttcagtatttaatacctgtagttcagttagtaactttttcatatatagcatgttgcctgtatgcagttgaactatataaagttcattgcaaagcagattatcttgtttttttgcatagcaatcaaagttgaaatttgtttgctacatcaacaaattaaggacattttcacaaactgagaaataaacaaatatgccaattaaaaaaaaaaaaa

SEQ ID NO: 2699 - DNA, 2555 bp, Homo Sapiens
  NM_005649
ccggcgcgccgcggggtgagcggcgccgggcctgaggtcgcccagacgccgtcggggcggagccgggtcgcgaggctgcatcccggccggcggttccggagcctcgcggctggggaggcgcggcccgggacgctcgagcttagggagatctgccttctggagactgcgccgtcctcccgggagagccagaaagaggacatggctgctgggcagcgggaagcgaggccccaggtgtcactgacgtttgaggatgtggctgtgctgtttacccgagatgagtggagaaagctggccccttctcagagaaacttgtaccgggatgtgatgctggagaactataggaacctggtctcactggggctcccatttaccaaaccaaaagtgatctccctgttgcagcaaggagaagatccctgggaggtggagaaagacggttctggcgtctcctctctaggatcgaagagcagtcataaaaccacaaagtcaacgcaaacacaagactcttcatttcagggactgatactgaaaagatccaacaggaatgtaccttgggatttgaaattagaaaagccttacatatatgaaggcagattagagaaaaagcaggataaaaagggaagttttcagatagtttcagccacccacaaaaaaatccccactatagaaagaagccataaaaatactgaattgagccaaaacttcagcccaaagtcagtgcttattaggcaacagatacttcccagagaaaaaacaccaccaaaatgtgaaatacaaggaaacagcctcaaacagaattcacaattacttaatcaaccaaaaattacagcagataaacgctataaatgtagtctgtgtgaaaaaaccttcattaacacttcatcccttcgtaaacatgagaaaaaccatagtggagagaaactatttaagtgtaaagaatgttcaaaagcctttagccaaagttcagctcttattcaacatcaaataacgcatactggagagaaaccctacatatgtaaagaatgtgggaaagcctttactctcagtacatccctttataaacatctaagaacccatactgtggagaaatcctacagatgtaaagaatgtggtaaatccttcagccgaaggtcaggcctttttatacatcaaaaaattcatgctgaagaaaacccttgtaagtataatccgggtaggaaggcatctagttgcagcacatccctttctggatgtcaaagaattcattctagaaagaagtcctacttatgtaatgaatgtggcaacacctttaagtctagctcatcccttcgttatcatcagagaattcacactggagagaagccttttaaatgtagtgaatgtgggagagccttcagccagagtgcctctcttattcaacatgaaagaattcacaccggagaaaagccctatagatgcaatgaatgtgggaaaggctttacttctatttcacgacttaatagacaccgaatcattcatactggagagaagttttataattgtaatgaatgtggtaaagccttaagctcccactcaacacttattattcacgagcgaattcatactggagaaaaaccatgtaaatgtaaagtatgtggaaaagccttcagacagagttcagctctcattcaacatcagagaatgcatactggagaaagaccctataaatgtaacgagtgtgggaaaacattcaggtgtaactcatcacttagtaatcaccagagaattcatactggagagaaaccatatcgatgtgaggaatgtgggatatcttttggccaaagttcagctcttattcagcatcgaaggattcatacaggagaaaaaccctttaaatgtaatacatgtggaaaaacttttagacaaagctcatcacgtattgcacatcagagaattcatactggagagaaaccctatgaatgtaatacatgtgggaaacttttcaaccataggtcatcccttactaatcattataaaattcatatcgaagaggacccctagaaagtagatttgtatgtgtgaaagccttaaaccaaagctcatcgaagaatacatccttgagagagatgtaataaatgtaatggatgtgaaaaaaactgtaataatttagccctcattaggtatttaattccatggataaacctcagctatataatagatatgaggaaagtgtttgtgcctgtcagacacttaaaaaaataacctgagatgaagaatttacaattgaagacattgactttagccatttgtgaaatgggtttgctttttcccttttcctacagacgtatatgctagatgtcacgtgatcatcagaaacagatatccgagtgggtggggaggtgtgctttagatttctcattagaagaccaccaaactggtaatatttttatagcattttaatagcttgatcaaattgtacctttttagagaaaaggaccaaaataaaagaaaaatgaattatgaactacctctcagtctctggggtttgtccttttcctaccctgatgtcaaacttatgcatggatttcattaaaaaagaa

SEQ ID NO: 2700 - DNA, 7407 bp, Homo Sapiens
  NM_005650
gggcctctgattcatctttattccctccatcatctagacttgattttatttgtaccaaggagatgcgtgtctaatgtttttctttcttctatttctaggagggctgttggcctgctgctgtgctgctgaacagtatgcagtcctttcgggagcaaagcagttaccacggaaaccagcaaagctacccacaggaggtacacggctcatcccggctagaagagttcagccctcgtcaggcccagatgttccagaattttggaggtacaggtggcagtagtggcagcagtggcagtggcagtggtggtggacgacgaggagcagcagctgctgcggcagcgatggctagcgagacctctggccatcaaggttaccagggtttcaggaaagaggctggagatttttactacatggcaggcaacaaagaccccgtgactacaggaaccccacagcctcctcagcgaaggccttctgggcctgtgcagagctatggacccccccaggggagcagctttggcaatcagtatgggagtgagggtcatgtgggccagtttcaagcacagcactctggccttggcggtgtgtcacattatcagcaggattacactgggcctttctctccagggagtgctcagtaccaacagcaggcttccagccagcagcagcagcagcaagtccagcagttgagacaacagctttaccagtcccatcagcccctgccacaggccactggccaaccagcatccagctcatcccatctacagccaatgcagcggccctcaactctgccatcctctgctgctggttaccagttaagagtgggtcagtttggccaacactatcagtcttctgcttcctcctcctcctcctcctccttcccttcaccacagcgttttagccagtctggacagagctatgatggcagttacaatgtgaatgctggatctcagtatgaaggacacaatgtgggttctaatgcacaggcttatggaacacaatccaattacagctatcagcctcaatctatgaagaattttgaacaggcaaagattccacaagggacccaacaggggcagcagcagcagcaaccgcagcaacaacaacacccttctcagcatgtgatgcagtatactaacgctgccaccaagctgcccctgcaaagccaagtggggcagtacaaccagcctgaggttcctgtgaggtcccccatgcagtttcaccagaacttcagccccatttctaacccttctccagctgcctctgtggttcagtctccaagctgtagttctaccccatctcctctcatgcagactggggagaatctccagtgtgggcaaggcagtgtgcctatgggttccagaaacagaattttacagttaatgcctcaactcagtccaaccccatcaatgatgcccagtcctaattctcatgctgcaggcttcaaagggtttggactagaaggggtaccagaaaagcgactgacagatcctgggttgagtagtttgagtgctctgagtactcaagtggccaatcttcctaacactgtccagcacatgttactttctgatgccctgactcctcagaagaagacctccaagaggccctcatcttccaagaaagcagatagctgcacaaattctgaaggctcctcacaacctgaagaacagctgaagtcccctatggcagagtcattagatggaggctgctccagcagttcagaggatcaaggcgagagagtgcggcaactaagtggccagagcaccagctctgacaccacctacaagggtggagcctctgagaaagctggctcctcaccggcacaaggtgctcagaatgaaccccccagactcaatgctagtcctgccgcaagagaagaggccacctcaccaggcgctaaggacatgccattgtcatccgacgggaacccaaaggttaatgagaagactgttggggtgattgtctcccgggaagccatgacaggtcgggtagaaaagcctggtggacaagataaaggctcccaagaggatgatcctgcagccactcaaaggccacctagcaatggtggggcaaaggaaaccagtcatgcatcacttccccagccagagcctccaggaggaggagggagcaaaggaaacaagaatggcgataacaactccaaccataatggagaaggaaatggccagagtggccactctgcagcgggccctggttttacgagcagaactgagcctagcaaatctcctggaagtctgcgctatagttacaaagatagtttcgggtcagccgtgccacgaaatgtcagtggctttcctcagtatcctacagggcaagaaaagggagatttcactggccatggggaacgaaagggtagaaatgaaaaattcccaagcctcctgcaggaagtgcttcagggttaccaccaccaccctgacaggagatattctaggagtactcaagagcatcaggggatggctggtagcctagaaggaaccacaaggcccaatgtcttggttagtcaaaccaatgaattagctagcaggggccttctgaacaaaagcattgggtctctattagaaaatccccactggggcccctgggaaaggaaatcaagcagcacagctcctgaaatgaaacagatcaatttgactgactatccaattcccagaaagtttgaaatagagcctcagtcatcagcacatgagcctgggggttccctctctgaaagaagatcagtgatctgtgatatttctccactaagacagattgtcagggacccaggggctcactcactgggacacatgagtgccgacaccagaattgggaggaatgaccgtctcaatccaactttaagtcagtcggtcattcttcctggtggtttggtgtccatggaaaccaagctgaaatcccagagcgggcagataaaagaggaagactttgaacagtctaaatctcaagctagtttcaacaacaagaaatctggagaccactgccatcctcctagcatcaagcatgagtcttaccgcggcaatgccagccctggagcagcaacccatgattccctttcagactatggcccgcaagacagcagacccacgccaatgcggcgggtccctggcagagttggtggtcgggagggcatgaggggtcggtccccttctcaatatcatgactttgcagaaaaattgaaaatgtctcctgggcggagcagaggcccagggggagaccctcatcacatgaatccacacatgaccttttcagagagggctaaccggagttctttacacactcccttttctcccaactcagaaaccctggcctctgcttatcatgcaaatactcgggctcatgcttatggggaccctaacgcaggtttgaattctcagctgcattataagagacagatgtaccaacagcaaccagaggagtataaagactggagcagcggttctgctcagggagtaattgctgcagcacagcacaggcaggaggggccacggaagagtccaaggcagcagcagtttcttgacagagtacggagccctctgaaaaatgacaaagatggtatgatgtatggcccaccagtggggacttaccatgaccccagtgcccaggaggctgggcgctgcctaatgtctagtgatggtctgcctaacaagggcatggaattaaagcatggctcccagaagttacaagaatcctgttgggatctttctcggcaaacttctccagccaaaagcagcggtcctccaggaatgtccagtcaaaaaaggtatgggccgccccatgagactgatggacatggactagctgaggctacacagtcatccaaacctggtagtgttatgctgagacttccaggccaggaggatcattcttctcaaaaccccttaatcatgaggaggcgtgttcgttcttttatctctcccattcccagtaagagacagtcacaagatgtaaagaacagtagcactgaagataaaggtcgcctccttcactcatcaaaagaaggcgctgataaagcattcaattcctatgcccatctttctcacagtcaggatatcaagtctatccctaagagagattcctccaaggaccttccaagtccagatagtagaaactgccctgctgttaccctcacaagccctgctaagaccaaaatactgcccccacggaaaggacggggattgaaattggaagctatagttcagaagattacatccccaaatattaggaggagcgcatcttcgaacagtgcggaggctgggggagacacggttacgcttgatgatatactgtctttgaagagtggtcctcctgaaggtgggagtgttgctgttcaggatgctgacatagagaagagaaaaggtgaggtggcttcggacctagtcagtccagcaaaccaggagttgcacgtagagaaacctcttccaaggtcttcagaagagtggcgtggcagcgtggatgacaaagtgaagacagagacacatgcagaaacagttactgccggaaaggaaccccctggtgccatgacatccacaacctcacagaagcctggtagtaaccaagggagaccagatggttccctgggtggaacagcacctttaatctttccagactcaaagaatgtacctccagtgggcatattggcccctgaggcaaaccccaaggctgaagagaaggagaacgatacagtgacgatttcaccgaagcaagagggtttccctccaaagggatatttcccatcaggaaagaagaaggggagacccattggtagtgtgaataagcaaaagaaacagcagcagccaccgcctccaccccctcagcccccacagataccagaaggttctgcagatggagagccaaagccaaaaaaacagaggcaaaggagggagagaaggaagcctggggcccagccgaggaagcgaaaaaccaaacaagcagttcccattgtggaaccccaagaacctgagatcaaactaaaatatgccacccagccactggataaaactgatgccaagaacaagtctttttacccttacatccatgtagtaaataagtgtgaacttggagccgtttgtacaatcatcaatgctgaggaagaagaacagaccaaattagtgaggggcaggaagggtcagaggtcactgacccctccacctagcagcactgaaagcaaggcgctcccggcctcgtcctttatgctgcagggacctgttgtgacagagtcttcggttatggggcacctggtttgctgtctgtgtggcaagtgggccagttaccggaacatgggtgacctctttggacctttttatccccaagattatgcagccactctcccgaagaatccacctcctaagagggccacagaaatgcagagcaaagttaaggtacggcacaaaagtgcttctaatggctccaagacggacactgaggaggaggaagagcagcagcagcagcagaaggagcagagaagcctggccgcacaccccaggtttaagcggcgccaccgctcggaagactgtggtggaggccctcggtccctgtccagggggctcccttgtaaaaaagcagccactgagggcagcagtgaaaagactgttttggactcgaagccctccgtgcccaccacttcagaaggtggccctgagctggagttacaaatccctgaactacctcttgacagcaatgaattttgggtccatgagggttgtattctctgggccaatggaatctacctggtttgtggcaggctctatggcctgcaggaagcgctggaaatagccagagagatgaaatgttcccactgccaggaggcaggcgccaccttgggctgctacaacaaaggctgctccttccgataccattacccgtgtgccattgatgcagattgtttgctacatgaggagaacttctcggtgaggtgccctaagcacaagcctccccttccgtgccctctcccccccttgcagaacaagaccgcgaaaggcagcctcagcacagagcagtcggagcgggggtgaggggggcagtgtgctcgtgggaatggaaaggacagcaagcacaggtgagactgtggagatgagaaggtggtggacactcgtgatggaatggaaatcgtcctaccgtgcagccacaccctgccctgccccgccccgccccgcccgcgtgcctgcccatgccagcacttccttaagttctcacatcacactcaaaccagtgacaccacaggaaagaaagacccaagacgttggaatggctgtttccatggacacaatctccatagtgacaatgtggggggaggggggaggggtgggatgatggggaaagggtggggggaattaaaagggagggataaatatatatatataaatctatttttagtctggaaagactttgtttaaatgaaaggtgcgctatcccttttgattctgttttaaaattatctcgttaaagatctccaaatttgttccgatgacaagtgaaatttaaatgtgagattgaactgaacaaaccctcatctcatgaaggacggggtgtgtgtgtggcgttgatctttagcctgtctcacaccagttcagaaaacactagacccaggattgaaaaagcaaaccacagcagaaccatccttttgtcattaatttgtctcaaagtgggaaggttttgggggagggggaaatacagggatggtccatgttttcaagagtaggggaatgatgtttaaacacaaaaataaattttttttcatttccagaaacactatttatttatggttttttttttttaattttttctttttgggggtgaaattggcagatgcctgaggtcatagctgtgtcctgggtcactgtggctggtgaggacctcaaggaccccatcaagtgtacacagcagcagcaaaatcaagggatgaccctcctctggggccccctgtcctcagcacattccaggcagctgtgccctgacccacagggacccgtggggatgggaggaggtccaggcctgtgttgccagagctggcagtgtgagctgtaggcagggacggggagggactgtcgctgtgatcagagtgggttaagctgaccaggaacacccatttaacccctttttctttttgctttcatttttataaaggaaaagaggacctgtcagataggcagccccatgctacgtgattctttatgttgtgttgttttgttttgtaaattgtataatttttaaatatctgagttttaaaaaaagaaaaaagtacaaaaaaatcttgttatggccttaagaaggggttagtgcatctttcaggggtcactctgccatggggataaaatagctgtttcacaaacagttttatttaaaaaaacaaaaaacaaaaaaaatcaaaaaatcaaaaaaataataaacttcattttaaccttg

SEQ ID NO: 2701 - DNA, 2979 bp, Homo Sapiens
  NM_005652
atggccgcgggagccgggacggcgggccccgcttccggcccgggcgtcgtgcgtgacccagcggcgtcacagccgaggaagcggcccggccgggagggcggggagggcgcgcggcgatcggacacgatggcgggaggaggcgggagtagcgacggcagcgggcgggcagctggcaggcgggcgtcccgcagtagcgggcgggcccggcgggggcgccacgagccggggctggggggcccggcggagcgcggcgcgggggaggcacggctggaagaggcagtcaatcgctgggtgctcaagttctacttccacgaggcgctgcgggcctttcggggtagccggtacggggacttcagacagatccgggacatcatgcaggctttgcttgtcaggcccttggggaaggagcacaccgtgtcccgattgctgcgggttatgcagtgtctgtcgcggattgaagaaggggaaaatttagactgttcctttgatatggaggctgagctcacaccactggaatcagctatcaatgtgctggagatgattaaaacggaatttacactgacagaagcagtggtcgaatccagtagaaaactggtcaaggaagctgctgtcattatttgtatcaaaaacaaagaatttgaaaaggcttcaaaaattttgaaaaaacatatgtccaaggaccccacaactcagaagctgagaaatgatctcctgaatattattcgagaaaagaacttggcccatcctgttatccagaacttttcatatgagaccttccagcagaagatgctgcgcttcctggagagccacctggatgacgccgagccctacctcctcacgatggccaaaaaggctttgaaatctgagtccgctgcctcaagtacagggaaggaagataaacagccagcaccagggcctgtggaaaagccacccagagaacccgcaaggcagctacggaatcctccaaccaccattggaatgatgactctgaaagcagctttcaagactctgtctggtgcacaggattctgaggcagcctttgcaaaactggaccagaaggatctggttcttcctactcaagctctcccagcatcaccagccctcaaaaacaagagacccagaaaagatgaaaacgaaagttcagccccggctgacggtgagggtggctcggaactgcagcccaagaacaagcgcatgacaataagcagattggtcttggaggaggacagccagagtactgagcccagcgcaggcctcaactcctcccaggaggccgcttcagcgccaccatccaagcccaccgttctcaaccaacccctccctggagagaagaatcccaaagtacccaaaggcaagtggaacagctctaatggggttgaagaaaaggagacttgggtggaagaggatgaactgtttcaagttcaggcagcaccagatgaagacagtacaaccaatataacaaaaaagcagaagtggactgtagaagaaagcgagtgggtcaaggctggagtgcagaaatatggggaaggaaactgggctgccatttctaaaaattacccatttgttaaccgaacagctgtgatgattaaggatcgctggcggaccatgaaaagacttggcatgaactgaaacaggctttcatttccacagaattcacaggagcatggttcctaataatagcccctgatagtctgctctttctttctttttcttttttttttttttttgagacagagtctcgctctgtcacccaggctggagtgcagtggcgtgatctcggctcactgcgacctccgtctcccgggctcacgccattctcctgcctcagcctcccgagtagctgggactacaggcgcccgccatcacgcccggctaatgttttgtatttttagtagagacggggtttcaccgtgttagccaggatggtctcgatctcctgacctcgtgatccacccaactcggcctcccaaagtgctgggattacaggcatgagccaccgcgcctggcatctgctgtttctttcagaagctgggctgggatgagaattttgggcaacctccttcgacgtgggggaggtcccatttccacttcatcactgttggagatcatggagctaagaagcagagccaagtccacccatgtccttggcagagatgacaggcacacagcttgtgcagtgccagaatatcattagcgtttcccttctttagtggtttgcttaaatttaaatccctggtaatctgtagaaccttctcctaggaaatggtgaagtctattaggagccacttgtgactccatgacctgttaaaaccagcaatgtgagtattatttggagtaaatttgttccacgtcaagttctggccttctgatgcaaatgcaaaggaacttagtctgttatgaacccaggttgatgacagaccagtccttgtggaataagattccctttaaaaactctttagccagtcgtgacatcaaccctagacctgtctgccttggcatttgctgtcaacatctgctgggctatgtaggcaggttaatcctccacttctcatgtggttgaaccagtgtgttttttggtaaaatggtgattgtagataagattagttccctgatcccctgccccctgtcccctgcctcttttcccaattcccttccttatgctggacttttaaagcttaaaaaaaatccgattgaatataaatgcctaatttcattctttgtgaaatggttgcttcctcctgattccctaattgtgctgtgttcgtgtcttgcactggaattcaacattcccttctccttttgtactgtgttgtgcttgctgtctctcccggacacccttaaagactgtctttttagcaaaaaatttcagtaaagtgttttctgtaatctttttttaaaaggtgagaactaattattgtccatacttgtagcattcttcattaaagtcttgcttctctcaactgtaaaaaaaaaaaaaaa

SEQ ID NO: 2702 - DNA, 3715 bp, Homo Sapiens
  NM_005653
gacgtcatgttcgccgggcaggcgaggaaagaggacgccatgattggttggcgctggggcggcggacggtggaagggcctggcgagtctaggttttacgcctgtgctggactttctccttccatgtttccaggccgtggggggctacagagggcgagaagtcggctcagcggaaacctggatttggttctaagccgtggggttgagaaggggtgaccggaagtgatcgtgggactgaccggaagcgaggcctggaggggaaagagagagcgagacctgggagggagggggcctccagcagaaaggggcgggggaaaaggtgcaaaagcagcgtgggagcgccgggctggcttcctgcggctgctgctggtctgactgggaagcagcaagccaccactacgaactctcaagaggagtgggagtgcgggagtccagagctgcctctgggaagtctgcagtagttgagcaaaggggtcctcacgttcctgagagctgggcaggggggattttggaacctggggcagccaagaacgagcagccaagggtacgggagattagttgtgcacagagcagtgctggtcgggcttgggggtggctggtgggcactgcgtgggaaaccttggtttgtagttttcttggtttgcgttactcctgttgggtagaattaccctccgcgcctttgtacaagacacggtgtctcctggggcaaggaaggagccaggatggcctgggctctgaagctgcctctggccgacgaagtgattgaatccgggttggtgcaggactttgatgctagcctgtccgggatcggccaggaactgggtgctggtgcctatagcatgagtgatgtccttgcattgcccatttttaagcaagaagagtcgagtttgcctcctgataatgagaataaaatcctgccttttcaatatgtgctttgtgctgctacctctccagcagtgaaactccatgatgaaaccctaacgtatctcaatcaaggacagtcttatgaaattcgaatgctagacaataggaaacttggagaacttccagaaattaatggcaaattggtgaagagtatattccgtgtggtgttccatgacagaaggcttcagtacactgagcatcagcagctagagggctggaggtggaaccgacctggagacagaattcttgacatagatatcccgatgtctgtgggtataatcgatcctagggctaatccaactcaactaaatacagtggagttcctgtgggaccctgcaaagaggacatctgtgtttattcaggtgcactgtattagcacagagttcactatgaggaaacatggtggagaaaagggggtgccattccgagtacaaatagataccttcaaggagaatgaaaacggggaatatactgagcacttacactcggccagctgccagatcaaagttttcaagcccaaaggtgcagacagaaagcaaaaaacggatagggaaaaaatggagaaacgaacacctcatgaaaaggagaaatatcagccttcctatgagacaaccatactcacagagtgttctccatggcccgagatcacgtatgtcaataactccccatcacctggcttcaacagttcccatagcagtttttctcttggggaaggaaatggttcaccaaaccaccagccagagccaccccctccagtcacagataacctcttaccaacaaccacacctcaggaagctcagcagtggttgcatcgaaatcgtttttctacattcacaaggcttttcacaaacttctcaggggcagatttattgaaattaactagagatgatgtgatccaaatctgtggccctgcagatggaatcagactttttaatgcattaaaaggccggatggtgcgtccaaggttaaccatttatgtttgtcaggaatcactgcagttgagggagcagcaacaacagcagcagcaacagcagcagaagcatgaggatggagactcaaatggtactttcttcgtttaccatgctatctatctagaagaactaacagctgttgaattgacagaaaaaattgctcagcttttcagcatttccccttgccagatcagccagatttacaagcaggggccaacaggaattcatgtgctcatcagtgatgagatgatacagaactttcaggaagaagcatgttttattctggacacaatgaaagcagaaaccaatgatagctatcatatcatactgaagtaggagtgcggcgtttcgtgcccagtggctgctccttccttcacctctgaaaacggccctcttgaagggggatatgaatggagatttgaaggtctgcaagaacctgactcgtctgactgtgtgtggaggagtccaggccatggaggcagaatcctggccctctgtgttggcccaagctcttgtggtacacacagattactgcccaatatgcagttctgcagctgttttagttaaatttctggaccttgttgttgttaaatatcagtagaaactctacataatttagagtgtatgtagggcataatgatgatgggaattgtgtgatgtttaacaggaagatcttaaattttgtgatatggagccctgtaatttttttcttatataaaaatgggtatctatattcataagactaggtcttcaatctctttgtactggtctcaaatgtactggtatctctgctttttgccacagtttgtccctgaaaactttatcagtgaggagaaatacagaattttccttttggttcccctgtaataccacaactaatagtattttcagctaacatttattgaccaggcagtgtgataaattttttgaatgaccatcttgtttaaccccctaatcacactatctgaagtaggtgctatagtgacccccaaccgaagatgaggaaatggagacacacagtggctaagtagcttgctaggtgccaggagctggcaggcagtgatgctgaaatccaaaccaggcaatctggccctccttattcaccctctcataccaccagtgctacccattataacctgtgttcacttcgcttattactgtggcccttctggtgactacaacataacactgagtatgaactgaggaattaaccactgaaagagacaaagcacacctaaataatgatgaacaaatcaagacctacaagaaatgaacacatagatgctttttaagtgtcattagttatcggaatcaaagaatttgaggtggtgacaactggggattatctgtaactccccaaatttactgttcttgaatgacattctcaaactatttattaatgagttagtctcatccctgctttctgtttcctctctctgcatcttctcttggcataggaagttattttactcatgctatgttttttaatagaagctttacaaaaaaagatgcattcccttcctgttcacactcttaccatgtttttgttcttccttaagaatgattgtgtgtgtgtgtgtgtgtgtgtgtaagtgtgtaagtgtaacatcatgggttttctttcttcacttgtaaagttttatctagaaatacttttacaggttatgttgaggtacacaaagataatgttctaagattgtgtattggatttggatttgtgtgtgtgtgtgtgtgtgtgtgtgtttaaagcatttgataaggtttaaatgttttttatacagagatttttgttcattaaactcaatctgcatcatggtctaa

SEQ ID NO: 2703 - DNA, 6236 bp, Homo Sapiens
  NM_005657
gttttttgtcactgcctgcctgggtcctgcccgaggtctccatcctcggtttccctgtccttgccccgggccctgggagtgctctggaaggctgcgcagtattggaggggacagaatgaccttccggccttgagtccctggggagcagatggaccctactggaagtcagttggattcagatttctctcagcaagatactccttgcctgataattgaagattctcagcctgaaagccaggttctagaggatgattctggttctcacttcagtatgctatctcgacaccttcctaatctccagacgcacaaagaaaatcctgtgttggatgttgtgtccaatcctgaacaaacagctggagaagaacgaggagacggtaatagtgggttcaatgaacatttgaaagaaaacaaggttgcagaccctgtggattcttctaacttggacacatgtggttccatcagtcaggtcattgagcagttacctcagccaaacaggacaagcagtgttctgggaatgtcagtggaatctgctcctgctgtggaggaagagaagggagaagagttggaacagaaggagaaagagaaggaagaagatacttcaggcaatactacacattcccttggtgctgaagatactgcctcatcacagttgggttttggggttctggaactctcccagagccaggatgttgaggaaaatactgtgccatatgaagtggacaaagagcagctacaatcagtaaccaccaactctggttataccaggctgtctgatgtggatgctaatactgcaattaagcatgaagaacagtccaacgaagatatccccatagcagaacagtccagcaaggacatccctgtgacagcacagcccagtaaggatgtacatgttgtaaaagagcaaaatccaccacctgcaaggtcagaggacatgccttttagccccaaagcatctgttgctgctatggaagcaaaagaacagttgtctgcacaagaacttatggaaagtggactgcagattcagaagtcaccagagcctgaggttttgtcaactcaggaagacttgtttgaccagagcaataaaacagtatcttctgatggttgctctactccttcaagggaggaaggtgggtgttctttggcttccactcctgccaccactctgcatctcctgcagctctctggtcagaggtcccttgttcaggacagtctttccacgaattcttcagatcttgttgctccttctcctgatgctttccgatctactccttttatcgttcctagcagtcccacagagcaagaagggagacaagataagccaatggacacgtcagtgttatctgaagaaggaggagagccttttcagaagaaacttcaaagtggtgaaccagtggagttagaaaacccccctctcctgcctgagtccactgtatcaccacaagcctcaacaccaatatctcagagcacaccagtcttccctcctgggtcacttcctatcccatcccagcctcagttttctcatgacatttttattccttccccaagtctggaagaacaatcaaatgatgggaagaaagatggagatatgcatagttcatctttgacagttgagtgttctaaaacttcagagattgaaccaaagaattcccctgaggatcttgggctatctttgacaggggattcttgcaagttgatgctttctacaagtgaatatagtcagtccccaaagatggagagcttgagttctcacagaattgatgaagatggagaaaacacacagattgaggatacggaacccatgtctccagttctcaattctaaatttgttcctgctgaaaatgatagtatcctgatgaatccagcacaggatggtgaagtacaactgagtcagaatgatgacaaaacaaagggagatgatacagacaccagggatgacattagtattttagccactggttgcaagggcagagaagaaacggtagcagaagatgtttgtattgatctcacttgtgattcggggagtcaggcagttccgtcaccagctactcgatctgaggcactttctagtgtgttagatcaggaggaagctatggaaattaaagaacaccatccagaggaggggtcttcagggtctgaggtggaagaaatccctgagacaccttgtgaaagtcaaggagaggaactcaaagaagaaaatatggagagtgttccgttgcacctttctctgactgaaactcagtcccaagggttgtgtcttcaaaaggaaatgccaaaaaaagaatgctcagaagctatggaagttgaaaccagtgtgattagtattgattcccctcaaaagttggcaatacttgaccaagaattggaacataaggaacaggaagcttgggaagaagctacttcagaggactccagtgttgtcattgtagatgtgaaagagccatctcccagagttgatgtttcttgtgaacctttggagggagtggagaagtgctcagattcccagtcatgggaggatattgctccagaaatagaaccatgtgctgagaatagattagacaccaaggaagaaaagagtgtagaatatgaaggagatctgaaatcagggactgcagaaacagaacctgtagagcaagattcttcacagccttccttacctttagtgagagcagatgatcctttaagacttgaccaggagttgcagcagccccaaactcaggagaaaacaagtaattcattaacagaagactcaaaaatggctaatgcaaagcagctaagctcagatgcagaggcccagaagctggggaagccctctgcccatgcctcacaaagcttctgtgaaagttctagtgaaaccccatttcatttcactttgcctaaagaaggtgatatcatcccaccattgactggtgcaaccccacctcttattgggcacctaaaattggagcccaagagacacagtactcctattggtattagcaactatccagaaagcaccatagcaaccagtgatgtcatgtctgaaagcatggtggagacccatgatcccatacttgggagtggaaaaggggattctggggctgccccagacgtggatgataaattatgtctaagaatgaaactggttagtcctgagactgaggcgagtgaagagtctttgcagttcaacctggaaaagcctgcaactggtgaaagaaaaaatggatctactgctgttgctgagtctgttgccagtccccagaagaccatgtctgtgttgagctgtatctgtgaagccaggcaagagaatgaggctcgaagtgaggatccccccaccacacccatcagggggaacttgctccactttccaagttctcaaggagaagaggagaaagaaaaattggagggtgaccatacaatcaggcagagtcaacagcctatgaagcccattagtcctgtcaaggaccctgtttctcctgcttcccagaagatggtcatacaagggccatccagtcctcaaggagaggcaatggtgacagatgtgctagaagaccagaaagaaggacggagtactaataaggaaaatcctagtaaggccttgattgaaaggcccagccaaaataacataggaatccaaaccatggagtgttccttgagggtcccagaaactgtttcagcagcaacccagactataaagaatgtgtgtgagcaggggaccagtacagtggaccagaactttggaaagcaagatgccacagttcagactgagagggggagtggtgagaaaccagtcagtgctcctggggatgatacagagtcgctccatagccagggagaagaagagtttgatatgcctcagcctccacatggccatgtcttacatcgtcacatgagaacaatccgggaagtacgcacacttgtcactcgtgtcattacagatgtgtattatgtggatggaacagaagtagaaagaaaagtaactgaggagactgaagagccaattgtagagtgtcaggagtgtgaaactgaagtttccccttcacagactgggggctcctcaggtgacctgggggatatcagctccttctcctccaaggcatccagcttacaccgcacatcaagtgggacaagtctctcagctatgcacagcagtggaagctcagggaaaggagccggaccactcagagggaaaaccagcgggacagaacccgcagattttgccttacccagctcccgaggaggcccaggaaaactgagtcctagaaaaggggtcagtcagacagggacgccagtgtgtgaggaggatggtgatgcaggccttggcatcagacagggagggaaggctccagtcacgcctcgtgggcgtgggcgaaggggccgcccaccttctcggaccactggaaccagagaaacagctgtgcctggccccttgggcatagaggacatttcacctaacttgtcaccagatgataaatccttcagccgtgtcgtgccccgagtgccagactccaccagacgaacagatgtgggtgctggtgctttgcgtcgtagtgactctccagaaattcctttccaggctgctgctggcccttctgatggcttagatgcctcctctccaggaaatagctttgtagggctccgtgttgtagccaagtggtcatccaatggctacttttactctgggaaaatcacacgagatgtcggagctgggaagtataaattgctctttgatgatgggtacgaatgtgatgtgttgggcaaagacattctgttatgtgaccccatcccgctggacactgaagtgacggccctctcggaggatgagtatttcagtgcaggagtggtgaaaggacataggaaggagtctggggaactgtactacagcattgaaaaagaaggccaaagaaagtggtataagcgaatggctgtcatcctgtccttggagcaaggaaacagactgagagagcagtatgggcttggcccctatgaagcagtaacacctcttacaaaggcagcagatatcagcttagacaatttggtggaagggaagcggaaacggcgcagtaacgtcagctccccagccacccctactgcctccagtagcagcagcacaacccctacccgaaagatcacagaaagtcctcgtgcctccatgggagttctctcaggcaaaagaaaacttatcacttctgaagaggaacggtcccctgccaagcgaggtcgcaagtctgccacagtaaaacctggtgcagtaggggcaggagagtttgtgagcccctgtgagagtggagacaacaccggtgaaccctctgccctggaagagcagagagggcctttgcctctcaacaagaccttgtttctgggctacgcatttctccttaccatggccacaaccagtgacaagttggccagccgctccaaactgccagatggtcctacaggaagcagtgaagaagaggaggaatttttggaaattcctcctttcaacaagcagtatacagaatcccagcttcgagcaggagctggctatatccttgaagatttcaatgaagcccagtgtaacacagcttaccagtgtcttctaattgcggatcagcattgtcgaacccggaagtacttcctgtgccttgccagtgggattccttgtgtgtctcatgtctgggtccatgatagttgccatgccaaccagctccagaactaccgtaattatctgttgccagctgggtacagccttgaggagcaaagaattctggactggcaaccccgtgaaaatcctttccagaatctgaaggtactcttggtatcagaccaacagcagaacttcctggagctctggtctgagatcctcatgactggtggtgcagcctctgtgaagcagcaccattcaagtgcccataacaaagatattgctttaggggtatttgatgtggtggtgacggacccctcatgcccagcctcggtgctgaagtgtgctgaagcattgcagctgcctgtggtgtcacaagagtgggtgatccagtgcctcattgttggggagagaattggattcaagcagcatccaaaatataaacacgattatgtttctcactaaagatacttggtcttactggttttattccctgctatcgtggagattgtgttttaaccaggttttaaatgtgtcttgtgtgtaactggattccttgcatggatcttgtatatagttttatttgctgaacttttatgataaaataaatgttgaatctctttggttgtagtaa

SEQ ID NO: 2704 - DNA, 4450 bp, Homo Sapiens
  NM_005658
gtaaagtggtggcacctgaccggagcatgtagccacctatgacttcctgagtggggtggtgtggggagggccctgaggagtctgtggtcctaggccttggatttcatcagggctttcctgctccttctggttgcctcagtcccaggcaagatagggtcccagaatcttacagcccagaggccacctgttgcaacttcttttttacagatggagtcatcagaacccactgtgaggaagtgacttctccttgaggtcacccagacactccaaacagagcagagcaaaagcgcctagaacttgaaattttggacctgtctccaacaccctggggatttccaccaggaagccttcagtcaccatccaggggatttttatcgccacaaagggtaattcctgctccatccctgctgtgactcagctgtgacgttgaaccacacaagccagagagaagaagataaagtcatcagagctcctactcaccagagagtgaggcccaggccaggactccacaaggctggtcccctgccctggagcaacttaaacaggccctctggccagcctggaaccctgagatggcctccagctcaggcagcagtcctcgcccggcccctgatgagaatgagtttccctttgggtgccctcccaccgtctgccaggacccaaaggagcccagggctctctgctgtgcaggctgtctctctgagaacccgaggaatggcgaggatcagatctgccccaaatgcagaggggaagacctccagtctataagcccaggaagccgtcttcgaactcaggagaaggctcaccccgaggtggctgaggctggaattgggtgcccctttgcaggtgtcggctgctccttcaagggaagcccacagtctgtgcaagagcatgaggtcacctcccagacctcccacctaaacctgctgttggggttcatgaaacagtggaaggcccggctgggctgtggcctggagtctgggcccatggccctggagcagaacctgtcagacctgcagctgcaggcagccgtggaagtggcgggggacctggaggtcgattgctaccgggcaccctgctccgagagccaggaggagctggccctgcagcacttcatgaaggagaagcttctggctgagctggaggggaagctgcgtgtgtttgagaacattgttgctgtcctcaacaaggaggtggaggcctcccacctggccctggccacctctatccaccagagccagctggaccgtgagcgcatcctgagcttggagcagagggtggtggagcttcagcagaccctggcccagaaagaccaggccctgggcaagctggagcagagcttgcgcctcatggaggaggcctccttcgatggcactttcctgtggaagatcaccaatgtcaccaggcggtgccatgagtcggcctgtggcaggaccgtcagcctcttctccccagccttctacactgccaagtatggctacaagttgtgcctgcggctgtacctgaatggagatggcactggaaagagaacccatctgtcgctcttcatcgtgatcatgagaggggagtatgatgcgctgctgccgtggcccttccggaacaaggtcaccttcatgctgctggaccagaacaaccgtgagcacgccattgacgccttccggcctgacctaagctcagcgtccttccagaggccccagagtgaaaccaacgtggccagtggatgcccactcttcttccccctcagcaaactgcagtcacccaagcacgcctacgtgaaggacgacacaatgttcctcaagtgcattgtggagaccagcacttagggtgggcggggctcctgagggagctccaactcagaagggagctagccagaggactgtgatgccctgcccttggcacccaagacctcagggcacaaagatgggtgaaggctggcatgatccaagcaagactgaggggtcgacttcgggctggccatctggttaggatggcaggacgtgggctgggcccacaaaggcaaagggtccagaaggagacaggcagagctgctcccctctgcacggaccatgcgacactgggaggccagtgagccactccggccccgaatgttgaggtggactctcaccaaatgagaagaaaatggaaccaggcttggaaccgtaggacccaagcagagaagctctcgggctaggaagatctctgcagggccgccagggagacctggacacaggcctgctctctttttctccagggtcagaaacaggaccgggtggaagggatggggtgccagtttgaatgcagtctgtccaggctcgtcattggaggtgaacaagcaaacccagacggctccactaggacttcaaattgggggttggatttgaagacttttaagtttccttccagcccagaaagtctctcattctaggcctcctggcccaggtgagtcctagagctacaggggttctggaaacattcaggagcttcctgtcctcccagctcctcactcaccttcagtaacccccactggactgacctggtccacagggcacctgccaccctgggcctggcagctcagcttccccaacacgcaggagcacacccagcccccacatcctgtgcctccatcagctaaacaccacgtcacttcatgcaggtgaaacccagtcactgtgagctcccaggtgcagccagaggcacctcaagaagaagaggggcataaactttcctcttcctgcctagaggccccacctttggtgctttccagaatcccgtaacacctgattaactgaggcatccacttctttcagcagactgatcaggacctccaagccactgagcaatgtataaccccaaagaaataatttttagaatctctttcgaagttttcctaaagtgtatggtttgggagttgtttgtactgagccaggtttgaaaaggccattgctgagtttgaggtggtgccaccagttttgcaggtggcatcagaggctggcatgctggcaggaacatcccctcttagccccagtcttctcttttctataatgagacccaccccagcttgcctccctccctggcttctctgaccctcaaaggagatgccacgcaggacagactggagagagaagcctgggcaatactgcccgcctgtcatggcctggtggtggcccacacctatcttctcaccttggaggccacacccaactttccaaagaccctgagacaagtcaggaccctactactctcccctgctgctttcctgacagcttactcttcctccacctgctgagcctgtgccagactccattgctcaaatcgttagggttgcttctataaaaatgggtcagtagcccttcctgttctctccagcccagcatacaggaggatcaaaggaggtgacggagcatcgtggcacggcagtctcaatgggtcagaaacccaggccagctgggctctaagcctggcatcctgtcatgcttagtccttcagctgaagatcagaggaagcctctcccttgccctctccagctctaggggttttcaggaggcccaactgcaataatggagcactagtgcttttatgtgcaatggtgtcgtccatgcacgacagcagcaaacattctggggctgctttttattgttcccacggctgacagcgtggcagcggagactgtggaggcagtggagactgacttcttcctgctgacagctggatgtcacacatgaaggtctggcctagcgagtgatgggtctaggccctgaaactgatgtcctagcaataacctcttgatccctactcaccgagtgttgagcccaaggggggatttgtagaacaagcccccatgagaaacagctgttactctacacttttgattgcctatttctgatggcaagagatacatactctcttcaaagagcatgagatgcagccattctttcagcaaagcttcattgacacctgcacctgttaactgtgttcgacattgaagggagaaaggcaagatgtgcactctggactcaagaaactcttagttcagtggaggaaatgagcagataagtagatcattatgattgagagtaggagaagcttagagaaagcacagaatcccagatccagctggtgaaggagggaaggcttcaggcctttaagctcagcctgagaatattgtgaaatgcagaggatggggaaaagggaagagtaccgacttgaaaacggagagctgtcttggctgagggcagggtctgtgtggcaggatgggggagggagtcagaagggtcagatgaactggagtgtagacagcatcagatgcagcagtgcccaccgcccccccccccaccccccgccctgcccacagagcacctgctggtaaccctgggcctattgaaagcaggatgagatgataatttaagacactgaatgatttcttttccaacaaagctctatgttaagtgca

SEQ ID NO: 2705 - DNA, 2466 bp, Homo Sapiens
  NM_005663
atgttttacggaagccgatagtccttgctcagcggcaccccgtccttccggctctcggctttgccacaaagcttcccgaagacgcggccgctacccggagacgcggtcgccacccagaagcgctctcccgggaagccccgctcgtgggaccgcgccacctgcgccgcctctgcggcccgcagcccgacgggcgccgccatgttggggtcctagcgagggacgcgtaggtgtcttcataagatgccggggcagcggcgcgcgctttcccccaagatggcgtccatgcgggagagcgacacgggcctgtggctgcacaacaagctgggggccacggacgagctgtgggcgccgcccagcatcgcgtccctgctcacggccgcggtcatcgacaacatccgtctctgcttccatggcctctcgtcggcagtgaagctcaagttgctactcgggacgctgcacctcccgcgccgcacggtggacgagatgaagggcgccctaatggagatcatccagctcgccagcctcgactcggacccctgggtgctcatggtcgccgacatcttgaagtcctttccggacacaggctcgcttaacctggagctggaggagcagaatcccaacgttcaggatattttgggagaacttagagaaaaggtgggtgagtgtgaagcgtctgccatgctgccactggagtgccagtacttgaacaaaaacgccctgacgaccctcgcgggacccctcactcccccggtgaagcattttcagttaaagcggaaacccaagagcgccacgctgcgggcggagctgctgcagaagtccacggagaccgcccagcagttgaagcggagcgccggggtgcccttccacgccaagggccgggggctgctgcggaagatggacaccaccaccccactcaaaggcatcccgaagcaggcgcccttcagaagccccacggcgcccagcgtcttcagccccacagggaaccggacccccatcccgccttccaggacgctgctgcggaaggaacgaggtgtgaagctgctggacatctctgagctggatatggttggcgctggccgagaggcgaagcggagaaggaagactctcgatgcggaggtggtggagaagccggccaaggaggaaacggtggtggagaacgccaccccggactacgcagccggcctggtgtccacgcagaaacttgggtccctgaacaatgagcctgcgctgccctccacgagctaccttccctccacgcccagcgtggttcccgcctcctcctacatccccagctccgagacgcccccagccccatcttcccgggaagccagccgcccaccagaggagcccagcgccccgagccccacgttgccagcgcagttcaagcagcgggcgcccatgtacaacagcggcctgagccctgccacacccacgcctgcggcgcccacctcgcctctgacacccaccacacctccggctgtcgcccctaccactcagacacccccggttgccatggtggccccgcagacccaggcccctgctcagcagcagcctaagaagaacctgtccctcacgagagagcagatgttcgctgcccaggagatgttcaagacggccaacaaagtcacgcggcccgagaaggccctcatcctgggcttcatggccggctcccgagagaacccgtgccaggagcagggggacgtgatccagatcaagctgagcgagcacacggaggacctgcccaaggcggacggccagggtagcacaaccatgctggtggacacagtgtttgagatgaactatgccacgggccagtggacgcgcttcaagaagtacaagcccatgaccaatgtgtcctagaaccacctgcctcacagctggccgtcacttgtgggggtccacgggacgatggctttgccagcttaaagtaaccggatggcggacacctggcccccgaggtcccccggccgccgccctgctgctgacccagcctgttttaagttctggatgcatttctctggggtatttggggcttatttttaaaattttaatatgggttcttttttgtgtgatttaagacactttttggactcaacgttacatttttgaatgtagtaagtaaattaaccaaaaaagttacaacttcctaattttagtgacagctctgcctgttagactcttactttttaaaatcttttctattttccctcgctggggcagtgccctcctacccccagggttgaggggaccaaggtggcacggtggtactgggggtgcggcagggacacccgaccacaccagagcgtgggagacggtgggccttgtcccctgcctgtgcctgcctgggagttttgtattcatcttttgtatagttgtggacatttaagacagtctttgggtacctattttcattgtaaaactatctgaaccattaaagtcgagcttttctaaagaaagccaccaaaa

SEQ ID NO: 2706 - DNA, 1245 bp, Homo Sapiens
  NM_005675
cgcgaggcgcgccgcgatcggggactgtcctaagacgggcggggcgcgctgcgctagggactgtcataaaaggggcgggacgcgccgcggtcgggatgacgtgagctgggggcgctcgtcgctgcagccggcggctagcgggcgtccgcgccatggagcgctacgcgggcgccttggaggaggtggcggacggtgcccggcagcaggagcgacactaccagctgctgtcggcgttacagagcctggtgaaggagttgcccagctcattccagcagcgcttgtcctacaccacgctgagcgacctggccctggcgcttctcgacggcaccgtgttcgaaatcgtgcaggggctactggagatccagcacctcaccgaaaagagcctgtacaaccagcgcctgcgcctacagaacgagcatcgagtgctcaggcaggcgctgcggcagaagcaccaggaagcccagcaggcctgccggccccataacctgcctgtgcttcaggcggctcagcagcgagaactagaggcggtggagcaccggatccgtgaggagcagcgggcgatggaccagaagatcgtcctggagctggaccggaaggtggctgaccagcagagcacactggagaaggcgggggtggctggcttctacgtgaccaccaacccacaggagctgatgctgcagatgaacctgctggaactcatccggaagctgcagcagaggggctgctgggcagggaaggcagccctggggctaggaggtccctggcagttgcctgctgcccagtgtgaccagaaaggcagccctgtcccaccatagccacaggcagcagaagtctgggcagagttcatcttcttgacctttggccactgccttcccagctgcccgcagggggttccccctgctgaggagagaccaggtggaccccagctgcctgtcacccttcatctgggacttgctgtcaaaccctaggatagtctcataaaggggaggctgggccagcctgctgctgtctgcttcagggccaggcagagagtgaggctgggggttctcacaccttactccaccgggcacatcccaacctgcactggggcccactcgagcgcttgttctggtctcagccgctcccttggcagctgcagcccccatgcagaagaggctcccaggcccaagctctgtgtgacccagagaaataaagatgcctcagtgtggcccgcaaaaaaaaaaaaaaaaaaaaaaaaaaaaaaaa

SEQ ID NO: 2707 - DNA, 1326 bp, Homo Sapiens
  NM_005678
cagagtggagcggccgccggagatgcctgacgcatctgtctgaggagcggtcagtgacgcgatggagcgggcaagggatcgcttacacctgagacgaactacagaacagcacgtaccagaggtggaagtccaagtcaaacgcagaaggactgcctcactgagcaaccaagagtgtcagttgtacccgaggcgttctcagcagcagcaagtacctgtggtggatttccaggctgaactgaggcaggcattcttagctgagacaccaagaggtggttaaagccatattggagtagcgaggaatctgattccaagcaaaaaccaggctccatctactctttgaagcttctgcccagcttgcattgtttctaggagaacctgcgtcatacctttatctatagccttcccctaggtcttcagaagcatcaagttttaactgtggacattggatttggtggaacagcaatcatgactgttggcaagagtagcaagatgctgcagcacattgactatagaatgagatgtatcctgcaagatggccgaatcttcattggcacctttaaggcttttgacaagcatatgaatttgatcctctgtgattgtgatgagttcagaaagatcaagccaaagaatgcgaagcaaccagagcgtgaagaaaagcgggttttgggtctggtgttgctgcgtggggagaacttggtatccatgactgtggaggggccaccccccaaagatactggcattgctcgggtaccacttgctggagctgctggaggccctggggttggtagggcagctggtagaggagtaccagctggtgtgccaattccccaggcccctgctggattggcaggccctgtccgaggagttgggggaccatcccagcaggtaatgactccacagggaagaggcactgtagcagctgctgctgttgctgcgactgccagtattgctggagccccaacacagtacccaccaggacggggcactccgcccccacccgtcggcagagcaaccccacctccaggcattatggctcctccacctggtatgagaccacccatgggcccaccaattgggcttccccctgctcgagggacgccaataggcatgccgcctccgggaatgagaccccctccaccaggcattagaggtccacctcccccaggaatgcgtccaccaagaccttagcatactgttgatccatctcagtcactttttcccctgcaatgcgtcttgtgaaattgtgtagagtgtttgtgagctttttgttccctcattctgcattaataatagctaataataaatgcatagagcaattaaactgtg

SEQ ID NO: 2708 - DNA, 2306 bp, Homo Sapiens
  NM_005680
atctcgcgtttccggccggaagcttctccagcctttcccggaagctgcgctcgctacccgggtaacgggtcccggctgtggaagctcccgcggcgccgcgatggacctcgaggaggcggaagagtttaaagaacgctgtactcagtgtgctgctgtctcatggggtcttactgatgaaggcaaatattattgcacttcttgccacaatgttacagagagatatcaggaagttacaaacactgatcttattcctaatacccaaataaaagccctcaaccgggggcttaaaaaaaaaaacaatactgaaaaaggctgggattggtatgtgtgtgaaggtttccagtatattctttatcaacaagcagaagccttaaagaaccttggagtaggcccagagttaaagaacgatgttttacataatttttggaagcgctaccttcagaagagcaagcaggcatattgtaagaacccagtttataccactggaaggaaacctacggtattagaagataatctaagtcattcagactgggctagtgagcctgagctgctaagtgatgtcagctgtcctccttttcttgaaagtggagcggagtctcagtctgacatccacactcgaaaacctttccccgtcagcaaagcatcacaatcagaaacgtctgtctgctctggatctctggatggagttgaatactcacaacgaaaggagaagggaatcgtgaagatgaccatgccacagacacttgccttctgttatctgtccttactttggcagagagaagcaataacactttcagatcttttgaggtttgttgaagaggaccatattccttacataaatgcttttcagcattttccagaacagatgaaattatatggacgtgacagaggaatctttggtatagagtcttggcctgactacgaggacatctataaaaaaacaatagaagttggaacatttttagatttgcctcgttttccagacataactgaagactgctatcttcatcccaacatactgtgtatgaaatacttgatggaagtcaacctccctgatgaaatgcatagcttaacttgccacgtggtaaaaatgactggaatgggagaagtggattttctgacatttgatcctatagctaaaatggcaaaaactgttaagtacgatgtacaagctgtagctatcattgtggtggtattgaaactgctctttctattggatgacagtttcgagtggtctttgtctaatcttgctgaaaagcataatgaaaagaacaaaaaagataagccatggtttgatttcagaaagtggtaccaaattatgaagaaagcttttgatgagaaaaaacaaaaatgggaagaagcaagggccaagtacctgtggaaaagtgaaaagccactctactactcatttgtcgacaaaccagtagcatataaaaaaagagaaatggtggtgaatctacagaaacaatttagcacactggtcgagtcaacagcaactgctggaaaaaaaagcccttcaagttttcagttcaactggactgaagaggacactgatagaacgtgtttccatggacacagccttcagggagtcctgaaagagaaaggccaatcactgctgactaagaattcattatattggcttagtacacagaaattctgcagatgctattgtacacatgtgacaacctatgaagaatcaaattattctctgagttatcagtttatactaaatctcttctccttcctgctcagaataaagacttcccttctccatgaagaagtgagcttagttgagaagaaactttttgagaaaaaatacagtgtaaaaagaaagaaatcaagatccaagaaagtgagacgacattgagaaaatgaaatagaaactttctggaaaaatattttaatagtgataataacatcagattttaatataacattccagagaattgtggaaaatactgcatatatatgtatagactctgacacatatttacatatatatcaagtgtgcttagaaaaatgtatattgtaaagcaggtgagcttcatttgattttatttttcagagtatgaacattctaagagaaagttaaaacaatagcaaattgtataattgtatccagaaatgtatactcatcgtattttaaagctaaatttattttttaaactagatcccttcattattctttatgccccagagtaaatcccagatggatcaaagatctaaacataatctttcatatgtaaaaatataaaagtattagtagaaaacaaatatgaatgctttgatgatcttggaaaaaaaaa

SEQ ID NO: 2709 - DNA, 1931 bp, Homo Sapiens
  NM_005681
acttccggggtcgaggcgaggccaacgatacgcctgctgcagcaggaggagttacgagccgggccgcgcgctgcctaaatacctaaaccaggtttagcgcctgctcatataaagctctcctaactcgtcttccggtgggaatttcttcacgtgggccggagtcggagactgagtttagctttactgaggagctctaaatttaggcgggtatgagtgatttcagtgaagaattaaaagggcctgtgacagatgatgaagaagtggaaacatctgtgctcagtggtgcaggaatgcattttccttggcttcaaacatacgtagaaactgtggccattggagggaaaaggaggaaggattttgctcagacaacaagtgcttgtttaagttttatccaagaagctctgctgaagcaccaatggcagcaagctgcagaatacatgtacagttattttcagaccttggaagattcagatagctacaaaaggcaggctgcacctgagattatttggaagctcggaagtgaaattctattttatcatcccaaaagcaacatggagagtttcaatacttttgctaaccggatgaaaaatattggcgtcatgaattatttaaagatctccttacaacatgcattataccttctgcatcatggaatgcttaaagatgctaagagaaatctgagtgaggcagagacatggagacatggtgaaaatacgtcttcccgggaaatattaatcaaccttattcaggcctataaagggcttttacagtattatacctggtctgaaaagaagatggaattgtcaaagcttgataaggatgattatgcttacaatgcagtagcccaggatgtgttcaaccacagctggaagacatctgcaaatatttctgcattgattaaaattcctggagtttgggacccttttgtgaagagttatgtagaaatgctggaattctatggggatcgagatggagcccaagaggtactcaccaattatgcatatgatgaaaagtttccatcaaatccaaatgcccatatctacttatacaactttctaaagagacagaaggcaccaagatcaaaattgataagtgtgcttaagattttgtatcagattgtaccatctcataaattgatgttggaattccatacattacttagaaaatcagaaaaagaagaacaccgtaaactggggttggaggtattatttggagtcttagattttgccggatgcactaagaatataactgcttggaaatacttggcaaaatatctgaaaaatatcttaatgggaaaccaccttgcgtgggttcaagaagagtggaactccaggaaaaactggtggccaggctttcatttcagctacttttgggcaaaaagtgattggaaggaagatacagctttggcctgtgagaaagcttttgtggctggtttactgttaggaaaaggttgtagatatttccggtatattttaaagcaagatcaccaaatcttagggaagaaaattaagcggatgaagagatctgtgaaaaaatacagtattgtaaatccaagactctgatactgaattttagttatttcacagttgtagctacacagtaagtagcttggtagatagttattgaatgtatttatgtagtgtattaagaagcttatattactacaaaaaacttatttttatatatttttatatttttgtattatttatagctagagaaacaatattactgcctttgctctttgtaactatgtctgttttcttttttgtaatgttaaatgttacatttgttaaggaataattcttcaaatgacaaactaattacagaatatagctctacagcagttattgtttgcaaatactttgcctcttgctattgtgtaataaactgtaacttgtagtgctgtgaaatgtaaaaaaaaaaaaaaaaaa

SEQ ID NO: 2710 - DNA, 4088 bp, Homo Sapiens
  NM_005686
cgcctcgcagcagcgagccgcgagcgcccttctccagtcccggcttggaactgaactgtgtgagcacgggtcctggaacccgggcccagaaccggcgagcccaggtctgagcccagagctcagcggtcagcctcgtaggccctgactcggaatcgagccgaggcgctgaggttggagccggagagcgtgagagccgaagagcagggagggcgggccggctgcgcgtccgacgagtcgcagagcaggaccgcggaaggcagggagacggccgcaagcccagggcagagggcagagggcagagagcggcctggctcggcggagagggcgccgcccggccggaaccaagctcgccgcccgggacggcgggccccgtggggcgcggacccagggtggccgtgggtccgcagcgactccccggccgacggcggggggcgtgccccctcccagcccagcctccccaacccggcccgcccgccgcgtcgcgggggcatgtgagcgggaagcctaggctgccagccgcgaggaccgcacggaggaggagcaggagcgcggagccgcgagccccgagccccgagcccggcgcctggctgagtagatgtccatgaggagccccatctctgcccagctggccctggatggcgttggcaccatggtgaactgcaccatcaagtcagaggagaagaaagagccttgccacgaggccccccagggctcagccactgccgctgaacctcagcctggagacccagcccgggcctcccaggatagtgctgacccccaagctccagcccaggggaatttcaggggctcctgggactgtagctctccagagggtaatgggtccccagaacccaagagaccaggagtgtcggaggctgcctctggaagccaggagaagctggacttcaaccgaaatttgaaagaagtggtgccagccatagagaagctgttgtccagtgactggaaggagaggtttctaggaaggaactctatggaagccaaagatgtcaaagggacccaagagagcctagcagagaaggagctccagcttctggtcatgattcaccagctgtccaccctgcgggaccagctcctgacagcccactcggagcagaagaacatggctgccatgctgtttgagaagcagcagcagcagatggagcttgcccggcagcagcaggagcagattgcaaagcagcagcagcagctgattcagcagcagcataagatcaacctccttcagcagcagatccagcaggttaacatgccttatgtcatgatcccagccttccccccaagccaccaacctctgcctgtcacccctgactcccagctggccttacccattcagcccattccctgcaaaccagtggagtatccgctgcagctgctgcacagcccccctgccccagtggtgaagaggcctggggccatggccacccaccaccccctgcaggagccctcccagcccctgaacctcacagccaagcccaaggcccccgagctgcccaacacctccagctccccaagcctgaagatgagcagctgtgtgccccgcccccccagccatggaggccccacgcgggacctgcagtccagccccccgagcctgcctctgggcttccttggtgaaggggacgctgtcaccaaagccatccaggatgctcggcagctgctgcacagccacagtggggccttggatggctcccccaacacccccttccgtaaggacctcatcagcctggactcatccccagccaaggagcggctggaggacggctgtgtgcacccactggaggaagccatgctgagctgcgacatggatggctcccgccacttccccgagtcccgaaacagcagccacatcaagaggcccatgaacgccttcatggtgtgggccaaggatgagcggaggaagatcctgcaagccttcccagacatgcacaactccagcatcagcaagatccttggatctcgctggaagtccatgaccaaccaggagaagcagccctactatgaggaacaggcgcggctgagccggcagcacctggagaagtatcctgactacaagtacaagccgcggcccaagcgcacctgcatcgtggagggcaagcggctgcgcgtgggagagtacaaggccctgatgaggacccggcgtcaggatgcccgccagagctacgtgatccccccgcaggctggccaggtgcagatgagctcctcagatgtcctgtaccctcgggcagcaggcatgccgctggcacagccactggtggagcactatgtccctcgtagcctggaccccaacatgcctgtgatcgtcaacacctgcagcctcagagaggagggtgagggcacagatgacaggcactcggtggctgatggcgagatgtaccggtacagcgaggacgaggactcggagggcgaagagaagagcgatggggagttggtggtgctcacagactgatcccggctgggtgggcctggccccttctcctctggggaagaccttgtcccaactcgatgggcacagccagccaacctaagactatgttggtacttggacttgttcgtgccccagagatgggcaaagctgtgcacttgcagatacattcatgaggggagaggcgccctcccttcctgaggagctgttggcctgggtgggcaggaactgcagtatggccatgggctgagcaggctgagcacctcagcctttagggcttatggccaggggacactgtatgactctcctctcctgcaggtgtctatccacctggggtatggcatctaccgacctgtctccctggggtcacatgctttgtttccattcttgtcctggctggaccagccactgtgggaccaacacccctcccacactcccccagactgctcgtctatcaccaggatcgctttgtactttgtgcaaaagggtctggctgtcccttgctgttttcatctctgccaagcctattgtgcctctggctgctgtatgtgtgcgcgtgcacgtgtgtgtgtttcatctgttcattcactgcacaagatatttattgagtgcccactacgtgccaggcactgttgctgagttcctgtgggtgtgtctctcgatgccactcctgcttctctgggggcctctttctgtgcttctctttgtccccaaattgctacctctttgtcagtctgggtgtctcaggttctgtgtgtccttgtgtgcatttctgtctctctctgtcctcgtctctctgcaaggccctctatttctctctttcttggtgtctgtcctttgccccctgtgccctctggattctctgggtctatgtaggcccctggtctgccctgggctcatcagccttcctgacctcctcctgccctccccttcactccctccctggctctgccagtcggttcccacggagccatttttagctctgatcagcatgggaatgtgcctcggcctccaaggggctttgtcctggtgcccccgcccctggtcccaacctgatcccacgagggagttgggacaggaggattgatggtgctccccttcctgccagcgtcagaggccctggagaggggctgtccatggcagctggtctttattcctccctcatgagcacagggtcgggggggtccccattcttggaagaggttgagaagactcctgggcttcagcctctcccacccagccctgcccctcacctgcctgccctcccctcccccactctatactagggactggatctcagcctctgatcagtttcacaaagtttgttccctaaggaaatcaaatcccattgtcacctaactctgaagatctaaatagcccttggatcagtatgggaaccccaaatcccacagggccagatgtggagtctgtgtctgcccccgtcttctctccatcctcaaagcccccacttctctccaggctgtttctttttttatgactgtaaacatagatagtgctttattttgttaataataagataatgatgagtaacttaaccagcacatttctcctgtttacactcgggggatttttttgttttctgatgacataataaagacagatcatttcagaaaaaaaaaaaaaaaaa

SEQ ID NO: 2711 - DNA, 2262 bp, Homo Sapiens
  NM_005692
tgagccggccgcacgcggaggatcctaaggagcagctctgttgcgacataggccgagcagcgaggcccagctccctgaaacaacagtaacctacccctgtgggtcatcatcatgccctccgacctggccaagaagaaggcagccaaaaagaaggaggctgccaaagctcgacagcggcccagaaaaggacatgaagaaaatggagatgttgtcacagaaccacaggtggcagagaagaatgaggccaatggcagagagaccacagaagtagatttgctgaccaaggagctagaggactttgagatgaagaaagctgctgctcgagctgtcactggcgtcctggcctctcaccccaacagtactgatgttcacatcatcaacctctcacttacctttcatggtcaagagctgctcagtgacaccaaactggaattaaactcaggccgtcgttatggcctcattggtttaaatggaattggaaagtccatgctgctctctgctattgggaagcgtgaagtgcccatccctgagcacatcgacatctaccatctgactcgagagatgccccctagtgacaagacacccttgcattgtgtgatggaagtcgacacagagcgggccatgctggagaaagaggcagagcggctggctcatgaggatgcggagtgtgagaagctcatggagctctacgagcgcctggaggagctggatgccgacaaggcagagatgagggcctcgcggatcttgcatggactgggtttcacacctgccatgcagcgcaagaagctaaaagacttcagtgggggctggaggatgagggttgcccttgccagagccctctttattcggcccttcatgctgctcctggatgagcctaccaaccacctggacctagatgcttgcgtgtggttggaagaagaactaaaaacttttaagcgcatcttggtcctcgtctcccattcccaggattttctgaatggtgtctgtaccaatatcattcacatgcacaacaagaaactgaagtattatacgggtaattatgatcagtacgtgaagacgcggctagagctggaggagaaccagatgaagaggtttcactgggagcaagatcagattgcacacatgaagaactacattgcgaggtttggtcatggcagtgccaagctggcccggcaggcccagagcaaggagaagacgctacagaaaatgatggcatcaggactgacagagagggtcgtgagcgataagacactgtcattttatttcccaccatgtggcaagatccctccacctgtcattatggtgcaaaatgtgagcttcaagtatacaaaagatgggccttgcatctacaataatctagaatttggaattgaccttgacacacgagtggctctggtagggcccaatggagcagggaagtcaactcttctgaagctgctaactggagagctactacccacagatggcatgatccgaaaacactctcatgtcaagatagggcgttaccatcagcatttacaagagcagctggacttagatctctcacctttggagtacatgatgaagtgctacccagagatcaaggagaaggaagaaatgaggaagatcattgggcgatacggtctcactgggaaacaacaggtgagcccaatccggaacttgtcagacgggcagaagtgccgagtgtgtctggcctggctggcctggcagaacccccacatgctcttcctggatgaacccaccaatcacctggatatcgagaccatcgacgccctggcagatgccatcaatgagtttgagggtggtatgatgctggtcagccatgacttcagactcattcagcaggttgcacaggaaatttgggtctgtgagaagcagacaatcaccaagtggcctggagacatcctggcttacaaggagcacctcaagtccaagctggtggatgaggagccccagctcaccaagaggacccacaacgtgtgcaccctgacattggcatctctgccaaggccatgagcatcatgaactcgtttgtaaacgacgtgtttgagcagctggcgtgtgaggctgcccggctggcccagtactcgggccggaccaccctgacatcccgagaagtccagacggctgtgcgtctgctgctgcctggggagctggccaagcacgctgtgtctgagggcaccaaggctgtcaccaagtacaccagctccaagtgacccagggcctgacaaaaataaagggtgaactgttaaaaaaaaaaaa

SEQ ID NO: 2712 - DNA, 1720 bp, Homo Sapiens
  NM_005693
agtccctcccctcagcctttccccaaattgctacttctctggggctccaggtcctgcttgtgctcagctccagctcactggctggccaccgagacttctggacaggaaactgcaccatcctcttctcccagcaagggggctccagagactgcccacccaggaagtctggtggcctggggatttggacagtgccttggtaatgaccagggctccaggaagagatgtccttgtggctgggggcccctgtgcctgacattcctcctgactctgcggtggagctgtggaagccaggcgcacaggatgcaagcagccaggcccagggaggcagcagctgcatcctcagagaggaagccaggatgccccactctgctgggggtactgcaggggtggggctggaggctgcagagcccacagccctgctcaccagggcagagcccccttcagaacccacagagatccgtccacaaaagcggaaaaaggggccagcccccaaaatgctggggaacgagctatgcagcgtgtgtggggacaaggcctcgggcttccactacaatgttctgagctgcgagggctgcaagggattcttccgccgcagcgtcatcaagggagcgcactacatctgccacagtggcggccactgccccatggacacctacatgcgtcgcaagtgccaggagtgtcggcttcgcaaatgccgtcaggctggcatgcgggaggagtgtgtcctgtcagaagaacagatccgcctgaagaaactgaagcggcaagaggaggaacaggctcatgccacatccttgccccccagggcttcctcacccccccaaatcctgccccagctcagcccggaacaactgggcatgatcgagaagctcgtcgctgcccagcaacagtgtaaccggcgctccttttctgaccggcttcgagtcacgccttggcccatggcaccagatccccatagccgggaggcccgtcagcagcgctttgcccacttcactgagctggccatcgtctctgtgcaggagatagttgactttgctaaacagctacccggcttcctgcagctcagccgggaggaccagattgccctgctgaagacctctgcgatcgaggtgatgcttctggagacatctcggaggtacaaccctgggagtgagagtatcaccttcctcaaggatttcagttataaccgggaagactttgccaaagcagggctgcaagtggaattcatcaaccccatcttcgagttctccagggccatgaatgagctgcaactcaatgatgccgagtttgccttgctcattgctatcagcatcttctctgcagaccggcccaacgtgcaggaccagctccaggtagagaggctgcagcacacatatgtggaagccctgcatgcctacgtctccatccaccatccccatgaccgactgatgttcccacggatgctaatgaaactggtgagcctccggaccctgagcagcgtccactcagagcaagtgtttgcactgcgtctgcaggacaaaaagctcccaccgctgctctctgagatctgggatgtgcacgaatgactgttctgtccccatattttctgttttcttggccggatggctgaggcctggtggctgcctcctagaagtggaacagactgagaagggcaaacattcctgggagctgggcaaggagatcctcccgtggcattaaaagagagtcaaagggttgcgaa

SEQ ID NO: 2713 - DNA, 423 bp, Homo Sapiens
  NM_005694
ccggaagtgactgcggacgaatcggcgtttgccgaggctggcatagatttggctgtctccgctcatagctgcttttggcgcgaaagatgccgggtctggttgactcaaaccctgccccgcctgagtctcaggagaagaagccgctgaagccctgctgcgcttgcccggagaccaagaaggcgcgcgatgcgtgtatcatcgagaaaggagaagaacactgtggacatctaattgaggcccacaaggaatgcatgagagccctaggatttaaaatatgaaatggtggtctgctgtgtgaataaataattcctgaagaatgaagaagattaattttgggagttctttgacgaactttgatatgtggaaaaagtatttataatttattgtaagaagaaagtaaaatattactagtggaagatcttc

SEQ ID NO: 2714 - DNA, 1614 bp, Homo Sapiens
  NM_005698
ggtagttggttgtgggcactgggttagaggtatcacgtgggggcactttcgtcttagcttttggacaagacgcaggcgcaacccacggctgctgcggggatccttgtggcccttccggtcggtggaaccaatccgtgcacagagaagcggggcgaactgaggcgagtgaagtggactctgagggctaccgctaccgccactgctgcggcaggggcgtggagggcagagggccgcggaggccgcagttgcaaacatggctcagagcagagacggcggaaacccgttcgccgagcccagcgagcttgacaacccctttcaggacccagctgtgatccagcaccgacccagccggcagtatgccacgcttgacgtctacaacccttttgagacccgggagccaccaccagcctatgagcctccagcccctgccccattgcctccaccctcagctccctccttgcagccctcgagaaagctcagccccacagaacctaagaactatggctcatacagcactcaggcctcagctgcagcagccacagctgagctgctgaagaaacaggaggagctcaaccggaaggcagaggagttggaccgaagggagcgagagctgcagcatgctgccctggggggcacagctactcgacagaacaattggccccctctaccttctttttgtccagttcagccctgctttttccaggacatctccatggagatcccccaagaatttcagaagactgtatccaccatgtactacctctggatgtgcagcacgctggctcttctcctgaacttcctcgcctgcctggccagcttctgtgtggaaaccaacaatggcgcaggctttgggctttctatcctctgggtcctccttttcactccctgctcctttgtctgctggtaccgccccatgtataaggctttccggagtgacagttcattcaatttcttcgttttcttcttcattttcttcgtccaggatgtgctctttgtcctccaggccattggtatcccaggttggggattcagtggctggatctctgctctggtggtgccgaagggcaacacagcagtatccgtgctcatgctgctggtcgccctgctcttcactggcattgctgtgctaggaattgtcatgctgaaacggatccactccttataccgccgcacaggtgccagctttcagaaggcccagcaagaatttgctgctggtgtcttctccaaccctgcggtgcgaaccgcagctgccaatgcagccgctggggctgctgaaaatgccttccgggccccgtgacccctgactgggatgccctggccctgctacttgagggagctgacttagctcccgtccctaaggtctctgggacttggagagacatcactaactgatggctcctccgtagtgctcccaatcctatggccatgactgctgaacctgacaggcgtgtggggagttcactgtgacctagtccccccatcaggccacactgctgccacctctcacacgccccaacccagcttccctctgctgtgccacggctgttgcttcggttatttaaataaaaagaaagtggaactggaactgacaaaaaaaaaaaaaaaaaaaaaaaa

SEQ ID NO: 2715 - DNA, 1309 bp, Homo Sapiens
  NM_005705
cgggaatccctgcagctgagcctgtctctcacgggaccgggaagctggagagagccccaaccctgcccgctggggccgagctccctgctcctgcagcagtcccatgccccacactctgagtctgccctatccacagctgctgggcctctctgtggccaccatggtgactcttacctacttcggggcccactttgctgtcatccgccgagcgtccctggagaagaacccgtaccaggctgtgcaccaatgggccttctctgcggggttgagcctggtgggcctcctgactctgggagccgtgctgagcgctgcagccaccgtgagggaggcccagggcctcatggcagggggcttcctgtgcttctccctggcgttctgcgcacaggtgcaggtggtgttctggagactccacagccccacccaggtggaggacgccatgctggacacctacgacctggtatatgagcaggcgatgaaaggtacgtcccacgtccggcggcaggagctggcggccatccaggacgtgtttctgtgctgtgggaagaagtctcctttcagccgtctggggagcacagaggctgacctgtgtcagggagaggaggcggcgagagaggactgccttcagggcatccggagcttcctgaggacacaccagcaggtcgcctccagcctgaccagcatcggcctggccctcacggtgtccgccttgctcttcagctccttcctgtggtttgccatccgctgtggctgcagcttggaccgcaagggcaaatacaccctgaccccacgagcatgtggccgccagccccaggagcccagcctcttgagatgctcccagggtggacccacacattgtctccactccgaagcagttgctattggtccaagaggatgctcgggtagtcttcggtggctgcaggagagcgatgctgcgcctctgcccctctcctgccacctggctgcccacagagctctccagggcagaagtcgcggtgggctcagtgggtgccctgagcggggtctctcagactgacgtcaggccttggtgggctgcactctcacctggaggctccggggaagcatctgcctccaggaccattcaggctgttgacaagtcaactcctcatggctgtaggactgaggttcccaagtccttgtccctggtcctgtggtccctccaccttcaaaccagcaatggtgcattgagcaaattgtggtcaaatatacatcacatcaaatttaccatcttaaccattgttaagtgtatggtttgtggcattaaatacattcacattgttgtgcaaccatc

SEQ ID NO: 2716 - DNA, 2866 bp, Homo Sapiens
  NM_005707
ctcatgaggagccactcagattcctgtcacttctcaaagcatctccgtcgtgaacatggccctgccaccattcttcggccagggtcgcccaggcccaccgcccccgcagccgccgcctcctgctcctttcggctgtccgccaccgccgctgccctccccggctttcccgccgcctctcccccagcggcccggcccttttccgggggcctccgcccccttccttcagcctccgctggctctgcagccccgagcctccgcggaggcctcccgcggcggaggcggcgctggcgccttctacccggtgccaccaccgccgctgcctcctccgccgccccagtgtcggcccttcccggggaccgacgccggcgagcggccgcggccaccgcctcccggcccggggccgccctggagcccgcggtggcctgaggcgccgccgccgccggccgacgtgctcggggatgcggccctccaacgcctgcgcgaccggcagtggctggaggcggtgttcgggaccccgcggcgggcaggctgtccggtgccccagcgcacgcatgccgggcccagccttggcgaagtgcgcgcgcgattgctccgggctctgcgcctggtgcggcggctgcgcggcctgagccaggccctgcgcgaggccgaagccgacggcgcggcctgggtcctgctgtactcccagaccgcgccgctgcgcgcggaactggccgagcggctacagccgttgacccaggctgcctatgtgggcgaggcgcggaggaggctggagagggtccggcgccgccggctgcggcttcgcgagagggcccgggaacgcgaggccgagcgggaggcagaggccgcgcgggcagtggaacgcgagcaggagattgaccgctggagggtgaagtgtgtgcaggaggtggaggagaagaagcgggagcaggaactcaaagcagccgctgatggcgtactatctgaagtgaggaaaaaacaagcagataccaaaagaatggtggacattctacgggctttggagaaattgaggaaactgaggaaagaggctgcagcgaggaaaggggtctgtcctccagcctcagcagatgagacttttacgcatcatcttcagcgactgagaaaactcattaaaaagcgctctgaactgtatgaagctgaagagagagccctcagagttatgctagaaggagaacaagaggaagagaggaaaagagaattagaaaagaaacaaagaaaagaaaaagagaaaattttacttcagaaacgtgaaattgagtccaagttgtttggggatccagatgagttcccacttgctcacctcttggagcctttccgacagtattatctccaagccgagcactccctgccagcgctcatccagatcaggcatgattgggatcagtacctggtgccatccgatcatcccaaaggcaacttcgttccccaaggatgggtccttcccccgctccccagcaacgacatctgggcaactgctgttaagctgcattagtaaagatgctccaggagtgtggtccagccagcgctctttccagctgtaaatattagcgatggtgccatcttttgctgtagactaaactgcaacttctaaattccatgtggcattcccctaccctgaagttatgctttccttctgtgctctgtgctggccagaggtgcctcttgaatcagattaatgtggtttttcaggaaaggacttaggtgaactgaggtttttaccacaggcagtgaatgaccttggttcaccaaatttgcctctgttttgaggggcttggtccagagtgacttgttaatttactctaacttccttgtgtgttgatgggtaagtacactcaaacactgaatacaggtgtgtgatgggtagatttcacagcccttctactaatagtgagtgtgaaggcaagcttgatgcaaaacctcctgacctttcctacctgaagagccctttgacttctaggaagaaaggtcaaaaatgttatcttcagttgtgttaatcccagttttagtgcagcttaggaggctgctagttaggaagatggcagtggctgtaggctgggttgccagaaaagatggtggcctagtcttattattcagatggagaacttagaaaacctgaagagtacccaaattggattgtattttaatggacaatggctgtattttttccatgttagaaggatcctaatgaaagcacctgttatttttaagtttctaagggtctagttgttcagaatccccaaggatatttccctaacctcactcagtcacattgtaggagccagtgtagctatggaattatcttaggaactcaagcttctaaaactatccatgtagtcaaatctaggggaaaaagcaaataaaaatagtaaaatttggccgggcacagtggctcacgcctgtaatcccaacactttgggaggccgaggcgggccgatcacgaggtcaggagatcaaggccatcctggctaacacggtgaaaccctgtctctactaaaaatacaaaaaaatattagctgggcgtaggtggtgcacacctgtagtcccagctactggggaggctgaggcaggagaatggtgtaaaacccaggaggcagagcttgcagtgagccgagatcgcgccacggcactccagcctgggagacagagcaagactccgtctcaaaaaaaaaaaaagtaaaatttattttttatattcattaataaatgctgttgtgcttggagatgatcactcatataacatgtcatttttttggttctgttttggtttggtttttgccaattattttgttatatttccaaaaaactaaataaaaatcatttttattttttaaaaaaaaaaaaaaaa

SEQ ID NO: 2717 - DNA, 5395 bp, Homo Sapiens
  NM_005713
aaatagtgggccaggcaggaagatggcggcggtagcggaggtgtgagtggacgcgggactcagcggccggattttctcttcccttcttttcccttttccttccctatttgaaattggcatcgagggggctaagttcgggtggcagcgccgggcgcaacgcaggggtcacggcgacggcggcggcggctgacggctggaagggtaggcttccttcaccgctcgtcctccttcctcgctccgctcggtgtcaggcgcggcggcggcgcggcgggcggacttcgtccctcctcctgctcccccccacaccggagcgggcactcttcgcttcgccatcccccgacccttcaccccgaggactgggcgcctcctccggcgcagctgagggagcgggggccggtctcctgctcggttgtcgagcctccatgtcggataatcagagctggaactcgtcgggctcggaggaggatccagagacggagtctgggccgcctgtggagcgctgcggggtcctcagtaagtggacaaactacattcatgggtggcaggatcgttgggtagttttgaaaaataatgctctgagttactacaaatctgaagatgaaacagagtatggctgcagaggatccatctgtcttagcaaggctgtcatcacacctcacgattttgatgaatgtcgatttgatattagtgtaaatgatagtgtttggtatcttcgtgctcaggatccagatcatagacagcaatggatagatgccattgaacagcacaagactgaatctggatatggatctgaatccagcttgcgtcgacatggctcaatggtgtccctggtgtctggagcaagtggctactctgcaacatccacctcttcattcaagaaaggccacagtttacgtgagaagttggctgaaatggaaacatttagagacatcttatgtagacaagttgacacgctacagaagtactttgatgcctgtgctgatgctgtctctaaggatgaacttcaaagggataaagtggtagaagatgatgaagatgactttcctacaacgcgttctgatggtgacttcttgcatagtaccaacggcaataaagaaaagttatttccacatgtgacaccaaaaggaattaatggtatagactttaaaggggaagcgataacttttaaagcaactactgctggaatccttgcaacactttctcattgtattgaactaatggttaaacgtgaggacagctggcagaagagactggataaggaaactgagaagaaaagaagaacagaggaagcatataaaaatgcaatgacagaacttaagaaaaaatcccactttggaggaccagattatgaagaaggccctaacagtctgattaatgaagaagagttctttgatgctgttgaagctgctcttgacagacaagataaaatagaagaacagtcacagagtgaaaaggtgagattacattggcctacatccttgccctctggagatgccttttcttctgtggggacacatagatttgtccaaaagccctatagtcgctcttcctccatgtcttccattgatctagtcagtgcctctgatgatgttcacagattcagctcccaggttgaagagatggtgcagaaccacatgacttactcattacaggatgtaggcggagatgccaattggcagttggttgtagaagaaggagaaatgaaggtatacagaagagaagtagaagaaaatgggattgttctggatcctttaaaagctacccatgcagttaaaggcgtcacaggacatgaagtctgcaattatttctggaatgttgacgttcgcaatgactgggaaacaactatagaaaactttcatgtggtggaaacattagctgataatgcaatcatcatttatcaaacacacaagagggtgtggcctgcttctcagcgagacgtattatatctttctgtcattcgaaagataccagccttgactgaaaatgaccctgaaacttggatagtttgtaatttttctgtggatcatgacagtgctcctctaaacaaccgatgtgtccgtgccaaaataaatgttgctatgatttgtcaaaccttggtaagcccaccagagggaaaccaggaaattagcagggacaacattctatgcaagattacatatgtagctaatgtgaaccctggaggatgggcaccagcctcagtgttaagggcagtggcaaagcgagagtatcctaaatttctaaaacgttttacttcttacgtccaagaaaaaactgcaggaaagcctattttgttctagtattaacagtgactgaagcaaggctgtgtgacattccatgttggagaaaaaaagaaaaaaaaaagctgaatgctctaagctggaacgtaggatctatagccttgtctgtggcccaagaccttggccttgtgtacaaaaatgacaaaatattgcaatagcaaagctgaacatctaacactagctatctcttgctagatctccttgctcagcatataactataaatacatgtaaaattacatgtatatggctatatttttatttgcttgctcctagaagagaaaaaaaaatcaactttgaatcacaactaggaattgatgctttaatttttggatactttttcagaatttttaatttactatggtccggcctaagatcctctgttgtatcaggttttgtgcacaaaagaaaagcacaaaagttgaatgcacatggggcatgtgctttctgtgcaccaaatatctggatgaggttcttttttcaggcctacagtcaaatctgtgtccagaattttttgacttttttgctttgtataatcatagaattcattgctgctgatttctataatgattcatgttgtcatgtgtctcttaataactgagggctgtcagtaacctgtgattttgccttttctatagtcttactcccatgaagaaccttggttctgatggagaaagtgaaaagctttatttcttcccctagatatctttatatttctattatattttttagttgtgtactgtgtactagagatttttttcagtttgttatgaacacaatttggtaagccctaaattggttctgcctgtctccaaacagaaacatctgtacaaatcttgttggtatagactactttctggaaaatggtcaagataagttcatgttttcttgaaatttctaagatagtatatggtatcacttgtttaaagcaaatcagactgagtttgacatttaattcaatatttctggtattcagtaacgggtatatatgtttgttcttccagtttgggtcagtttaaaagatatgttgcaaagtatacatagaaaatgtgagcaatgcctctctttgccttttgatcagaaacttcagcagagcggtaaggattccacatgatttaaactgaaatgcttttctttgttgctgtaagaacttaaaatgtaaaatacctttttcagtttaagtcctgtaaacaacattgaagcatggagatgaggcaaggaatagtactcactgaagttgaaatgactgcccacttcaaaatcttcattgtgtttacacaccagtgtatttatacaaatcagaggcattttgtagatgctttgctgacttgttcagctctgtaaaaacacagaaatcagacccattttgtaaagcggaaaatcatgttacatggaacatgtcctgtatatatcacatacatggtaatggagtcttaatgataagtgcaagataataatttaatgatgggattagtctgatcgcttaatatgcacaatcctggaagtgaattacttgcatcagatatagtgatatttattattctgtacagagagaaaaatacatataaaacatatgcttacattacatgcacgcggatttcatgctccataatcttttctattttttaatttacctttctgtaaatgatgtgcatggaatatgccttatagaaaaatgctgttcataatttgactacgtggaaaagtgcctatatggtggtaatgctagtaaggcaaataagacaaattatcatgttggtttactacatcaccagttaacattttatattgtgatgtttaaaaaagaaaaatttatacctcaaatgtgtattttattttacaatcagctgtggggtatggggttgggatgggagaatgggggggttggggagggcaggtttattcaccatagccgctgataagaatcttcaaaaaaattctatatgcgcactataaatgtttctctgtttgccatttctggtaactatcatgaacacagacagttaactctttcataactgaattggatagctttattttacagaagtatggcaagtttacaaagcaatatctaaatctaattatcattagttgcatttggactaaatgtgatgatatacttttgcaattgattctgtaaataaaaggattacactaaaatatttgtattaaaagaagaaaagataacattttacctttagataactgcacttgtacctcactagagttaatcccacccaatcagattgagaaataaattggggaatgtggaaagagtccaaaagaggtcagaatttggagaggtactggccttctggacaacatttagaccctctacaattattttcattaagctgattcctacatcctgaatattcatgttttctcatctacagatatttgtcttcccccaaactaaaagaaaaaaaactaccctttactctcttttctactcagttactcttttgtgctatgttagaaacttgaaatatattggtgatgtggggattttgtccctgactgcccactgtacaggacaagagagtacagtgtttcagttggaattcaggactcctggttttgaggtagaggatgatcactgcagtacttggtttggaattgccacaggggtagctaaaccaaaggagggttatatctgcaagggaggtgtaagaaggcaaaataaggaaaaggaggaatgggttttctatttgttcagtttcatcaactaatttatacacttaatacaacttcagtgtcaattgctattaagaaatttttagttgggctgagctggttctcttgtgaaattgtgctggttatctttaagcttatcagttatttgtccaattaaacacttttcaccagtatttagtccgagttgtacagacgatgtatttggattttgtcatggttcatctacagactcaaaacataatcattttaaagtaccttgggagtgtgtagagtaacttctataatagctttatgatcctgatgatgttttttaaacacaataaagttggatcttccatgttacaatcacagaattaaaaccagtatttaaagtggaaaagtattaaaatattatggacaaata

SEQ ID NO: 2718 - DNA, 4396 bp, Homo Sapiens
  NM_005715
ggcgcggcggggcgcggggcgtggggacgctagcgggcgccggacgggcgcggcgccccgtcacgggcagcgccccgaaccggggccggacacctcggccgctcgggccgcggcggcggggaccatgccgaagaaagtctcctgagcccggcaacttcggcccctccccgcccccacccggctgccctccgcgcggccctccccatgtgcagccggccagccgggctctcctcctcgcggcggatgggtgaccttttcctggcacgggcaggctgtgggaggcagcggagcaggcgatgaagaagaagcagcagcatcccggcggcggcgcggatccctggccccatggggcccctatggggggcgcccctccgggcctgggcagctggaagcgtcgggtgcccctgctgcctttcctgcgcttctccctccgggactacggcttctgcatggccaccctgctggtcttctgcctgggctccctcctctatcagctcagcgggggaccccctcgcttcctgctcgacctgcggcagtacttgggaaattccacttacttggatgaccatggaccacctcctagtaaggtactacctttcccaagccaggtggtgtacaacagggtaggcaagtgtgggagccgtactgtggtcttgcttctgagaatcttgtcggagaagcacggatttaatttggtcacatcagacattcacaacaaaaccaggcttactaaaaatgaacaaatggaactgattaaaaatataagtactgccgaacaaccctatttattcactcgacatgttcatttcctcaacttctcaaggtttggaggagaccagcctgtctacatcaacatcattagagaccccgtcaaccggttcttatccaactattttttccgtcgctttggagactggagaggggaacaaaatcacatgatccgcacccccagcatgaggcaggaggagcgctacctggatatcaatgagtgtattcttgaaaactatcccgagtgctccaaccccaggttattttacatcattccgtacttttgtggacagcatcccagatgcagggagcctggtgaatgggcccttgagagagcaaagctgaacgtgaatgaaaacttcctgctcgtggggattcttgaagagttggaagatgtgctgctgttactggaaagatttttacctcattacttcaagggcgtgctcagtatctacaaagacccagagcacaggaagcttggaaacatgactgtgacggtgaagaagactgtcccctctcctgaggctgtgcagatcctctaccagcggatgagatacgagtacgagttttaccactacgtcaaagagcagttccacctgctgaagcgcaagtttggacttaagtctcacgtcagcaagccccccctgaggccacacttctttatcccaactccactggaaaccgaggagccaatcgacgatgaagaacaggatgatgaaaagtggctggaagatatttataagaggtgatgtgactgtgttgcctctatggctttatctcccttttccagaaagttctttgtttggggaagtaaaatccttaagggactaaattaatgcttgggtgcattaaaaagaacaaaacattcccacatgttggggtcattgggagatgcccggttttgcgggttttatttgtttaattttattctgtgttttctcttggctctttgggtctttcccgggtacactagatggctccatcccaaggcatcttgtcataaaacagctttcccccaccccatatcatgggaaaagggggagaaatatagcccctagcctaataacttatcatttgtaaaatgacttataaaaatattacctcaatggtaggagacatccagacttgtatatttcagtggaaatacaaaaccacttcagagaccagggtatctcctctggaaggatctaagagaaggtaagacagattaggacatcgaaaaggaggatggagccaggtgccatggcttgagcctataatccgaggctgaggtgggaggatcacttgagcccaggagtttgaggttgcagtgagctgtgatcacaccactgcactccagcctgggtgacagagtgagactctgtctcaattaattttttttttttaaaggaggaggatctccatgggtaagtggtttctacccgcatgggtagagttctgcctctggtccttctcagggggcactttcaccaagagcagtgtaattatctctgaaagagcaagtcagcttgtgccgcatccccaaccaatccacagcctggagtacctttcaaggtcaaagtgcatggccagctccattgagacattccatttcaaagcaccgtgctgacagatatcaaagtactctagcagggaaaataatttgtttgctgtgtaaggaagaatgtagacaagacagataaatctgaaggtcatgtggcatcagggaaagggcatggctgtgtcttttgcacccaatatgaaacatcttctcccaacactgctttaatggaagttctaggaaccaatttagctcaggcatttgactcctacagcagaagttctgagcctgaccacagatggtgtgtaatctatcaaacacacccctggccaagttgggtcctataggacctggtactatgtactattgtaacttctagttccctaagaggtacctgttttcagtaaaaaggggtcctgagttctgtgcaggtggaagagctacccgagaactacctgagttctgtgcaggtagagtcccatttcttatgggacctgtgtgctcctgagaactcttacttgagacatcaaaaagaagcagcaagagcttctgggacagagactgcttggccagctttgtaagtaagtggctgcctccaatgtgatgtgagtacatgttgggcagtctcactgtcctaaggtatgtcttctttccacctcccactgcccctcccctgccacctatcaatgatgccttggttcagtcattagaaatctgttgctttgagttctgaaatattttcaccttaaaaaaaatgctgaaaatacacattctcctgggaagacgataaacagctagctaagaagccgaggttcagtggtggcagcaggaaggacactgccacaaattttgtctatttcatatttgtcccctagagccagccctagcaaatgtgtgagttgggagtagttaatagtaaataagactctgactttacacaagctacacattttatacttttcataaaccacaaagtctctctagaattttttctgccttcactaaaattggactgtagccaagatataaagcaagtcatttggaacctgccgagtgagcactgaagctactttatcatgagatgtgtgttaagaaggctgcagcccacaggagtccagggaaggcggggaccacagaggcacagagtccagcacttggccgctcatgggccttctttctgcctcagaggacgggggcagagaagtgatgaagggaaatgttcttagaggaggaaatatcctttgtcctgttcagagagaccagggccctaccattaggcatactttcagaagcaacctggagaacagctatcaatcatattcaaaaccagtacaagaactgctgcctggtaccctgtgagtcatttctatgaaattccatataaagaatgatgataagtttacacactgtgcaatctcacaatctgaaaataaagttgagttggctgtgttttctctgctcttgtcagaacattgggacaattggtcgttcaaaaacattcatcctcttactgcaagtttatctgggtacttttacctgtgtgttcaaaggcatttcttttcagcagtgatcattataacttcacaaaaaaagatgctgacggatttacttacagggccttaatgttattttgtcccagccaacaccctctaggtcctaaaagtcaaggtacttcagtttatttggcaaacatgacaacattttttttggccctgggcccaacagtttgtacttcatgaaacatattgtacattttacatagtttaatttaaaaaataccttttaagctagttgatctttgactgtcttatttattataacctttcagcacattccaaggttttagttactcaggaaggagttaattaaaatgattttattttggtctgatggatgttttttaaaaggaaaattattattatgaaccttcagcctactttcttgagtgccgtaaaagtgcttgtaaatctttttttttttttaagaagaaagaaaaaaatggtgtttgacgttgatggaaattcaaaaatatatatggaactgaaacattaacttagctaaaataaaagcaatctgtgtttgaaaaaa

SEQ ID NO: 2719 - DNA, 2000 bp, Homo Sapiens
  NM_005717
gggagcgcgaacctgaggaggaagaaacggggctagcgcgcaggcccagaacggtccgagccgcggcagtcggcgacgcctcagagcggaagagggaagtgaatcaggcgccgggtagtgggttgctgggctgggcttgctgaggtagaggcagcgccaagaagaggcctttgccgctggtcgggattgggatgtcgaagaacacagtgtcgtcggcccgcttccggaaggtggacgtggatgaatatgacgagaacaagttcgtggacgaagaagatgggggcgacggccaggccgggcccgacgagggcgaggtggactcctgcctgcggcaaggaaacatgacagctgccctacaggcagctctgaagaacccccctatcaacaccaagagtcaggcagtgaaggaccgggcaggcagcattgtcttgaaggtgctcatctcttttaaagctaatgatatagaaaaggcagttcaatctctggacaagaatggtgtggatctcctaatgaagtatatttataaaggatttgagagcccgtctgacaatagcagtgctatgttactgcaatggcatgaaaaggcacttgctgctggaggagtagggtccattgttcgtgtcttgactgcaagaaaaactgtgtagtctggcaggaagtggattatctgcctcgggagtgggaattgctggtacaaagaccaaaacaaccaaatgccaccgctgccctgtgggtagcatctgtttctctcagctttgccttcttgctttttcatatctgtaaagaaaaaaattacatatcagttgtcctttaatgaaaattgggataatatagaagaaattgtgttaaaatagaagtgtttcatcctttcaaaaccatttcagtgatgtttataccaatctgtatatagtataatttacattcaagtttaattgtgcaacttttaacccctgttggctggttttttgttctgttttgttttgtattatttttaactaatactgagagatttggtcagaatttgaggccagtttcctagctcattgctagtcaggaaatgatatttataaaaaatatgagagactggcagctattaacattgcaaaactggaccatatttcccttatttaataagcaaaatatgtttttggaataagtggtgggtgaataccactgctaagttatagctttgtttttgcttgcctcctgattatctgtactgtgggtttaagtatgctactttctctcagcatccaataatcatggcccctcaatttatttgtggtcacccagggttcagagcaagaagtcttgctttatacaaatgtatccataaaatatcagagcttgttgggcatgaacatcaaacttttgttccactaatatggctctgtttggaaaaaactgcaaatcagaaagaatgatttgcagaaagaaagaaaaactatggtgtaatttaaactctgggcagcctctgaatgaaatgctactttctttagaaatataatagctgccttagacattatgaggtatacaactagtatttaagataccatttaatatgccccgtaaatgtcttcagtgttcttcagggtagttgggatctcaaaagatttggttcagatccaaacaaatacacattctgtgttttagctcagtgttttctaaaaaaagaaactgccacacagcaaaaaattgtttactttgttggacaaaccaaatcagttctcaaaaaatgaccggtgcttataaaaagttataaatatcgagtagctctaaaacaaaccacctgaccaagagggaagtgagcttgtgcttagtatttacattggatgccagttttgtaatcactgacttatgtgcaaactggtgcagaaattctataaactctttgctgtttttgatacctgctttttgtttcattttgttttgttttgtaaaaatgataaaacttcagaaaataaaatgtcagtgttgaataaaaaaaaaaaaaaaaaaaa

SEQ ID NO: 2720 - DNA, 912 bp, Homo Sapiens
  NM_005719
cgcttccgcctacctcgcccaggctgccagaccggaagcgctccgctgtacctggatcctgctcctctgggttgaaacccgggcgccgccaagatgccggcttaccactcttctctcatggatcctgataccaaactcatcggaaacatggcactgttgcctatcagaagtcaattcaaaggacctgcccccagagagacaaaagatacagatattgtggatgaagccatctattacttcaaggccaatgtcttcttcaaaaactatgaaattaagaatgaagctgataggaccttgatatatataactctctacatttctgaatgtctgaagaaactgcaaaagtgcaattccaaaagccaaggtgagaaagaaatgtatacgctgggaatcactaattttcccattcctggagagcctggttttccacttaacgcaatttatgccaaacctgcaaacaaacaggaagatgaagtgatgagagcctatttacaacagctaaggcaagagactggactgagactttgtgagaaagttttcgaccctcagaatgataaacccagcaagtggtggacttgctttgtgaagagacagttcatgaacaagagtctttcaggacctggacagtgaagggagcccgggcagccaccgtctccagagccctgggcagcattttccagcaagatgtacacaatcttttgcctttatttcgtaaagttttatacagaagagagaagagcatgtctttacttgaaaaactcttgatcaagaatttgggtgggagaaaagaaagtgggttatcaagggtgatttgaaattttctgcagcattaaagctggcgcttaataagaataagtaataataaagaaatttctaacattccaaaaaaaaaaaaaaaaaaaaaaaaaaaaa

SEQ ID NO: 2721 - DNA, 1520 bp, Homo Sapiens
  NM_005720
ggctgctgctccggcgcggagcccagagccggttcggcgcgtcgactgcccagagtccgcggccggggcgcgggaggagccaagccgccatggcctaccacagcttcctggtggagcccatcagctgccacgcctggaacaaggaccgcacccagattgccatctgccccaacaaccatgaggtgcatatctatgaaaagagcggtgccaaatggaccaaggtgcacgagctcaaggagcacaacgggcaggtgacaggcatcgactgggcccccgagagtaaccgtattgtgacctgcggcacagaccgcaacgcctacgtgtggacgctgaagggccgcacatggaagcccacgctggtcatcctgcggatcaaccgggctgcccgctgcgtgcgctgggcccccaacgagaacaagtttgctgtgggcagcggctctcgtgtgatctccatctgttatttcgagcaggagaatgactggtgggtttgcaagcacatcaagaagcccatccgctccaccgtcctcagcctggactggcaccccaacaatgtgctgctggctgccggctcctgtgacttcaagtgtcggatcttttcagcctacatcaaggaggtggaggaacggccggcacccaccccgtggggctccaagatgccctttggggaactgatgttcgaatccagcagtagctgcggctgggtacatggcgtctgtttctcagccagcgggagccgcgtggcctgggtaagccacgacagcaccgtctgcctggctgatgccgacaagaagatggccgtcgcgactctggcctctgaaacactaccactgctggcgctgaccttcatcacagacaacagcctggtggcagcgggccacgactgcttcccggtgctgttcacctatgacgccgccgcggggatgctgagcttcggcgggcggctggacgttcctaagcagagctcgcagcgtggcttgacggcccgcgagcgcttccagaacctggacaagaaggcgagctccgagggtggcacggctgcgggcgcgggcctagactcgctgcacaagaacagcgtcagccagatctcggtgctcagcggcggcaaggccaagtgctcgcagttctgcaccactggcatggatggcggcatgagtatctgggatgtgaagagcttggagtcagccttgaaggacctcaagatcaaatgacctgtgaggaatatgttgccttcatcctagctgctggggaagcggggagaggggtcagggaggctaatggttgctttgctgaatgtttctggggtaccaatacgagttcccataggggctgctccctcaaaaagggaggggacagatggggagcttttcttacctattcaaggaatacgtgcctttttcttaaatgctttcatttattgaaaaaaaaaaaaaatgcccccaaagcactatgctggtcatgaactgcttcaaaatgtggaggtaataaaatgcaactgtgtaaaaaaaaaaaaaaaaaaaaaa

SEQ ID NO: 2722 - DNA, 3871 bp, Homo Sapiens
  NM_005724
ctgcagcctccgcagaggcgattggctgaagctaccggccgcgtggggcgggactcggttgccagggagcggcgcgggagccctgaggggactgcggcggctgcgcggaggagcgaggcacttgctggggtcggggctgcgcgacggcgcaggggctgcggggagcgccgcgcaggccgtgcagttcctagcgaggaggcgccgccgccattgccgctctctcggtgagcgcagccccgctctccgggccgggccttcgcgggccaccggcgccatgggccagtgcggcatcacctcctccaagaccgtgctggtctttctcaacctcatcttctggggggcagctggcattttatgctatgtgggagcctatgtcttcatcacttatgatgactatgaccacttctttgaagatgtgtacacgctcatccctgctgtagtgatcatagctgtaggagccctgcttttcatcattgggctaattggctgctgtgccacaatccgggaaagtcgctgtggacttgccacgtttgtcatcatcctgctcttggtttttgtcacagaagttgttgtagtggttttgggatatgtttacagagcaaaggtggaaaatgaggttgatcgcagcattcagaaagtgtataagacctacaatggaaccaaccctgatgctgctagccgggctattgattatgtacagagacagctgcattgttgtggaattcacaactactcagactgggaaaatacagattggttcaaagaaaccaaaaaccagagtgtccctcttagctgctgcagagagactgccagcaattgtaatggcagcctggcccacccttccgacctctatgctgaggggtgtgaggctctagtagtgaagaagctacaagaaatcatgatgcatgtgatctgggccgcactggcatttgcagctattcagctgctgggcatgctgtgtgcttgcatcgtgttgtgcagaaggagtagagatcctgcttacgagctcctcatcactggcggaacctatgcatagttgacaactcaagcctgagctttttggtcttgttctgatttggaaggtgaattgagcaggtctgctgctgttggcctctggagttcatttagttaaagcacatgtacactggtgttggacagagcagcttggcttttcatgtgcccacctacttacctactacctgcgactttctttttccttgttctagctgactcttcatgcccctaagattttaagtacgatggtgaacgttctaatttcagaaccaattgcgagtcatgtagtgtggtagaattaaaggaggacacgagcctgcttctgttacctccaagtggtaacaggactgatgccgaaatgtcaccaggtcctttcagtcttcacagtggagaactcttggccaaaggtttttgcggggaggaggaggaaaccagctttctggttaaggttaacaccagatggtgcccctcattggtgtccttttaaaaaatatttactgtagtccaataagatagcagctgtacaaaatgactaaaatagattgtaggatcatatggcgtatatcttggttcatcttcaaaatcagagactgagctttgaaactagtggtttttaatcaaagttggctttataggaggagtataatgtatgcactactgttttaaaagaattagtgtgagtgtgtttttgtatgaatgagcccattcatggtaagtcttaagcttgttggaaataatgtacccatgtagactagcaaaatagtatgtagatgtgatctcagttgtaaatagaaaaatctaattcaataaactctgtatcagcccccaacatattatttttcattatttgggggatatttcagttccagagcagcagtatcatgttttctttgttggtgctgtctatagttcatcatggtttacgtgtgttttcgttatagctgttgccagattctaaagggcttgatattcaaaaaaccacagatgctttcagtccagtatatcctagaaatatagagctctactttgtgcaatgcactggggatacagtggcgatactgtccttgtcttcaaggagttcggagtcctagtataggagacatacataggagaagataattttcacactgcagtggttgtagtaatagaatgggagtccaaaggggagttccggagaggtcaggggtgacttcctggaggagatgcccaagcttggaggctggataggctttgttgaaagatggtacacaagagtgtgaaacaaaattgtgtgtgcagggagcttaaaatacaaggctggggaaagaagttggagaagcaggaaagcccaggccctctagtgtcttacggaacatcctgtggaggtgagagctgacttgtaggtggaagcagctctttggaggtttgatttggaaggtgaactgagaagaaggtggtgatgcaagccggccgtgctgaagccaggatgaattggtgtgactgggcttcagttaggctggcatagcagttgagagagcttagcagtgggcagcagggcactgttgggggcggtggtgagcggtggattctggctgtttggaggcaggacagtggtggaattcgatcattgattggacgtgggacagagaagggagaagagaagactcatctaggatgagtcccaggtttctggctcagtcaactggggaaacaaagtcacagagctagggagtagttagagaacacatctgggggtgtgactcatggtcagttttgggctcgtcagttttgagatgcccaaatatcatgcagatctgtcccacctgaaaatggagaagacacgggaaaggagaggagtaaaaactaactccttttcacaaagtggaagttaccagaatgtgatttcagaggccccgggggatttatcatgtgactactgacccatcccacctcttgcccctgcctgttgcacagtgggcaagaatgtttgtgacctttcactaccaccacctcccccgagcatggtccccccagttttcaatatgaaccatcctgtgggtaccctgtcacaggctggccctgaggtgagcaatatttggactgtgatgttggttgttctccactctttctacaggacagaacagggcctctagagtgggaaatggctttgggaaatatgccaagcagtagccttgttcttcaacttgcccaagaggataattctccacacccttcctgtactcagtcctcagtttgcctggtgagagagcagcctcctcccgtgtgctctgccagctggacccagactggccatattaccagtgagaccaaaaagatggaggtggggaggtagctctgaggtctgggaaaccattccagctcctgccagttttaacttgtgtttaattcctggcacagttgtcctggaaatgcctttttctcttgcctgggaaccactagaaggggatgttgtctgtgttggccagggccatgcaaattcaacatcttgtttctgcccttcccccgtgtagctgaggctaggtgttggcattacccagtgcttgttcttcagagagcaaaagcactgctcgtcatgtctgaaatttagtgagtgagctcacccactaggctggtgtttcctgcccgtggctgcacattggaagcaccggggcactttgagaactacagatgcctgggtcccagagcatctaaggtgctctagggtgtgtccaggacacagccctggttgaggaccactgctatattgtatggcctcttttaaaaaagttaattttacttggaaatgatttcaaagctacagaaaagttgcaagaataaaaactgtacaaatgaggctcaaaaaaaaaaaaaaaaaaaa

SEQ ID NO: 2723 - DNA, 3213 bp, Homo Sapiens
  NM_005725
ggagcctgccgctccccgcgctcgtagcgcgggcctggggactggggatcccgccgccgggccgcagcatggggcgcttccgcgggggcctgcggtgcatcaagtacctgctgcttggcttcaacctgctcttctggctggctggatcggccgtcattgcttttggactatggtttcggttcggaggtgccataaaggagttatcatcagaggacaagtccccagagtatttctatgtggggctgtatgttctggttggagccggggccctgatgatggccgtggggttcttcgggtgctgcggagccatgcgggagtcgcaatgtgtgcttggatcattttttacctgcctcctggtgatatttgctgctgaagtaaccactggagtatttgcttttataggcaagggggtagctatccgacatgttcagaccatgtatgaagaggcttacaatgattaccttaaagacaggggaaaaggcaatgggacactcatcaccttccactcaacatttcagtgctgtggaaaagaaagctccgaacaggtccaacctacatgcccaaaggagcttctaggacacaagaattgcatcgatgaaattgagaccataatcagtgttaagctccagctcattggaattgtcggtattggaattgcaggtctgacgatctttggcatgatattcagcatggtcctctgctgtgcgatacgaaactcacgagatgtgatatgaagctacttctacatgaaaattgcaatctaaagctttcataccaaatgtcacaggagctgtctcccagctcatttttaacactgaaatgacattaggatctaaaataatttgctgtcaattgtacatttgcatgagtacgtatgtttggctcattactggtttaccccttgagtgaatgcctgtttatgatgactgagagcatattcatgtgtgatctgcgtgtttctggaatatgctttatacgtaatgaaatctgtttgctgggaattcctgattcttgttatataagaagaacaacctatttcgctcccagaaaaaaaagatcaaagagctttcagaaactttgagaacttggctatttagaaaaagtgataatgggtcagtttctcagactgtagccattgaaaattagatgcagagaattcagagatttcttcttaatggaagtaataagctgtaagaattgagagatcacaatggagtgttaaaactgactgtgtctaagttgggtgtaagggtttcctgggtttttttatatacatgctctccccagaatacagtaaaccacagttttagaactaaacacatctgtaaaactaaatatagcatggaaaatccaatttgaataagtcatgctttcctagaatttaaaaataaaaaagtcttcctctggaaagagaagtcacacagacaatcatgtgccctataaaagtgagtgtttataggactaaaaaacttttaacaactttttaaggaaatatttttgttcttatacaaaaacatgtaaatattgctttattactttcattttctgaccctgctgtaaactactgcaaccctcacatcctcaaagggacttttatgtcaaactcttctgtttctccaaatataaggaaaaaagactaaagcaagagatctggcagttgaaaattgtgggaaagagaatttgtatgggcactgtatctatgaaatacctcataacttacgtttacatgttttcctaactttttgtatttttcttgtatagccacctagagaattcttcatagattaagaactacagttttcaccacttaacataagtaaaacaaagtccttcataatttaaccattagcatctttggccaaaccaaaataaagaaaagcatcttctcctagttgtgtgtgggcaacagaaacaagttaaggaaacaaaaatacttatatatacacagaacaaaaataatgttctttttatgcaaatcccctgtgaaaataaaattttcaatgtttttttggtcttaacgcttcattttaacttagtaaacccaaatttaggatttacattggcaaatttttcagtgatttttaacgtgttacatttagtaaaccatagattttttaaaaactacattttgtaaggccacacataagtgaaaatacggaaggctttggaaacccccagatgaacttctatacatgtgaaaacacaagtctttgagtgtgcactaaaagtgtcacactcccaaaaaactcacaaaacattttgctaaaaagatatgactgcttgaaatagtctctctcccatggagaaccacatttctctttctgccatacttgctactgctactgattttggaggaaatttttctagaagaacaaaggtcatatttgaggcaagctaaaaacttaattatacatggctactttactgtgtctgtagctaaagaaaaattattttacaaaaattacttcatgaaatatagtttgtaccccagtagttgagaaatgtgaccttttaggcaaagaacaggcagtccatctctcttagctttagtttatctctctgcctgaagacaggaaacaggcccaagtgcatactcgggttctttccaactcagaatcatctctgattccacaaaagtgagtttagtttcctatctgaattaacaactttaaaggagactataatagttaaaagtggaagaatagaaataaataaatttaaaatgaaattaattaaagtagaagagaagggttctgttccatgtacgattaatgtgccccttttggagataagctttccaaaatatgcgtatgagtaaaattagagaattccaccactaagcaacaatagattttatatgtgtgtgtggatatatatacacacacacacagaaagatgaatatatatatatatatatctgtatagacacacatataatatatatagatatataatccctatatatcttgaatctacaaatatctttatatgtatataatttgaatatatacatgtatgtatatacagatgtgtgtgtatatatatatatacatacacatatacataaattttcagctatttctgttcccctgaactaatttgagattagacccaaacatgcttttaaatgtctcatgccaaggcactgaattaagacttcttaatgttgaaatattttaagtgatttcatattaaattttctatatactgaaa

SEQ ID NO: 2724 - DNA, 2039 bp, Homo Sapiens
  NM_005726
gtaggtttgttgcctcaccagtgcgcccgccggagggtgtttatcgcggctagagagatgtcgctgctgcggtcgctgcgcgtgtttctggtcgcgcggaccgggagctacccggctgggtctcttctgcgtcagtcgccccagccaaggcacacattttatgctgggccccgtctgtctgcctcggcctccagcaaggagctcctcatgaagctgcggcggaaaacaggctactcctttgtaaattgcaagaaagctctggagacttgtggcggggacctcaaacaggcagagatctggctccacaaggaggcccagaaggagggctggagcaaagctgccaagctccaagggaggaagaccaaagaaggcctgattgggctgttgcaggaaggaaacacaactgtattagtagaggtaaactgtgagacagattttgtttctagaaatttaaaatttcaactgttggtccagcaagtagcccttggaaccatgatgcattgtcagaccctaaaggatcaaccctctgcatacagtaaaggtttcttgaattcctctgagctttctggacttccagctgggcctgacagagaaggctcactcaaggatcagttggctttagcaattggaaaactgggagaaaacatgattcttaaacgagctgcatgggtgaaggtgccatctgggttctacgttggctcttatgtccacggagcaatgcagagtccctcacttcacaagctggtgctggggaagtatggggccctggtcatctgtgagacgtctgaacagaaaacaaaccttgaagacgttggccgccgccttgggcagcatgtggtgggcatggcccccctctctgttggctccctggacgatgagcctgggggagaggcagagactaagatgctgtcccagccgtatttgctggatccctccattaccttggggcagtatgtgcagcctcagggggtgtcggtagtagactttgtgcggtttgaatgtggagaaggtgaagaggcagcagaaactgaataggttccagagacttttggcccaggaggaatatttacttttagctctggacatcattacaaaaaggaatatttcccaaacctcttcagaccgagaatgcatgggtaaaattattaaatagttgtataataaaaataattttttccttgtttgcgtaatactggatttagcttttctgtgcctttcaaaaacaacaggtgggccttattgacgtgatagtgtcgtggagaacaggcatcaacaatactgctgctcccttcaacatagatttattatggtatttctgaaatttctaacttatatgttctgtcttacaccttttatgacatagaactcttttgttctgtttttgctttgcgacactgtgaaccgtgcttctgcctcggaacctccctagttatattacttgtgccacatggatttctttaggattattgattcaaacctagagttgtctggaaaatgtgggttctcttctttgtgattgtctgtagtatgctttgaaggtgctctgcagtggtagacacactggttctggcctcatttaatgaaattaataacacatgcccctatttctcttttggatgatgtgtgggtgggtgggtactgaggtttcctggccagctgtaaggcagattttgacattcttgtgccagaaacagaaattagagtagtccagttacccagagagctcacttaacattgcctctttacttccccagtactgaaacatttcttcaagtataacataaaattaccgtaacaagcagacccagaatactgaaaataactccatttgttcattataggtatctttatttgaaaagtgaaaaatgctttgacacattacagatctgggtatttggattttgcctatggagtgcatatatgatttcaatgatttacaggctaaatagattttagaaataatcatcttaaaattgaaaacaaaggtaggtcctggtataatattaaacataaagttattaaacattttaagcattgtt

SEQ ID NO: 2725 - DNA, 1424 bp, Homo Sapiens
  NM_005731
ctccctccgtccttgcctcccttacccaccctcaccggcccttgtttctccttcccctgggggcagccgccgccatgatcctgctggaggtgaacaaccgcatcatcgaggagacgctcgcgctcaagttcgagaacgcggccgccggaaacaaaccggaagcagtagaagtaacatttgcagatttcgatggggtcctctatcatatttcaaatcctaatggagacaaaacaaaagtgatggtcagtatttctttgaaattctacaaggaacttcaggcacatggtgctgatgagttattaaagagggtgtacgggagtttcttggtaaatccagaatcaggatacaatgtctctttgctatatgaccttgaaaatcttccggcatccaaggattccattgtgcatcaagctggcatgttgaagcgaaattgttttgcctctgtctttgaaaaatacttccaattccaagaagagggcaaggaaggagagaacagggcagttatccattatagggatgatgagaccatgtatgttgagtctaaaaaggacagagtcacagtagtcttcagcacagtgtttaaggatgacgacgatgtggtcattggaaaggtgttcatgcaggagttcaaagaaggacgcagagccagccacacagccccacaggtcctctttagccacagggaacctcctctggagctgaaagacacagacgccgctgtgggtgacaacattggctacattacctttgtgctgttccctcgtcacaccaatgccagtgctcgagacaacaccatcaacctgatccacacgttccgggactacctgcactaccacatcaagtgctctaaggcctatattcacacacgtatgcgggcgaaaacgtctgacttcctcaaggtgctgaaccgcgcacgcccagatgccgagaaaaaagaaatgaaaacaatcacggggaagacgttttcatcccgctaatcttgggaataagaggaggaagcggctggcaactgaaggctggaacacttgctactggataatcgtagcttttaatgttgcgcctcttcaggttcttaagggattctccgttttggttccattttgtacacgtttggaaaataatctgcagaaacgagctgtgcttgcaaagacttcatagttcccaagaattaaaaaaaaaaaaaaaagaattccacttgatcaacttaattccttttctttatcttccctccctcacttcccttttctcccaccctcttttccaagctgtttcgctttgcaatatattactggtaatgagttgcaggataatgcagtcataacttgttttctcctaagtatttgagttcaaaactcctgtatctaaagaaatacggttggggtcattaataaagaaaatctttctatcttaaaaaaaaaaaaaaa

SEQ ID NO: 2726 - DNA, 3471 bp, Homo Sapiens
  NM_005733
tttttccccttaagacaaagcaagcaccctaaaccagttaccctgtgcactcctgttaagattgttgctaaggaaggacaggagttggctgctgaagcctcaagatttcctttaggctcttaggtaagaaatgtctaaggttcaaggaaaaaggttaagttggaagaatcccaggcaaaataagtgcgaatccacgacagttggtaacccggacccacattagaactcagaggtcaagcagaagcgaacgactggaattccagtcaggcccgccccctttccttacgcggattggtagctgcaggcttccctatctgattggccgaacgaacgcagcgcgtaatttaaaatattgtatctgtaacaaagctgcacctcgtgggcggagttgtgctctgcggctgcgaaagtccagcttcggcgactaggtgtgagtaagccagtatcccaggaggagcaagtggcacgtcttcggacctaggctgcccctgccgtcatgtcgcaagggatcctttctccgccagcgggcttgctgtccgatgacgatgtcgtagtttctcccatgtttgagtccacagctgcagatttggggtctgtggtacgcaagaacctgctatcagactgctctgtcgtctctacctccctagaggacaagcagcaggttccatctgaggacagtatggagaaggtgaaagtatacttgagggttaggcccttgttaccttcagagttggaacgacaggaagatcagggttgtgtccgtattgagaatgtggagacccttgttctacaagcacccaaggactcttttgccctgaagagcaatgaacggggaattggccaagccacacacaggttcaccttttcccagatctttgggccagaagtgggacaggcatccttcttcaacctaactgtgaaggagatggtaaaggatgtactcaaagggcagaactggctcatctatacatatggagtcactaactcagggaaaacccacacgattcaaggtaccatcaaggatggagggattctcccccggtccctggcgctgatcttcaatagcctccaaggccaacttcatccaacacctgatctgaagcccttgctctccaatgaggtaatctggctagacagcaagcagatccgacaggaggaaatgaagaagctgtccctgctaaatggaggcctccaagaggaggagctgtccacttccttgaagaggagtgtctacatcgaaagtcggataggtaccagcaccagcttcgacagtggcattgctgggctctcttctatcagtcagtgtaccagcagtagccagctggatgaaacaagtcatcgatgggcacagccagacactgccccactacctgtcccggcaaacattcgcttctccatctggatctcattctttgagatctacaacgaactgctttatgacctattagaaccgcctagccaacagcgcaagaggcagactttgcggctatgcgaggatcaaaatggcaatccctatgtgaaagatctcaactggattcatgtgcaagatgctgaggaggcctggaagctcctaaaagtgggtcgtaagaaccagagctttgccagcacccacctcaaccagaactccagccgcagtcacagcatcttctcaatcaggatcctacaccttcagggggaaggagatatagtccccaagatcagcgagctgtcactctgtgatctggctggctcagagcgctgcaaagatcagaagagtggtgaacggttgaaggaagcaggaaacattaacacctctctacacaccctgggccgctgtattgctgcccttcgtcaaaaccagcagaaccggtcaaagcagaacctggttcccttccgtgacagcaagttgactcgagtgttccaaggtttcttcacaggccgaggccgttcctgcatgattgtcaatgtgaatccctgtgcatctacctatgatgaaactcttcatgtggccaagttctcagccattgctagccagcttgtgcatgccccacctatgcaactgggattcccatccctgcactcgttcatcaaggaacatagtcttcaggtatcccccagcttagagaaaggggctaaggcagacacaggccttgatgatgatattgaaaatgaagctgacatctccatgtatggcaaagaggagctcctacaagttgtggaagccatgaagacactgcttttgaaggaacgacaggaaaagctacagctggagatgcatctccgagatgaaatttgcaatgagatggtagaacagatgcaacagcgggaacagtggtgcagtgaacatttggacacccaaaaggaactattggaggaaatgtatgaagaaaaactaaatatcctcaaggagtcactgacaagtttttaccaagaagagattcaggagcgggatgaaaagattgaagagctagaagctctcttgcaggaagccagacaacagtcagtggcccatcagcaatcagggtctgaattggccctacggcggtcacaaaggttggcagcttctgcctccacccagcagcttcaggaggttaaagctaaattacagcagtgcaaagcagagctaaactctaccactgaagagttgcataagtatcagaaaatgttagaaccaccaccctcagccaagcccttcaccattgatgtggacaagaagttagaagagggccagaagaatataaggctgttgcggacagagcttcagaaacttggtgagtctctccaatcagcagagagagcttgttgccacagcactggggcaggaaaacttcgtcaagccttgaccacttgtgatgacatcttaatcaaacaggaccagactctggctgaactgcagaacaacatggtgctagtgaaactggaccttcggaagaaggcagcatgtattgctgagcagtatcatactgtgttgaaactccaaggccaggtttctgccaaaaagcgccttggtaccaaccaggaaaatcagcaaccaaaccaacaaccaccagggaagaaaccattccttcgaaatttacttccccgaacaccaacctgccaaagctcaacagactgcagcccttatgcccggatcctacgctcacggcgttcccctttactcaaatctgggccttttggcaaaaagtactaaggctgtggggaaagagaagagcagtcatggccctgaggtgggtcagctactctcctgaagaaataggtctcttttatgctttaccatatatcaggaattatatccaggatgcaatactcagacactagcttttttctcacttttgtattataaccacctatgtaatctcatgttgttgtttttttttatttacttatatgatttctatgcacacaaaaacagttatattaaagatattattgttcacattttttattgaattccaaatgtagcaaaatcattaaaacaaattataaaaggga

SEQ ID NO: 2727 - DNA, 4743 bp, Homo Sapiens
  NM_005734
ccgggaaggaagatgagggagacgggcccggcgcttagcagccagagcagcagcagcagcagcagcggtcgggggagggtgtttcgccgtttcctctcagccgccaggacaagatggcagcggccgcggagaggggctgagcccgggctgggtggtgccgcctgctgaagcgcctggctcccggtccccggcacggccctgcgccccaccccggacatgctcagggctgcggccgcccgaagaggagagagcgcgggcctctaggaaggtatggcctcacaagtcttggtctacccaccatatgtttatcaaactcagtcaagtgccttttgtagtgtgaagaaactcaaagtagagccaagcagttgtgtattccaggaaagaaactatccacggacctatgtgaatggtagaaactttggaaattctcatcctcccactaagggtagtgcttttcagacaaagataccatttaatagacctcgaggacacaacttttcattgcagacaagtgctgttgttttgaaaaacactgcaggtgctacaaaggtcatagcagctcaggcacagcaagctcacgtgcaggcacctcagattggggcgtggcgaaacagattgcatttcctagaaggcccccagcgatgtggattgaagcgcaagagtgaggagttggataatcatagcagcgcaatgcagattgtcgatgaattgtccatacttcctgcaatgttgcaaaccaacatgggaaatccagtgacagttgtgacagctaccacaggatcaaaacagaattgtaccactggagaaggtgactatcagttagtacagcatgaagtcttatgctccatgaaaaatacttacgaagtccttgattttcttggtcgaggcacgtttggccaggtagttaaatgctggaaaagagggacaaatgaaattgtagcaatcaaaattttgaagaatcatccttcttatgcccgtcaaggtcaaatagaagtgagcatattagcaaggctcagtactgaaaatgctgatgaatataactttgtacgagcttatgaatgctttcagcaccgtaaccatacttgtttagtctttgagatgctggaacaaaacttgtatgactttctgaaacaaaataaatttagtcccctgccactaaaagtgattcggcccattcttcaacaagtggccactgcactgaaaaaattgaaaagtcttggtttaattcatgctgatctcaagccagagaatattatgttggtggatcctgttcggcagccttacagggttaaagtaatagactttgggtcggccagtcatgtatcaaagactgtttgttcaacatatctacaatctcggtactacagagctccagagattatattggggttgccattttgtgaagccatagacatgtggtcattgggatgtgtgattgcagaattatttcttggatggccgctctacccaggagccttggagtatgatcagattcgatacatttctcagactcaaggtttgccaggagaacagttgttaaatgtgggtactaaatccacaagatttttttgcaaagaaacagatatgtctcattctggttggagattaaagacattggaagagcatgaggcagagacaggaatgaagtctaaagaagccagaaaatacattttcaacagtctggatgatgtagcgcatgtgaacacagtgatggatttggaaggaagtgatcttttggctgagaaagctgatagaagagaatttgttagtctgttgaagaaaatgttgctgattgatgcagatttaagaattactccagctgagaccctgaaccatccttttgttaatatgaaacatcttctagatttccctcatagcaaccatgtaaagtcctgttttcatattatggatatttgtaagtcccacctaaattcatgtgacacaaataatcacaacaaaacttcacttttaagaccagttgcttcaagcagtactgctacactgactgcaaattttactaaaatcggaacattaagaagtcaggcattgaccacatctgctcattcagttgtgcaccatggaatacctctgcaggcaggaactgctcagtttggttgtggtgatgcttttcagcagacattgattatctgtcccccagctattcaaggtattcctgcaacacatggtaaacccaccagttattcaataagggtagataatacagttccacttgtaactcaggccccagctgtgcagccactacagatccgaccaggagttctttctcagacgtggtctggtagaacacagcagatgctggtgcctgcctggcaacaggtgacacccctggctcctgctactactacactaacttctgagagtgtggctggttcacacaggcttggagactgggggaagatgatttcatgcagcaatcattataactcagtgatgccgcagcctcttctgaccaatcagataactttatctgcccctcagccagttagtgtggggattgcacatgttgtctggcctcagcctgccactaccaagaaaaataaacagtgccagaacagaggtattttggtaaaactaatggaatgggagccaggaagagaggaaataaatgctttcagttggagtaattcattacagaataccaatatcccacattcagcatttatttctccaaagataattaatgggaaagatgtcgaggaagtaagttgtatagaaacacaggacaatcagaactcagaaggagaggcaagaaattgctgtgaaacatctatcagacaggactctgattcatcagtttcagacaaacagcggcaaaccatcattattgccgactccccgagtcctgcagtgagtgtcatcactatcagcagtgacactgatgaggaagagacttcccagagacattcactcagagaatgtaaaggtagtctagattgtgaagcttgccagagcactttgaatattgatcggatgtgttcattaagtagtcctgatagtactctgagtaccagctcctcagggcagtccagcccatccccctgcaagagaccgaatagtatgtcagatgaagagcaagaaagtagttgtgatacggtggatggctctccgacatctgactcttccgggcatgacagtccatttgcagagagcacttttgtggaggacactcatgaaaacacagaattggtatcctctgctgacacagaaaccaagccagctgtctgttctgttgtggtgccaccagtggaactagaaaatggcttaaatgccgatgagcatatggcaaacacagattctatatgccagccattaataaaaggacgatctgcccctggaagattaaaccagccttctgcagtgggtactcgtcagcaaaaattgacatcagcattccagcagcagcatttgaacttcagtcaggttcagcactttggatctgggcatcaagagtggaatggaaactttgggcacagaagacagcaagcttatattcctactagtgttaccagtaatccattcactctttctcatggaagtcccaatcacacagcagtgcatgcccacctggctggaaatacacacctcggaggacagcctactctacttccatacccatcatcagccaccctcagtagtgctgcaccagtggcccacctgttagcctctccgtgtacctcaagacctatgttacagcatccaacttataatatctcccatcccagtggcatagttcaccaagtcccagtgggcttaaatccccgtctgttaccatccccaaccattcatcagactcagtacaaaccaatcttcccaccacattcttacattgcagcatcacctgcatatactggatttccactgagtccaacaaaactcagccagtatccatatatgtgaaaaacagtatattggggaagctcaatgatacaaacatttgattaaaaataaaaacatggtatttaatattagccatggcacaagaaaattatttttgaatcatgtagacttgggtgcaatttaaacaactttgagctttaaaaactcacttttgatgtgttttgcacatttggtataacttgtctttggtcatgttatcttcttatgtagtaactctagacaggtgacttatgggagcagaagtccagttttgctcctgctattttttataaattgccttctaactagtgcaagacacgtctacatttgggaagccattctgtgtacagacttagagcaacagatgcacatatgtcagaattacagcatacaagtgaattgtattatccgtgtcttagtgtataaatgttgggtcacttacctaagaaattgagctattgttctttacatttgcatgtgtcttttgcatgggcaaaatgttgcctagactttgctcttaaatgttgttctaataatctcagctgcattgtaaaccgttcctacacatagtgccttaaatatttgaggttgttaatgttattacctatatataaatgttgaggactgcagcacttaaaattcagacctactatttagtttccttttgatagcgtaatgttcatttttgtttttgtgtggtatgatttcaggtagtagctgtttttttccttattaagagggcagcatgtttgctatagctgaattctgctgtctgatttttcagaatgatctagcttcaagaaaagcaagcagttagtagtgcttaagaaaaattgattcagtatc

SEQ ID NO: 2728 - DNA, 2258 bp, Homo Sapiens
  NM_005735
ctgctgtcaatcgggccaggtgggagcgatgattggccgccgggcccgccctccagaaagccccgcggggctcgcgtaggctgcaggctcggggagggagggcagcggcgccgcgtcgggagccgccgccgtcccggtcctcccgcccgcccgcccatccggtgcctcctgcagcccgcctgctgggcagggccggcgcggcccggccatggagtcctacgacatcatcgccaaccagcctgtggtcatcgacaacggttcgggggtgattaaagctggctttgcaggagaccagattcccaaatactgtttcccaaactatgtcgggcggccgaagcacatgcgggtgatggctggagccctggagggggacctcttcatcggaccaaaagcagaggagcaccgggggctgctgaccatccgctaccccatggagcacggcgtggtgcgagactggaacgacatggaacgcatctggcagtacgtctactccaaggatcagctgcagaccttctcggaggagcatcctgtgctcctcacggaggccccgctcaacccgagtaagaaccgggagaaggcggcagaggtgttctttgagaccttcaacgtgccggccctgttcatctccatgcaggctgtgctcagtctgtacgcaacaggacgcacgacaggagtggttctagactcaggggacggggtcactcatgctgtgcccatctatgagggctttgccatgcctcactccatcatgcgggtggacattgccggccgcgacgtctcccgctacctccgactcctgctgcgcaaggaaggggttgacttccatacctcggctgagtttgaggttgtccggacaatcaaagagcgagcgtgctacctgtccatcaacccacagaaggatgaggctctggagacggagaaggtgcagtacacgttgccagacggcagcacgcttgatgtggggcctgcacgattccgggcccccgagctgctgttccagccggaccttgtcggggatgagagtgaggggctccatgaggtggtggccttcgccatacacaagtccgacatggacctgcgccggacgctgttcgccaacatcgtgctctcaggtggctcaacgcttttcaaaggcttcggagaccgattactcagtgaagtgaagaagcttgccccaaaggatatcaaaatcaagatctcagccccgcaggaacggctgtactccacatggattggcggctccatcctggcctcgctggacacttttaagaagatgtgggtgtccaaaaaggagtatgaagaggatggctcccgtgctattcatcgcaaaactttctagtgcccaaggagggcggggcatgttgggagagggggagggaggggagacagagcctttaaccctttttggtcttggctcgtatactaggcttagggtcccctgcatgccctgaacccctgggtgggtggcacagcagtgcccccctgcagccttcccctctacacaggacatgcacacacaagtaacattgagctgcatggacaggagccttgagctggcgtgtgggaattgagcgccatgtcaggctgttgtgggtatccccctggcagggccagctaggcctgtggttccctgctccgactctcagggctgcctccctgagctccagggccagaatgcctggatgcctgggtagccagtttggggagtgggctgcaaggggcagccagcagctcccactggtgtgtcactgcatccattgccacctcctgttcgtgacctgacagggtgacacagcccctttcacactctgtcctcctatcttcctgggtagatgccctggtgtagggctgagtactgaatggtcttccatccccagcaagggggtgcagcccagggtcaggcccttcagagccagggcagaggatgcacggtggctagagccgctgcactatccttttcagagcacttcatccacttgctcctccctctaccctcggcaccctgggtgggaaagggttgatgctcatcatttattgaggggaagccacttaataaggagtcagacctaaaagggggtgggggacattttcttacctcacccaagaaagaggtcgtcacttttgctgtggccagggccccacctccctctctcagatatgtacaataatttaacacggttgcctgaaaaaaacttttgtaaatcattatagtaataattatggacaaggcccagtgtgtggctctgttttcttgtggc

SEQ ID NO: 2729 - DNA, 4024 bp, Homo Sapiens
  NM_005737
gtgaggctgccgagcggacagcgactcccggggaagcccgcgctccgggagcgggagcgggagcaggagcaggagcagcgccgtcccaggccagaggcgagcgccgggcgccgggagagcggagagcccgggcagctgccggagcgcgggggcgcggcccgaggaaaccacagagcgagcccaggcctggggagggcgccgaacatctgaggcggcttcgcgggagacaaagccgcgcgtagagacgcgatgcccgccgatcgcgagcccggccggcgagggcgcggggactgcggcgtctgagcgcgccaagccgtgcgcccgcggggacgccgagccccggggccggtgcgggcggcggcgggcggggcccaggtgcgcccggccgcgtcgggcccgtgactgctcggggggcggcgccctcccgccgcagccgcagtggctggcgccgcagccaggagccatgggcaacatctcctctaacatctcggccttccagtccctgcatatcgtcatgttgggcttggactcggccggcaagaccacggtgctctaccggctcaagttcaacgagttcgtgaacacggtgcccaccatcggcttcaacaccgagaagatcaagctgagcaacggcacggccaagggcatcagctgccacttctgggacgtgggcggccaggagaagctgcggccgctgtggaagtcctacagccgctgcacggacggcatcatctacgtggtggactcggtggacgtggaccggctggaggaggccaagacggagctgcacaaggtgaccaagttcgccgagaaccagggcacgccgctgctggtcatcgccaacaagcaggacctgcccaagtcgctgccggtggcagagattgagaagcagctggcgctgcacgagcttatcccggccaccacctatcacgtccagccggcgtgcgccatcatcggcgagggcctcaccgagggcatggacaagctctatgagatgatcctgaaacgcaggaagtccctcaagcagaagaagaagcggtaatgcgcccggagcgaccggggagcgagcgagtgcgtcaagaaagaatgaatggatggatggatggttggatggatggatggatggatgagcgagaacccgcgcccgcgaacaaagagcgaaccaaagcgatgcttcgaatttttaaaacggaatctctgcacccaaatgcaggactggtgacttaaggagctgcgaagtctgatttaccggcctactctcgacctgccccccacccccagctcaggggaccttttgtctgaacgccagagctactgaccaggtcggggggccgcggtggggagtggaagagccggtcctgctgtccgccctcccagccccaggtggaaggctcagttgtcggaaagacaaaagcgatttcttcccactcctgcagggccagaagttcaggctgccccgcctccactgggggatcgcacctgtgaattacctgaggtatgcatttcccagaaccgtgggcgtacccaccttggggggcatgttggttctggggggaccacctctccttgcattcaggggctgtgaagctgagtaattttcggtcacagggcaggcccctgttgaaatttcatttgtcctgctctgggcccaaaggtggtggtggtttgggtcatcagaggactgcctgggacggttcagcgggcacggagcgctgtgctggcctggctggggatggccgcggaggtgcccttttcctggtgctttgtggtggctgcagaagaccagttttgttgagaactgcttttcagcctggaatcagacatcttccagatggtttggaccctgtccatgtgtaggtcattatcacacaaagagaccaataaaaataaaaaaaataaaaaaaaaaaaagacgaactattggaggtggtggccaatgatgcatttactgtttgcaggatagttaaaggtgtttaaagggtaaggcttttggtgtaaatgctggatggggtgtgtgtgtgtgtggatatagggacctccctctgtactgtgtactgtgtaatcggcattaatacctagactcatatgtatggaattttaaattctcttagcctactgattggtttggatgagcacaccagctgcaggtgtgtgctgaattgcaagatggtatttttttttttaaccaagggatgtctcttgtaatactaaccgcgtgataatgggttttcagacatgatgaaaaaaaaaaacttttacaaatgaatacttaccttagaaatattcaccttaggaaaaaagactttgctctgcccttttatattcctttatgctgcaagtggtgacatgttcagatttctaatttggttcattgtggcctatctggtttaagtctttcattaaaaatgtctcgttagagtatttgatgtcatgcaccaaaaaaataaaaccccaccttgttgcaaaagctgacctcgttgcatggaattaaaagagaaggaaaaacacaaggatgaagtctttccgaattcattcttgtgggaactggccttcggagccagccagcactttgggcaaatgcaaacaacaatgagtgcttgagataaaagaaagtgtgacgtcatggtcactggtactcaggcacttcacagtttacttgaaagaggctttggaaaatagataaagtgaaagaagaataaatacatatttttaataatgtaattttaaaaatcctttataatcaggactgagtcttggtttgcagaagctgtcacttaccctgaaacacagtatcaaaagggaaacttaaaacatactgtttgatttttttatttcctcttacaatccatgttttcaggtagaattatgactttccccccattgttacacatttctttacaaaggaggcctgtagaaattggacacgatcatgcttgagcatgtgagttagtcaaattatgagtccctgcctattgtccattacacaccgaatgttaatttaagaaccagaggcagaagttctggcttcctgcttgaaacccaattcttatatgaaattttttaaaagcagaaacctagcagcccatctgctttttctcttttgtcggtgtatttggtacccctccaatgctggtctttttgtagaaactcagtagagaaagtctagctaagcagtgttgaaaagcctgcaagatttcagtttacatatcgacagcatatccactgatttctaaatgggctggtcccatcatctgaagattctgtatagaattattaaaaaaaaaatccatctttctttattttcttcacatgcgacaatttcttaagcactttgacattttggtagttccacactattgagagaataatatatttattttgtgacattgcagatgccaaatactgtaaccttctcatgataacaatacttaggttcaagatcactgttcaaaccctgtcatgctttaaaactgatgcgagatgattttgttttttgcataatcaatacttaagggtgcaatcaactgttagtaattgtgcagtaaagtaaagccctgtggtgtatcaactactagttaagagtctcagttgatttctgtaatgtttgacctaataatagcccgtttcgtctctgacccaacagaggaagcacagatcaaatcaccttggagtggtcaccagggggacagggagccccccaccaatgtatcaatgggtgatttatgatgccttctgccctttggcgagtgaatgggtttcccataggggaagttggcctccctccgtgagctttggaaatgttttctaatagacacagggaggccagttctgtttcagagcaattatcttcccaaattctctgttctggtgttggaactgtgtgccctggtttctgttttcctttctactgctgtaattctctgtctcatcatccttctcttttgtttccatagccttttataatgcatatatgatgctgtgaacagaaataaattatttatacaatcaaaaaaaaaaaaaaaaaa

SEQ ID NO: 2730 - DNA, 3212 bp, Homo Sapiens
  NM_005738
tggcttgacgccctggctgcgctgcaggtgcgccgggccgaacggagccggcagcctggcggcgacctgaccgcccgaggctccccttcacctgcagcggctgctcggctccctctgggaacgccgccttttctaacttaagggcaacaggtggtgccggtggaccgagagagagctcagctccgccgcgctgggagcggcagttaccctcaccaattagggagcgggggcgggagttgcatggcttccctgatgcgggtgaccaatgggatttgggatcatgagtggaccgggaggagtgggcgtggtcggagtctgagtccaaggtttctcgtgcggcaactgccagagctgcttggagagctaagctggaagggtgcttatccctgcgtagaaacgcctgccaatgctttctcatttggacccagactccagatcgggagcagtcttatagctggatcagctaccaagagaagttgtaaaccaagaagagaaaagcatttcaatttgggacatttatttgcacctggaaatggggaatgggctgtcagaccagacttctatcctgtccaacctgccttcatttcagtctttccacattgttattctgggtttggactgtgctggaaagacaactgtcttatacaggctgcagttcaatgaatttgtaaataccgtacctaccaaaggatttaacactgagaaaattaaggtaaccttgggaaattctaaaacagtcacttttcacttctgggatgtaggtggtcaggagaaattaaggccactgtggaagtcatataccagatgcacagatggcattgtatttgttgtggactctgttgatgtcgaaaggatggaagaagccaaaactgaacttcacaaaataactaggatatcagaaaatcagggagtccctgtacttatagttgctaacaaacaagatttgaggaactcattgtcactttcagaaattgagaaattgttagcaatgggtgaactgagctcatcaactccttggcatttgcagcctacctgtgcaatcataggagatggcctaaaggaaggacttgagaaactacatgatatgatcattaaaagaagaaaaatgttgcggcaacagaaaaagaaaagatgaatatcaatacctattatatctgtgtggagtaggttttctctggtctgattttgacaaatagaagagtgtctacagcgtggtttgcctgtctgccctcctggatgctattaaagctttgttttgttgaacaatcagatgcccaactctgttgccttgtggaagatgagtaaatgcagtgcttcttaaagtggtctcttctccctaccccacaaatcttttggtactaccatttggggaagccaagcaaggatagtaaattgaccagaacacagttgtgggaatttggtctgaagttagtgaaataaaactttaaagagtgtctgcctagtgttttgtgcttacatctttcggggggaagcctttgcaagaaaattgcatacaaggctttgtaacgatcaagtgctaatcgatggaaatgttaaggtagattaacatatatgcagttatattgatcacattggtccaaccagtccttttttgaagtaagggacaaggagtaagtattttcttttttaagtttctgccaaatgatttttgacgctttctggaatcaagtaatttaatagtatagcttaattctagacaatgtttaagttggtctacctttattaaaaataagatatttggggtatattcaagtgcatggattagttttcctgacaaagcatgttttggtgtgtagtcttactttttagaaatagctatgcatcgttctacacaggtttaaaacaacttttttggggatttagggctattataggaatagtttgttgtcagaagcactttcacttgaagaacctaaaatgattgactcattcatagtaaatatgggcatgtaaactaataaatatgcactggatacatatatggatttatgaagaaggcgatttagtcaagaggatgtaattaaaatatgtggtctctaaaatattccagttacaagatatttgttttattaatatttgctggctaaaaacaaatgtggtttttatatatttttgtagtgtgttgagaagagcaaaagctttataaatatacctgatgcgctgtagaatgaaaatgtaaaagataacctgtatgtgttccgagctttaattttttgtttacaaattgaacagtgttacatgggctgtccagtcctgattatagagaggaagaaatggtaacagtatggcagataagaattacaattatagaaaatgaggggaaaataacaaacctgttttatgaaaattcactggtgctgtttacattggaataaaaagctctataaggaggaaaggcctttatctaattcttatctacagacacttacttccagtgaccatattttactaaatcagcttattttttatgtctaaagcaacagctgttctgaaaaatcaccaaaagaaatgcactttgctagcaggatttgttttggctttgggttttgtttttttgttttttttttttttcagtggcataacagtttttggaaccttgattcttgtgtcacacaaaatgaatgaagtagcttgatgtggagccttcatatgttaaatattcctgcactagtgatggtcacttagaatgtttatagaaatgtggataataactaccaataaactacttgaggcactaggagaacagtatttgactttgaattttaatgtatttccacttttgctgaagcttttaatcagatgtgtaaaaacaattgaccagctaggctatttagtcccatagtagttcagatctgcttagatgtgacaggcattgaaggctgtttttttttttttctcccttcactgatactgaaatcatggtatctgctgcaaacatgagtagatccatgatggattaataaagcttgctgaaaaaaaaaatctgtgtatcaattagatttaccagtttgcctgtactttctgtctacctactatgtaaaatagtgctgtttttaagtatttcaaaagcttgtgtgttgaccctttgtagcctaagtacgtaaacaaattaatgttatctaagtttttcatatttcatggacaacaaaagagaaaatggtatgaacactgtacaaactttgatttataaa

SEQ ID NO: 2731 - DNA, 5048 bp, Homo Sapiens
  NM_005739
acaaagtttgtgcctgcggtgcacctcggtcgggctcgccgggctcgagggctggcgggcgccggggctacgaggcccgggggggagagagccggcaggcggcggcggtggtggcgggggcgatgcgccgcgcccggccgcgctaggtgagccggcaccgggagcgcgggccgcggccatgggcaccctgggcaaggcgagagaggctccgcggaaaccttcccatggctgcagagctgcctctaaagcaagactagaggcaaagccagccaacagccccttcccctcccatcccagcttggcccacatcacccagttccgaatgatggtgtctctgggacatttagccaaaggagccagcctggacgatctcattgacagctgcattcaatcttttgatgcagatggaaacctgtgtcgaagtaaccaactgttgcaagtcatgctgaccatgcaccgaattgtcatctcctctgcagaactgctccaaaaagttatcaccctctataaggatgctttggcaaagaattcaccaggactttgcctgaagatctgttattttgtaaggtattggataacagaattctgggtcatgtttaaaatggacgccagcttgacagacactatggaggagtttcaggaactggtgaaagctaagggtgaggagttacattgccgcctgattgacacaactcaaatcaatgcccgtgactggtccaggaaacttactcaaaggataaaatcaaataccagcaagaaacggaaagtctccctgctctttgaccatctggaaccagaagagctatccgagcacctcacctaccttgagttcaagtctttccggaggatatcgttctctgattatcagaattaccttgtaaatagctgtgtgaaggaaaaccccaccatggagcgatctattgctctgtgcaacggcatctcccagtgggtacaactgatggttctcagccgccccacgccgcagctccgagcagaagtcttcatcaagttcatccaggtggctcagaagctccaccaactacagaacttcaatacactgatggctgtgataggtgggctgtgtcacagctcaatctcgaggctcaaggagacaagttcgcatgtcccacatgaaatcaataaggttctcggtgagatgactgagctgctgtcctcctccagaaactacgacaattaccggcgagcctatggagagtgcaccgacttcaagatccccattctgggtgtgcatctcaaggacctcatctccctgtatgaagccatgcctgactatctggaggacgggaaagtgaacgtccataagctactggccctatacaatcatatcagtgaattggtccagctgcaagaggtggccccacccttggaggctaacaaggacttggtacacttgctgacgttatccctggatctttactacactgaggatgaaatctatgagctttcctatgcccgggaaccaaggaaccacagagctccaccactaacaccttcaaagccaccagtagtagtggactgggcttctggagtgtctcccaaacctgatccaaaaaccattagcaaacacgtccagaggatggtggattctgtcttcaagaactatgatcacgaccaggatggatacatttctcaggaagaatttgaaaagattgctgcgagttttccattttccttctgtgtgatggacaaagacagggaaggcctcatcagcagggatgagatcacagcctacttcatgagagccagctcaatctattccaagctgggcctgggctttcctcacaacttccaagagaccacctacctgaagcccactttttgtgacaactgtgctggatttctctggggagtgatcaaacaaggatatcgatgtaaagactgcgggatgaactgtcacaaacaatgcaaagatctggttgtgtttgagtgtaagaagcgagccaagaacccagtagctcccacagagaacaacacttctgtggggccagtgtccaacctttgctcattgggagccaaagatctgctccatgcacctgaggaaggaccttttacattccctaatggggaggctgtggaacatggtgaggagagtaaggatcggaccatcatgctgatgggagtgtcctcacagaagatttctcttcggctgaagagggctgttgcccacaaggccacccagactgaatcacagccttggattggcagtgagggcccttcaggtccctttgtgctgtcttccccaaggaagacagcccaggatactctatatgtgcttcccagtcccacctctccatgtcctagcccagtcttggtcagaaagcgggcttttgtcaagtgggagaataaagactccctcataaaatcaaaggaggagctccgtcacctcagactgcctacctaccaagaactggaacaggaaataaatactctgaaagcagataatgatgccctaaagatccaactgaaatatgcacagaagaaaatagaatccctccagcttgaaaaaagcaatcatgtcttagctcaaatggagcagggtgactgttcttagcccagaaactaagtagcacaatctgtagatgagtatagtgatctcatttcctaaactgtaatgcacagacctgaggaactttacactgaccagctttaaaacagtactttaaaaggaaaagcctgttactgtttatttacctaaaagattcctaatgtgcagcactgttttctctttcagttagttgactcaaagggggaaaactaaagaatgcaaaacttttgctattcataccactgatgttcatcaaaagtatgcgatctaaaacatgactatcatttcctgacaatggggcatctcggtggcctgcctggctgattcttccttaaaactaaaatctctggaaaatggatttgcttcttaccctgtgttttctgcaaactgacttactttgttccagccaaagcttgctaataatagaaaactacccatattccaaaagtagatttcctctgtatcccagcatactttgtgaacctggctccttcttcactacctcagatctaatcaattagtccatgtaccctccttcctcactacagtcataacacatgagcatatctacctagaagccaatttctactgatgtagccacaactttttagaggcctattaaacatgacgttatccaattgcaggtcaacttatagttgtagccttacaacttacaggcatcagaaaataagtaatcaaattaggtacctggaaacatagctattaccatctcatattactgtctaattaaaataaacataacgcaaacatgtttgtccttatatattctacagtggatagaattaggaattgatggcttaaaaaaaaaagtctatgaagagtctgtttaactcttcatgttccatctttctcttctgaagtaaactattttgaaagttctctttttgaaatgaatttgtgcttaactgtcttcactattaatactatttagaaataagctaattggatcagtggcttaaataatagctgactgtgtgtacatatgtatataatatgtatatacaatatcaggcatgcatgtggcttggaattttgtttcctccataaaatgtggaagtgaattaaacaagttttagtcatttatacaaagtcacaaatataaagttcagtttgtcacaagattaaattgctcacaaggtaaaattgtattgtttggcaaaatcacaagtaacaatcctgtgagttttctattatgaaggttaataataaatgggctcatttagttgcctgggcacctattcacaaattcatttgtcagcctctttttagttctcttaaaaaaaaaaaaatcatatgatcattttcctttttgggggtacttagcttccatgcctataaagtctggtaccagactgacttgaaattcataaacaagttgtccaattgccaagaatatgttaacaattaaaagttccaaactaaagccaatagcaccaagtcttcataagaatacaaagtatacatacagtattgcttacctggaggattcagatcatttaggaattctctttgatgaaagatcagttcccatttgagttcctccttgcactgagttttagtgatatagaactagcttgtagttagtgtttcattacattataaagaatagttttacacacgtatttaccgttttccaaatttaaactcagaaatacccaaagcaggcctgcttaagcccactacctggcatataaacttatagtaacactttgttactttctttttaataggacaagcatgagttaggacaaactctaaaaattcatattcttcactattcttgttttcctttgattgatatagaccaaagatggtgtactctaattttttaaaacagtaatggaacacaatttttttcattcttcctcctctccattcgaagtaaagatccccagttagtttttatataaataatctatagggattcaaaaggtgtcacagtccacttaattagtcaaattagcaatggctaaacagtatcaagtactgcagaatttatcactgaaatggataagaggaaatagtttagtcacaggtttttacagtccagcaagggccaaagaggtatagtatacaagttaatagtatttgtgttgagcaacatggggctagtgggatcacagaaatctggaaaaaaaaaaaaaaggctttggcttatcaagcctagtgtaaatttctgcatctcacacgactttagtttggccaggtatttatctgccaaaacaaggacaaatcttgttgtattaacagcagggtcacttctcattttctttgctgacttacctttttactgaccgttgtgaatttctgtctcaaaatgtataatatagaaatgcaagaaaaaaacaaatgtacagattgtaaagttttttgatacctaatgtaagttttctttgtgtaatatttatatgataaaagacattaggatccctacaacaaaaaaaaaaaaaaaaaaaaaaaa

SEQ ID NO: 2732 - DNA, 1504 bp, Homo Sapiens
  NM_005740
tggttgctaagacactcttgtttcgctccttgacaaccctggcgggggttcgctggctgcggccccggctccggcccccgcaggagcagcaccccccggggaaagacattttctgctcccaccgagttggcagggcctgcttcctgaatctcctgggtgtgtcttaactgccagtcccagcacctcctgaaagccccactctcctccagtggtcacagtggaaggatcatgggagaaacagaagggaagaaagatgaggctgattataagcgactgcagaccttccctctggtcaggcactcggacatgccagaggagatgcgcgtggagaccatggagctatgtgtcacagcctgtgagaaattctccaacaacaacgagagcgccgccaagatgatcaaagagacaatggacaagaagttcggctcctcctggcacgtggtgatcggcgagggctttgggtttgagatcacccacgaggtgaagaacctcctctacctgtacttcgggggcaccctggctgtgtgcgtctggaagtgctcctgacactctgtcccctgccccgtcccctgcagggccttttcctgccactcatctggggtggggagcagccctaggcaggtcctggtttttccaaggagagttggggtcttttctttttgtctttgtgtaccagtttcctgagccacgcccagtgtgtgaacttgacatctccatccccaggctctcaaccgtctccctcggagtctcagggtgtggacggggcagcgggcatgggtctgtgtgggagacgtggggtggggcggtgtgacagggtagaggaggtgggagatgagatcttccgcacaggaacacgccagtccccctttctccagggctgccttccccttgcatcctgggagccccactgccctgccatccccagtactgccgggaagtgtcggccgtccttgtcattagtggtcatatgaaaatggccccaagaaggagatgattctttcaagggacacaggcagcttctctccttgtcctctggggaggtgctgacccctcagaaaccccttcccccaacttgaccccaggctgaacagaccactgcatctcactgggccagcagcccccccagcccccagccttggtggggaccaagcagcctttcccgtcccctcctcgacccgtacagttgagagccaggggctggtgtgtgggagctgctacctggcagtttctcgaggggtcaccgagcctctggtgggacacctgggcaggagtgctctcaccacgaggctgcttccgcagggaaccctggcctgcccgcgacttcgcatcagggaccgcatgctgatttgtactgctctctgctgggttttctatgttcttttcgagtgtgggaaaagggttttagtagaagggtgaatcgtattttacacagcggtcttatttatataaatgtcttggtttttacaattaaaatgaccaaaaactgaaaaaaaaaaaaaaaaaa

SEQ ID NO: 2733 - DNA, 3305 bp, Homo Sapiens
  NM_005741
gcctaacttgcgcgctgagatttccggcgtgggagcagaggtctgagtcttgcgtgggtcctctatatagggtgagaagcgtggcgctcggttcctgcctcggggaagtcctggcgcagatgggccacggggccggcgtggcggcgcctgggaccgactgaggcctaggcgccggagccggccgcgcctgggctggagcggggctcctcggcctggactgggagcccccggccccgggctcctgctggcgccgtccaaccttacatgggttcagggcgccttcgtaggcgggcacggctggtttcgggctaaggcgctctggagacctgacgatggcgtcgggcccgggctcccaggaacgggaagggctcctgatagtgaagctggaggaggactgcgcctggagccaggagctgcccccacctgacccaggaccgagccccgaggcctcccacttgcgcttcagacggttccgcttccaagaggcagctggtccccgggaagccctcagccggctccaagagctttgccatgggtggcttcggcctgagatgcgcacgaaggagcagatcttggagctgctggtgttagagcagttcctgaccatcctgccccaggagatccagagcagggtgcaggagctgcatccggagagcggcgaagaagcggtgacccttgtggaggatatgcagagagagcttgggagactgagacaacaggtcacaaaccatgggcggggaacagaagtgcttttggaggagcctttgcctctggaaacagcacgagagtcaccgagcttcaagctggagccaatggagactgagcgaagccctggccccaggctgcaggagctgctaggccccagcccccaaagggacccccaggctgtaaaggagagggcattatctgctccctggctttctctttttcctcctgaagggaacatggaagacaaggagatgactgggccccagttgcctgagagcttagaggacgtggcaatgtacatctcccaggaggagtgggggcatcaggatcctagtaagagggccctctccagggacacggtgcaggagagttatgagaatgtggactcactggagtctcacattcccagtcaggaggtcccaggcacccaggtgggacaaggaggaaagctatgggatcccagtgtccagagctgcaaggagggcctgagccccagaggcccagctccaggagaagagaaatttgagaacctggaaggtgttccgtctgtatgctctgagaacatccaccctcaggtgctgcttcctgaccaggcccgaggggaggtgccctggagtcctgagctgggaagacctcatgaccggtcgcaaggggattgggcgcctcccccagagggtggaatggagcaggccttggcaggagcctcaagtggcagagaactggggcgaccgaaggaactgcagccaaagaaactccatttatgtcccttgtgtggcaaaaatttctctaacaactcaaacctaattaggcaccagagaatacatgcagctgaaagactgtgtatgggtgtggactgcactgaaatctttggtgggaacccacgtttcctgtcactacacagagcacacctgggagaggaggcccacaagtgccttgaatgtgggaaatgcttcagtcagaacacccatctgactcgccaccaacgcacccacacgggtgagaagccctatcagtgcaacatttgcggaaaatgtttctcctgcaactccaacctccacaggcaccagagaacgcacactggggagaagccctacaagtgccctgagtgtggggagatctttgctcacagttccaacctccttcggcaccagagaattcacactggagagcgaccttataagtgtcccgagtgtgggaaaagtttctctcggagttcacacctcgtcattcacgaaagaactcatgagagagagagactttaccccttctctgagtgtggggaagctgtgagtgacagcaccccctttcttacaaaccatggagcccataaggcagagaagaagctctttgaatgtttgacttgtgggaaaagcttccggcagggcatgcacctcaccagacatcagagaacacacacaggagagaaaccgtataaatgtaccctttgtggggaaaacttctctcatagatccaatttaatcaggcaccagagaatccacacaggagaaaaaccctatacctgtcatgagtgcggagacagcttctctcacagctccaatcggattcgccacctgagaacgcatacgggagagagaccctataaatgttctgaatgtggagaaagcttctctcggagttcccgtcttatgagtcatcagagaactcacacaggttagtaacagtggggtttctctttgccccaggtgaggtggcatattcagaggagcctgttggcaagagctggtattccctgcccagccgaccaaatgacctctgcattcttcaggtaatgggggctcattgtgagggaggtgcagaggcagcagaggattggcataaaactgaaaaggagttctgtctgcatgagaaaggatggcaagtctctgaggtgacctcagggtggaattctctgttaagtccaccctgccccagggtgctcctaccctcttggtctttttaaagccaaggtgcgatttgggcacctgactgtccagtttaccttaacaagtttgggaatccatgtgatgtttttgatacttcttcctcatttgggacattcagtaggagcatttgggcttccggggcccctgagaccaaagaagaggggccaagtaccctgggaaatcagctgaaggtcaacaaaagactggttgtgagttgcagctgtcccgaaggccccagttgggaagccatgggcagtccagatcaagccaccacgtgccctacgatggcctaacaggagtgcccattggcagattacacatgtaaatatgacctcagacaaaaaggaaccagaggcccaagggcaataataaggtggaatttgcaggtcagcccaggaattggcagaggaagtaggtgtctgataaccctttgtggagaatgagattccccccacctgtgtgagaaaaataaacagctctggagtcttgttcctgactccagaggaacgagagcattccaggaaagagagattccctggaaaattgaaaatgtgaatcctagggggaaattggggattgtgtctttccctgttgaaaatgtttggatgggaataaatatcttcaggaaacataaaaaaaaaaaaaaaaaaaaaa

SEQ ID NO: 2734 - DNA, 5267 bp, Homo Sapiens
  NM_005744
gctcagtagcgatagcagcggccgtggaggtggcgttggggactgttttctctcggaggccggagcggagccgcgtctgactgaggcgggcagcaagcggccccctcgctccctccctccctcctccgcgccctccccgccgccaccagccgtcaaacgccaaccgccgctcctggggaggagccgcggctcgcggggccggagccaggcctgcgtccggacatcagccggagccggagcgagagccggggcctcggcgtccccgccctctccccgcctcggccagcgtccgccgggcccccgcgcgtcgcgccatggactcggacgagggctacaactacgagttcgacgaggacgaggagtgcagtgaggaggacagcggcgccgaggaggaggaggacgaagacgacgacgagccggacgatgataccctggatctgggcgaggtggagctggtggagcccgggctgggcgtcggcggggagcgggacggactgctgtgcggggagacgggcggtggcggcggcagcgctctggggcccggcggtggcggcggcggcggcggcggcggtggtggtggcgggccggggcatgagcaggaggaggattaccgctacgaggtgctcacggccgagcagattctacaacacatggtggaatgtatccgggaggtcaacgaggtcatccagaatccagcaactatcacaagaatactccttagccacttcaattgggataaagagaagctaatggaaaggtactttgatggaaacctggagaagctctttgctgagtgtcatgtaattaatccaagtaaaaagtctcgaacacgccagatgaatacaaggtcatcagcacaggatatgccttgtcagatctgctacttgaactaccctaactcgtatttcactggccttgaatgtggacataagttttgtatgcagtgctggagtgaatatttaactaccaaaataatggaagaaggcatgggtcagactatttcgtgtcctgctcatggttgtgatatcttagtggatgacaacacagttatgcgcctgatcacagattcaaaagttaaattaaagtatcagcatttaataacaaatagctttgtagagtgcaatcgactgttaaagtggtgtcctgccccagattgccaccatgttgttaaagtccaatatcctgatgctaaacctgttcgctgcaaatgtgggcgccaattttgctttaactgtggagaaaattggcatgatcctgttaaatgtaagtggttaaagaaatggattaaaaagtgtgatgatgacagtgaaacctccaattggattgcagccaacacaaaggaatgtcccaaatgccatgtcacaattgagaaggatggtggttgtaatcacatggtctgtcgtaaccagaattgtaaagcagagttttgctgggtgtgtcttggcccatgggaaccacatggatctgcctggtacaactgtaaccgctataatgaggatgatgcaaaggcagcaagagatgcacaggagcgatctagggcagccctgcagaggtacctgttctactgtaatcgctatatgaaccacatgcagagcctgcgctttgagcacaaactatatgctcaggtgaaacagaaaatggaggagatgcagcagcacaacatgtcctggattgaggtgcagttcctgaagaaggcagttgatgtcctctgccagtgtcgtgccacactcatgtacacttatgtcttcgctttctacctcaaaaagaataaccagtccattatctttgagaataaccaagcagatctagagaatgccacagaggtgctctcgggctaccttgaacgagatatttcccaagattctctgcaggatataaagcagaaagtacaagacaagtacagatactgtgagagtcgacgaagggttttgttacagcatgtgcatgaaggctatgaaaaagatctgtgggagtacattgaggactgagaatggccctgcataaaatgaactctgaaaactttaccatctagagtgctcatgcaattaaaacaaaacaaacacaaacaaggaggcactaagcctattctgacaccactggtctgtagtaccagaattgttttgttaatggaaagtttaagtaaattatattgtaataaaaaggtagataaaccattgtacaacagtattctaggccaccaacaaaagtgtgacagacacactaaaagccctccaactttaacttgtaacgtagcttcattctcaaagctgactccttttttttctttttccttttcctgagtgtagtacagttaaaatttcaaacagctccttgacactgcttttcatgttcaaaccagccattttgttgtactttggtaaaggacctcttccccttcctcccctacacatacagatacacccacacacagactgactctctttctctcataccccaaggtcatgagtgaatgatgcttagttccttgtaaagaaaatcttgggatggggaaaggggtaggcagcaagaggattcaacaaacgaaaaacataaaaactttgtatatgacttttaaaacaagaggacaacacagtatttttcaaaattgtatatagcgcatatgcatggacaaagcaagcgtggcacgtgtttgcataatgtttaattacaaaaaaatatttattctttaaaaatcttcaagattatgtctatttgctgtgcattttctttcagtttgcttatctttcccgggttggggttgggataaaggtgtgtcggtttagcacctctggaagacctatctagagctctttcactttcctgaggttattttgccctttctggtgttggtatgtctgttgccggccatgggcctcatgccttgaattcctgctcttgatcagggacaagggaggtcaagctctgactaatgccatgacctgattaaggggtacagcagggagttttgttgctacagctcatgaattaacctgtcccaacctaatccccctccatggcatcatgcctctacccaagcctttgtgtgcccatgttatgcacacagctgtaggcattcttaagtcccctgtcgcatccagtggaagcattttaaaatttcttttactttttggttttcccttaattgctgcttttcagattttagttatggctcgtctgctcaccccttctctacattagggtgtcaaagagaatgttttgctttaaatataaatagccattcatttagtctcagattgtgaatttaaaatggtggataccgaaattgcttgtgtgtgttgctgtgggtttggtttgaaggcaaacacccctagaacatgatattcccatctagtgcatttaaatagaaatcactgagtttgctgcttttttattgtcagcagataggagaattaataatgcattttagctgtgatgtccatttttatgaaattcctactaagagctatgttaaaagtaaaggatggtggtggttgtattaactatatacctgtttaggccattctggctgtggtatttttcaataggtcagcatctgtaaatctgtcagttttatacaggagtgcagagtgaactaggcaactagattaagaggtctaaatatgaaataccagttgaggctgaggacctcttcgtcttcctttaaatgtcttttgcctagggagtgtttaccatttgtgaggcagctttgtctgctcttacactgtacatcctattactccattgggaagtaggttcactttcctctggccttttgcctaagttaggctttgctgaatcaaccctacttttccttttagaaaaggttgttacaggagatttactggcaactgttcttttcccatcaaaaatcagtgaatgtttgctgagtataaatgctgcttccttaaaccacttgtcgctttaggatcaactttacctgtaccttttctcctttcctcccttgccacctcaggtgcaaatctgaactcagtgtctgcttcttccattttctcgtctctctcccctcttcccccattatccatatgacattattttacttcaaatgacagcatcaatcttaaaaagatatacattaaaactaaggagtttttttaaagaaagcctgaataagttcctttccctggtaactttgaaaagcagtcagagttgctatatagatatatgtggctcctttaaaatgctttgtgtatgtgtggtgtttaaaaaaaaaaaatcttaccagttaactttgcagtgtctaggtttgagtgtcataaatccacgtgttcctgttgcaacaaatacccaaaaattgtgtgtgcacttcctaataccagtcttcacccatggaggaacagtgctttttagagatgctttctatttcaatgttggcatactgcctgagggtattgcagttgtgggtgcattccctaatttgtatgatcaagatgaactggcccttttctacttccaagcttttaacagataccaccatatttgacagaattcccagagtgaattgcttgtgttattagtagattcagtgcccccagctgggataggcaagccatgacagcttccctgtttcacctacagaagtcttatctgagggatctattcacagtaagcaccaaggtctccatgtcttgaggtcagtttcattgtcttttgaaaagtgcatgcttcatttgaacaattcattcagcagcagatggactttcagtgatttaaaataaaattttgatccaaagctcaggacacaaaccacagtggtaaaattgagtagcatataatatcagactaaattatctgtaattttccacaacccagattgtatgtgttttatgtgtgtttaaataaatatgttagatacacgtgtatacatacacccatatacaacagatccaagactggctgacttcatttgaaatggttgaatctgctgtgtaataaagtggttcaaccatgattaggaactgaaatttagtagaagagggaaaaggagttaatgtaacaaattattttagctacaaaccccggtaatagagcacttgggggatgggatggggtgggttggtgagacaatcagaatggtaaattgattaaatgctcctaaccctgtaattttgtgcatagagcaccctatgctgtggaaataactgttcttagatttcattgtaactggactgttcaggttgcccagagggaaagaacattcctaattctaataaaataaacttttattttgttaaaaaaaaaaaaaaaaa

SEQ ID NO: 2735 - DNA, 4593 bp, Homo Sapiens
  NM_005746
gctgccgcgccccgccctttctcggcccccggagggtgacggggtgaaggcgggggaaccgaggtggggagtccgccagagctcccagactgcgagcacgcgagccgccgcagccgtcacccgcgccgcgtcacggctcccgggcccgccctcctctgacccctcccctctctccgtttccccctctccccctcctccgccgaccgagcagtgacttaagcaacggagcgcggtgaagctcatttttctccttcctcgcagccgcgccagggagctcgcggcgcgcggcccctgtcctccggcccgagatgaatcctgcggcagaagccgagttcaacatcctcctggccaccgactcctacaaggttactcactataaacaatatccacccaacacaagcaaagtttattcctactttgaatgccgtgaaaagaagacagaaaactccaaattaaggaaggtgaaatatgaggaaacagtattttatgggttgcagtacattcttaataagtacttaaaaggtaaagtagtaaccaaagagaaaatccaggaagccaaagatgtctacaaagaacatttccaagatgatgtctttaatgaaaagggatggaactacattcttgagaagtatgatgggcatcttccaatagaaataaaagctgttcctgagggctttgtcattcccagaggaaatgttctcttcacggtggaaaacacagatccagagtgttactggcttacaaattggattgagactattcttgttcagtcctggtatccaatcacagtggccacaaattctagagagcagaagaaaatattggccaaatatttgttagaaacttctggtaacttagatggtctggaatacaagttacatgattttggctacagaggagtctcttcccaagagactgctggcataggagcatctgctcacttggttaacttcaaaggaacagatacagtagcaggacttgctctaattaaaaaatattatggaacgaaagatcctgttccaggctattctgttccagcagcagaacacagtaccataacagcttgggggaaagaccatgaaaaagatgcttttgaacatattgtaacacagttttcatcagtgcctgtatctgtggtcagcgatagctatgacatttataatgcgtgtgagaaaatatggggtgaagatctaagacatttaatagtatcaagaagtacacaggcaccactaataatcagacctgattctggaaaccctcttgacactgtgttaaaggttttggagattttaggtaagaagtttcctgttactgagaactcaaagggttacaagttgctgccaccttatcttagagttattcaaggggatggagtagatattaataccttacaagagattgtagaaggcatgaaacaaaaaatgtggagtattgaaaatattgccttcggttctggtggaggtttgctacagaagttgacaagagatctcttgaattgttccttcaagtgtagctatgttgtaactaatggccttgggattaacgtcttcaaggacccagttgctgatcccaacaaaaggtccaaaaagggccgattatctttacataggacgccagcagggaattttgttacactggaggaaggaaaaggagaccttgaggaatatggtcaggatcttctccatactgtcttcaagaatggcaaggtgacaaaaagctattcatttgatgaaataagaaaaaatgcacagctgaatattgaactggaagcagcacatcattaggctttatgactgggtgtgtgttgtgtgtatgtaatacataatgtttattgtacagatgtgtggggtttgtgttttatgatacattacagccaaattatttgttggtttatggacatactgccctttcattttttttcttttccagtgtttaggtgatctcaaattaggaaatgcatttaaccatgtaaaagatgagtgctaaagtaagctttttagggccctttgccaataggtagtcattcaatctggtattgatcttttcacaaataacagaactgagaaacttttatatataactgatgatcacataaaacagatttgcataaaattaccatgattgctttatgtttatatttaacttgtatttttgtacaaacaagattgtgtaagatatatttgaagtttcagtgatttaacagtctttccaacttttcatgatttttatgagcacagactttcaagaaaatacttgaaaataaattacattgccttttgtccattaatcagcaaataaaacatggccttaacaaagttgtttgtgttattgtacaatttgaaaattatgtcgggacataccctatagaattactaaccttactgccccttgtagaatatgtattaatcattctacattaaagaaaataatggttcttactggaatgtctaggcactgtacagttattatatatcttggttgttgtattgtaccagtgaaatgccaaatttgaaaggcctgtactgcaattttatatgtcagagattgcctgtggctctaatatgcacctcaagattttaaggagataatgtttttagagagaatttctgcttccactatagaatatatacataaatgtaaaatacttacaaaagtggaagtagtgtattttaaagtaattacacttctgaatttatttttcatattctatagttggtatgacttaaatgaattactggagtgggtagtgagtgtacttaaatgtttcaattctgttatattttttattaagtttttaaaaaattaaattggatattaaattgtatggacatcatttattaattttaaactgaatgccctcaataagtaatactgaagcacattcttaaatgaagataaattatctccaatgaaaagcatgacatgtgtttcaatagaagaatcttaagttggctaaattcaaagtgcttgacatcaaaatgttctagagtgattagctactagattctgaatcatacatcacatctgactagagaccagtttctttcgaatgattcttttatgtatgtagatctgttcttctgaggcagcggttggccaactatagcccaaaggccaaatttggacttctttttataaatgcagattgtctatggctgctttcccactactccagcctaaggtaaacagctgcaatagaagccaaatgagaatcgcaaagcccaaaatgtttattaacctgccctttacacaaaattacacaaaaagtttcctgatctctgttctaagaaaaggagtgtgccttgcatttaaaaggaaatgttggtttctagggaagggaggaggctaaataattgatacggaattttcctcttttgtcttcttttttctcacttaagaatccgatactggaagactgatttagaaaagtttttaacatgacattaaatgtgaaattttaaaaattgaaaagccataaatcatctgttttaaatagttacatgagaaaatgatcactagaataacctaattagaagtgttatcttcattaaatgttttttgtaagtggtattagaaagaatatgtttttcagatggttctttaaacatgtagtgagaacaataagcattattcacttttagtaagtcttctgtaatccatgatataaaataattttaaaatgattttttaatgtatttgagtaaagatgagtagtattaagaaaaacacacatttcttcacaaaatgtgctaaggggcgtgtaaagaatcaaaagaaactattaccaataatagttttgataatcacccataattttgtgtttaaacattgaaattatagtacagacagtattctctgtgttctgtgaatttcagcagcttcagaatagagtttaatttagaaatttgcagtgaaaaaagctatctctttgttcacaaccataaatcaggagatggagattaattctattggctcttagtcacttggaactgattaattctgactttctgtcactaagcacttggtatttggccatctccattctgagcaccaaacggttaacacgaatgtccactagaactctgctgtgtgtcacccttaaatcagtctaaatcttccagacaaaagcaaatggcatttatggatttaagtcattagattttcaactgacattaattaatccctcttgattgattatatcatcaagtatttatatcttaaataggaggtaggatttctgtgttaagactcttatttgtaccctataattaaagtaaaatgttttttatgagtatcccttgttttcccttcttaaattgttatcaaacaatttttataatgaaatctatcttggaaaattagaaagaaaaatggcaaggtatttattgttctgtttgccataatttagaactcacacttaagtattttgtagttttacattcctttttaacccattcagtggagaatgtcagcttttctcccaagttgtatgttaagtctattctaatatgtactcaacatcaagttataaacatgtaataaacatggaaataaagtttagctctattagtgaagtgttaaaaaaaaaaaaaa

SEQ ID NO: 2736 - DNA, 4209 bp, Homo Sapiens
  NM_005748
gacagctggaggctgcgtgggatccggcggcggctcccgagcgcggcggtgcggccttccccgccccctccctccctcctcccccgcccgcttccgcccggcttattatcctccttattgacaaacagagcggtcgcggcggcgactctcggcgtgcggtgatagccaagccatgggagacaagaagagccccaccaggccgaagcggcagccgaagccgtcctcggatgagggttactgggactgtagcgtctgcaccttccggaacagcgccgaggccttcaagtgcatgatgtgcgatgtgcggaagggcacctccacccggaaacctcgacctgtctcccagttggttgcacagcaggttactcagcagtttgtgcctcctacacagtcaaagaaagagaaaaaagataaagtagaaaaagaaaaaagtgaaaaggaaacaactagcaaaaagaatagccataagaaaaccaggccaagattgaaaaatgtggatcggagtagtgctcagcatttggaagttactgttggagatctgacagtcattattacagactttaaggagaaaacaaagtcaccgcctgcatctagtgctgcttctgcagatcaacacagtcaaagcggctctagctctgataacacagagagaggaatgtccaggtcatcttcacccagaggagaagcctcatcattgaatggagaatctcattaaagtttattttctccaatttcttagtcacttctgtcctaccatgcaaatacacagattatgccaagaggtaccacattttcatgacagatacattcatgcacaatccataatttgagttttacataaaatagaaatttgttagaatttgttagattttattgcaatgatgcctaccaaacatttccagacttaacattttggtctctgcagttaagtgccatgaaaatgtggttgaattattcattatgcagtgttattggtaagtgtattttcacttttagtttagtgaattctaacacataattcttgaattctctactattggcatgtaacgaatttaaattttttataacatagtgcaagctgcctaaatatgtattatttgagaattgtgaaacagatagttatatgtatacaagtcaaagaacaacttaactattgctgcaacaggtttttcttaatggttatcctcttaaatacacctgctggtacttggtgtggttaaataggaaaattgttattaaataaagaatttgtatgaacctttgccaatgtttttgacacgttttactaattattgttcctgaattatgtttctggttttatctattttttgaggtttttttgtttgcttatttttcaaaacattcatttattgtaatgtttactagcggactagtaaacaataaaacattgattatttagctttataattcaggtttagtgctattgtcattgaacactggtattttctgtatcatataaaacattaaaattcaaataattataagcatttggcaaaaacaagagaaaagaaacttgccatattttacaagctgcaattttagaaaagctttaacttaatgatagttttatcattgttttcttgtcccaaacttatccagggccatagaagtatgaatctaattaaaacagaaatgggaattattgcacagaaatgggaaataactaattttaaatcagtcaaattggcttcttattaaatacaataattcttatgaaaatcatagtaccctattttcagacacagctgccagtttacacatttctcagtatcctgaaaggaaaaaagtatagccccacttatactatgtaaaattaccaataaaatatttttatgactacagattttgcatttttgtttacaactatttaaagagttttatgttgtatttagaatttcaacctagaaaccacacagtacttaaattctcctggggtctcctgctttctcttaaccatttgcttaatatatatctacctaaaggagacttctgaattgtaaatgaacttaaaaatagaatgtggatgcaaaatatcacataagacatcatgataacatttgaagaaaaaataaaactgtagaccctaacagttgtgatatttggtggtttcatgtggtaatgtaattttctgtttaattacagtactttttacaggcacagtggtactgtcttttttgtaagatgctagttgtgaaatacaattaattgcatacagtaaaagtctgtgattaaaacatttatatacctcattctttagtgttgttaaatgaaaaattaaaatttgtgtttattataagatactttcaatggaataccagctaaccagatatgttcctttaaaacatgaatttttttgtcttattctgtttttaacatgtttcaaatgttttatacatttttggagatagtaaaaatttaaaaatgtaatagggaaaatatttaatttttaagtcaaaaactatgctttaaaggaattacatcttatgatcaaataactttcaggatgtattttaaatgagctgcaagagagaaaaatctgacaggagatgggattttacctgaatggagcatactcatatttctacataggtgggaagatactcatctttctacatagacgggaacacggtgtagcatggagattaagcgtgctaactgacacctcatgtttgaatcctgttgtagaatggaaatgagcttaaattacccaagcttactttccatctataaaacagggctaataatggtaatcacatctaatttatagggtttttgggaggattaagtcaatccgtgtaaaattcttaattatctgacacatactggtcactcagtaaatgtgagcttttaccattgttataggtaaaatcccattacaaaaatacaaaaatattttttgtaacagttattttcctgccctcttggatgacctaaagtaatagtgttttatagatttcactaaattttcagtgtaatatcagatgttttctctggatgcagaaagaccatctttccataattaaagaacctggtgggtgtgcactatgagattggagaaatgaattaagttgacttgaaattattttacttttattaatcacaggtatctcaacctgcctttgtttcaccctacttcaagtacacttccacaccaggaaaacagacccaaattccataaacagaactgacgttaaaatatgcgaaagattcagaacctaggtttagggtacatgtttttctctgtttcatgaacttacagtgtggtttgagcactgggttcttttagccaaattccatacaaaaagaatttggatgttttccagcatttattaccttactttgctataagtaagagtgaagataggccgggtgtgatggctcatgccagtaatcccagcactttgggctgaagcaggcagatattttgagcccaggaccagcctgggcaacatggtgaaagctcatctctatgaaaaaatttgaatatacatatatatatatatgtatatttaaaaagtgaatataatttgaggcacagaagaatattcttaaaaccttttgtattatacaatagaaataaaggttttatttttattaaatgctttcctaaaatgatagtggataatagacaaagtgaaaacatttaaaaaggaagagaaacttcagcctttctaagttgatagcatgtttattaacttttagataaagatccttatagactgaaagaatgtagcctctgcattaatggtaaatggtctagaagttttcgtttccactgaggcttccgccactcgcttttttaaacttcctgctatggtttggatatggtttgtcctcaccaaaactcatgctgaggcctgagtccccagtttgattgtgttggtaggtggtgcctttaagaggtgattaggtcattgagatggattaaaggctttctcatgaggctcagttagttctggaatggattcgctcttgcaggaatggatgaattctcacaagagtgggttgttatgaagtgaggatgcttcttgtgttctgttctctttgccctcctcagttcaccatctgctttccaccatgagttgaagcagcatgaggccctcatcagatgggctccctgatcttggactcctcagcctttggactcataagccaaaataaatctgttttctttataaaaaaaaaaaa

SEQ ID NO: 2737 - DNA, 1149 bp, Homo Sapiens
  NM_005755
ccgcagccatgaccccgcagcttctcctggcccttgtcctctgggccagctgcccgccctgcagtggaaggaaagggcccccagcagctctgacactgccccgggtgcaatgccgagcctctcggtacccgatcgccgtggattgctcctggaccctgccgcctgctccaaactccaccagccccgtgtccttcattgccacgtacaggctcggcatggctgcccggggccacagctggccctgcctgcagcagacgccaacgtccaccagctgcaccatcacggatgtccagctgttctccatggctccctacgtgctcaatgtcaccgccgtccacccctggggctccagcagcagcttcgtgcctttcataacagagcacatcatcaagcccgaccctccagaaggcgtgcgcctaagccccctcgctgagcgccagctacaggtgcagtgggagcctcccgggtcctggcccttcccagagatcttctcactgaagtactggatccgttacaagcgtcagggagctgcgcgcttccaccgggtggggcccattgaagccacgtccttcatcctcagggctgtgcggccccgagccaggtactacgtccaagtggcggctcaggacctcacagactacggggaactgagtgactggagtctccccgccactgccacaatgagcctgggcaagtagcaagggcttcccgctgcctccagacagcacctgggtcctcgccaccctaagccccgggacacctgttggagggcggatgggatctgcctagcctgggctggagtccttgctttgctgctgctgagctgccgggcaacctcagatgaccgacttttccctttgagcctcagtttctctagctgagaaatggagatgtactactctctcctttacctttacctttaccacagtgcagggctgactgaactgtcactgtgagatattttttattgtttaattagaaaagaattgttgttgggctgggcgcagtggatcgcacctgtaatcccagtcactgggaagccgacgtgggagggtagcttgaggccaggagctcgaaaccagtccgggccacacagcaagaccccatctctaaaaaattaatataaatataaaataaaaaaaaaaaaaa

SEQ ID NO: 2738 - DNA, 7346 bp, Homo Sapiens
  NM_005761
gcgaggaggaaacggtgccggagcgcgcagggcttgctgccgccaccgccgctgcacaggctgccggagcgagcctgccgcgcgccgccctccccgctctccttcctgggcgagctgcggggatggggcggccgcgggagcccgagcgcgcgcaggaaccgccgccgccgccgcccgcgtctccgttgccgcgcgcctgagccgccgtcgccgccgcgcgccctgcccgggggcggcccccccagccccatggaggtctcccggaggaaggcgccgccgcgccccccgcgccccgcagcgccactgcccctgctcgcctatctgctggcactggcggctcccggccggggcgcggacgagcccgtgtggcggtcggagcaagccatcggagccatcgcggcgagccaggaggacggcgtgtttgtggcgagcggcagctgcctggaccagctggactacagcctggagcacagcctctcgcgcctgtaccgggaccaagcgggcaactgcacagagccggtctcgctggcgccccccgcgcggccccggcccgggagcagcttcagcaagctgctgctgccctaccgcgagggggcggccggcctcggggggctgctgctcaccggctggaccttcgaccggggcgcctgcgaggtgcggcccctgggcaacctgagccgcaactccctgcgcaacggcaccgaggtggtgtcgtgccacccgcagggctcgacggccggcgtggtgtaccgcgcgggccggaacaaccgctggtacctggcggtggccgccacctacgtgctgcctgagccggagacggcgagccgctgcaaccccgcggcatccgaccacgacacggccatcgcgctcaaggacacggaggggcgcagcctggccacgcaggagctggggcgcctcaagctgtgcgagggcgcgggcagcctgcacttcgtggacgcctttctctggaacggcagcatctacttcccctactacccctacaactacacgagcggcgctgccaccggctggcccagcatggcgcgcatcgcgcagagcaccgaggtgctgttccagggccaggcatccctcgactgcggccacggccaccccgacggccgccgcctgctcctctcctccagcctagtggaggccctggacgtctgggcgggagtgttcagcgcggccgctggagagggccaggagcggcgctcccccaccaccacggcgctctgcctcttcagaatgagtgagatccaggcgcgcgccaagagggtcagctgggacttcaagacggccgagagccactgcaaagaaggggatcaacctgaaagagtccaaccaatcgcatcatctaccttgatccattccgacctgacatccgtttatggcaccgtggtaatgaacaggactgttttattcttggggactggagatggccagttacttaaggttattcttggtgagaatttgacttcaaattgtccagaggttatctatgaaattaaagaagagacacctgttttctacaaactcgttcctgatcctgtgaagaatatctacatttatctaacagctgggaaagaggtgaggagaattcgtgttgcaaactgcaataaacataaatcctgttcggagtgtttaacagccacagaccctcactgcggttggtgccattcgctacaaaggtgcacttttcaaggagattgtgtacattcagagaacttagaaaactggctggatatttcgtctggagcaaaaaagtgccctaaaattcagataattcgaagcagtaaagaaaagactacagtgactatggtgggaagcttctctccaagacactcaaagtgcatggtgaagaatgtggactctagcagggagctctgccagaataaaagtcagcccaaccggacctgcacctgtagcatcccaaccagagcaacctacaaagatgtttcagttgtcaacgtgatgttctccttcggttcttggaatttatcagacagattcaactttaccaactgctcatcattaaaagaatgcccagcatgcgtagaaactggctgcgcgtggtgtaaaagtgcaagaaggtgtatccaccccttcacagcttgcgacccttctgattatgagagaaaccaggaacagtgtccagtggctgtcgagaagacatcaggaggaggaagacccaaggagaacaaggggaacagaaccaaccaggctttacaggtcttctacattaagtccattgagccacagaaagtatcgacattagggaaaagcaacgtgatagtaacgggagcaaactttacccgggcatcgaacatcacaatgatcctgaaaggaaccagtacctgtgataaggatgtgatacaggttagccatgtgctaaatgacacccacatgaaattctctcttccatcaagccggaaagaaatgaaggatgtgtgtatccagtttgatggtgggaactgctcttctgtgggatccttatcctacattgctctgccacattgttcccttatatttcctgctaccacctggatcagtggtggtcaaaatataaccatgatgggcagaaattttgatgtaattgacaacttaatcatttcacatgaattaaaaggaaacataaatgtctctgaatattgtgtggcgacttactgcgggtttttagcccccagtttaaagagttcaaaagtgcgcacgaatgtcactgtgaagctgagagtacaagacacctacttggattgtggaaccctgcagtatcgggaggaccccagattcacggggtatcgggtggaatccgaggtggacacagaactggaagtgaaaattcaaaaagaaaatgacaacttcaacatttccaaaaaagacattgaaattactctcttccatggggaaaatgggcaattaaattgcagttttgaaaatattactagaaatcaagatcttaccaccatcctttgcaaaattaaaggcatcaagactgcaagcaccattgccaactcttctaagaaagttcgggtcaagctgggaaacctggagctctacgtcgagcaggagtcagttccttccacatggtattttctgattgtgctccctgtcttgctagtgattgtcatttttgcggccgtgggggtgaccaggcacaaatcgaaggagctgagtcgcaaacagagtcaacaactagaattgctggaaagcgagctccggaaagagatacgtgacggctttgctgagctgcagatggataaattggatgtggttgatagttttggaactgttcccttccttgactacaaacattttgctctgagaactttcttccctgagtcaggtggcttcacccacatcttcactgaagatatgcataacagagacgccaacgacaagaatgaaagtctcacagctttggatgccctaatctgtaataaaagctttcttgttactgtcatccacacccttgaaaagcagaagaacttttctgtgaaggacaggtgtctgtttgcctccttcctaaccattgcactgcaaaccaagctggtctacctgaccagcatcctagaggtgctgaccagggacttgatggaacagtgtagtaacatgcagccgaaactcatgctgagacgcacggagtccgtcgtcgaaaaactcctcacaaactggatgtccgtctgcctttctggatttctccgggagactgtcggagagcccttctatttgctggtgacgactctgaaccagaaaattaacaagggtcccgtggatgtaatcacttgcaaagccctgtacacacttaatgaagactggctgttgtggcaggttccggaattcagtactgtggcattaaacgtcgtctttgaaaaaatcccggaaaacgagagtgcagatgtctgtcggaatatttcagtcaatgttctcgactgtgacaccattggccaagccaaagaaaagattttccaagcattcttaagcaaaaatggctctccttatggacttcagcttaatgaaattggtcttgagcttcaaatgggcacacgacagaaagaacttctggacatcgacagttcctccgtgattcttgaagatggaatcaccaagctaaacaccattggccactatgagatatcaaatggatccactataaaagtctttaagaagatagcaaattttacttcagatgtggagtactcggatgaccactgccatttgattttaccagattcggaagcattccaagatgtgcaaggaaagagacatcgagggaagcacaagttcaaagtaaaagaaatgtatctgacaaagctgctgtcgaccaaggtggcaattcattctgtgcttgaaaaactttttagaagcatttggagtttacccaacagcagagctccatttgctataaaatacttttttgactttttggacgcccaggctgaaaacaaaaaaatcacagatcctgacgtcgtacatatttggaaaacaaacagccttcctcttcgcttctgggtaaacatcctgaagaaccctcagtttgtctttgacattaagaagacaccacatatagacggctgtttgtcagtgattgcccaggcattcatggatgcattttctctcacagagcagcaactagggaaggaagcaccaactaataagcttctctatgccaaggatatcccaacctacaaagaagaagtaaaatcttattacaaagcaatcagggatttgcctccattgtcatcctcagaaatggaagaatttttaactcaggaatctaagaaacatgaaaatgaatttaatgaagaagtggccttgacagaaatttacaaatacatcgtaaaatattttgatgagattctaaataaactagaaagagaacgagggctggaagaagctcagaaacaactcttgcatgtaaaagtcttatttgatgaaaagaagaaatgcaagtggatgtaagcactctggggcctggcttaatctggcaaagttcttcagacgacttgggagcaaaatggctgcttgagctactctgtgtcgttaatttgttgtttgcacataggttccactttgggcactgtctttttaagagaccaaggcacatgcacagcttttagaaagcataccaacccttgtgcctgtgtgtataccgtgggaacccttctgtaaatagagttgaagtggttgttgcaaacagcctccttgtttacagagaatacaaggccagtaagcgaatgtcagtattgtaactacagtctccacttaagcacaatgatataagtggttttgtttgaaaactacagctatgtagcacttgtgctacactgcacctctgcattgtaaagggatactgccagtgctcaaaacaaaatgtgaaatgagtcatttggaaacaaggtgggggtgttagggcaacctcgaggatttgcagcattgaaactttccccagtagttcttggaaaagctgaccgcagaatttggtagtgtacacttagcatttgtgagtgtgtgtgtgtgtttaaaccaaaaactaacagtgttgcaacattgttgaaagggctcgtgtttttcagtggtcatcaactgcactccatcaaactcacctccatttcaccaaggagctctaaagtaaggagagtgggctttatttaaatgaacagcattttaaccagatactttgtcctaatgtatgttccttttcttcatctgttttttcatactaaatgtatttgatagtggacatgttggatattatacaaaaaaatcattaattcatttctgttccaaaacctttgatcagaacgatctgtggaagagtaactccatttctatatgagtgagtgtctccttgctttagatttctggtgaaccctgtggttatgaatacttgtgtgtgatttaaaaaaaaaaagatacattttacatttcatcgaattgctgttcacactggagtattatatataaatatatatatttgaggcccaaggcctgaaaaatattagtatacaacttggtatcttagtcttactatgtactttttgaaagtattcctcgcaggagaaagaatttaaaatacccattttattcatgcctttctttttaaagaattctctatccagttatactgtagtctttttagtgctgattttttaattcctgaatttttgctgctcatgaccagttttaataccactgtgttttccttctattaaaccagaagaagtaaacagcataattggcaactcttgagcttttcttgtggcaggcaccttttacccttggtgctccaaatcccccatctaggaaagaaaattttttcaagtcaaataacattgatcacatattccttgaaatcatttaccaacactgtatggagcattaggatttaaatatgaatttgtcttaaaggcaattcctttttgcttctgtattatctggaaaagcatgagagaggtgacacctcaacaaactgatcagagaaaataagcagttactaccctgataggcaccttcccaatcctgttgcttttgaccattgtctgtccaacggacacacctcaaacaaacaaaactaccaaatagatgacagatcagaataaaggtgagaggtctggtccccattgaaggctgctacagtcttcaaagaggtgaaggagttcataagagaacaacagtaggaaagttgagagccaagggtaggagagttgcccaaaagacttcccctactactttagggtactgaaaactcaaaggatcagctacagctttatctaagtatttactaaatgctacatgagggtgtccctgtccagctttctggcacatgagtcctgtgtggagagttacctcctcttccagggactgtgctgttgggaactttgggcaagtcacttacctctttgtgcctcaatttctgtataatatttctaagctacctcactgaggtggtatgaagattcactaatgtatgtagcgtgtttgtcaatcctccagtgaaaagcactatctagatcacattttggatcacattagccaaatgcagtaaatggccaaattagatgtgtgctgaagacaatcagtcactgggtctatattaaacagcaaccagagcaacaaatggcaaacaatttctattttcaagtttctttgcatatttttttggtgcaaaaccatttataaacttttttttctaacactagtgtctacagcagcattcaaaaaaattctgttaccttttctgtattaggatttaaagtctatttcttattgtatacctgattgaagctgttcttggagatgaatgttttaaatgtctatatccaaaaaataaacattttgatgtaactgtg

SEQ ID NO: 2739 - DNA, 2989 bp, Homo Sapiens
  NM_005762
ggcgcgcgggcgagcggttgtgcttgtgcttgtggcgcgtggtgcgggtttcggcggcggctgaggaagaagcgcgggcggcgccttcgggaggcgagcaggcagcagttggccgtgccgtagcagcgtcccgcgcgcggcgggcagcggcccaggaggcgcgtggcggcgctcggcctcgcggcggcggcggcggcagcggcccagcagttggcggcgagcgcgtctgcgcctgcgcggcgggccccgcgcccctcctccccccctgggcgcccccggcggcgtgtgaatggcggcctccgcggcggcagcctcggcagcagcggcctcggccgcctctggcagcccgggcccgggcgagggctccgctggcggcgaaaagcgctccaccgccccttcggccgcagcctcggcctctgcctcagccgcggcgtcgtcgcccgcggggggcggcgccgaggcgctggagctgctggagcactgcggcgtgtgcagagagcgcctgcgacccgagagggagccccgcctgctgccctgtttgcactcggcctgtagtgcctgcttagggcccgcggcccccgccgccgccaacagctcgggggacggcggggcggcgggcgacggcaccgtggtggactgtcccgtgtgcaagcaacagtgcttctccaaagacatcgtggagaattatttcatgcgtgatagtggcagcaaggctgccaccgacgcccaggatgcgaaccagtgctgcactagctgtgaggataatgccccagccaccagctactgtgtggagtgctcggagcctctgtgtgagacctgtgtagaggcgcaccagcgggtgaagtacaccaaggaccatactgtgcgctctactgggccagccaagtctcgggatggtgaacgtactgtctattgcaacgtacacaagcatgaaccccttgtgctgttttgtgagagctgtgatactctcacctgccgagactgccagctcaatgcccacaaggaccaccagtaccagttcttagaggatgcagtgaggaaccagcgcaagctcctggcctcactggtgaagcgccttggggacaaacatgcaacattgcagaagagcaccaaggaggttcgcagctcaatccgccaggtgtctgacgtacagaagcgtgtgcaagtggatgtcaagatggccatcctgcagatcatgaaggagctgaataagcggggccgtgtgctggtcaatgatgcccagaaggtgactgaggggcagcaggagcgcctggagcggcagcactggaccatgaccaagatccagaagcaccaggagcacattctgcgctttgcctcttgggctctggagagtgacaacaacacagcccttttgctttctaagaagttgatctacttccagctgcaccgggccctcaagatgattgtggatcccgtggagccacatggcgagatgaagtttcagtgggacctcaatgcctggaccaagagtgccgaggcctttggcaagattgtggcagagcgtcctggcactaactcaacaggccctgcacccatggcccctccaagagccccagggcccctgagcaagcagggctctggcagcagccagcccatggaggtgcaggaaggctatggctttgggtcaggagatgatccctactcaagtgcagagccccatgtgtcaggtgtgaaacggtcccgctcaggtgagggcgaggtgagcggccttatgcgcaaggtgccacgagtgagccttgaacgcctggacctggacctcacagctgacagccagccacccgtcttcaaggtcttcccaggcagtaccactgaggactacaaccttattgttattgaacgtggcgctgccgctgcagctaccggccagccagggactgcgcctgcaggaacccctggtgccccacccctggctggcatggccattgtcaaggaggaggagacggaggctgccattggagcccctcctactgccactgagggccctgagaccaaacctgtgcttatggctcttgcggagggtcctggtgctgagggtccccgcctggcctcacctagtggcagcaccagctcagggctggaggtggtggctcctgagggtacctcagccccaggtggtggcccgggaaccctggatgacagtgccaccatttgccgtgtctgccagaagccaggcgatctggttatgtgcaaccagtgtgagttttgtttccacctggactgtcacctgccggccctgcaggatgtaccaggggaggagtggagctgctcactctgccatgtgctccctgacctgaaggaggaggatggcagcctcagcctggatggtgcagacagcactggcgtggtggccaagctctcaccagccaaccagcggaaatgtgagcgtgtactgctggccctattctgtcacgaaccctgccgccccctgcatcagctggctaccgactccaccttctccctggaccagcccggtggcaccctggatctgaccctgatccgtgcccgcctccaggagaagttgtcacctccctacagctccccacaggagtttgcccaggatgtgggccgcatgttcaagcaattcaacaagttaactgaggacaaggcagacgtgcagtccatcatcggcctgcagcgcttcttcgagacgcgcatgaacgaggccttcggtgacaccaagttctctgctgtgctggtggagcccccgccgatgagcctgcctggtgctggcctgagttcccaggagctgtctggtggccctggtgatggcccctgaggctggagcccccatggccagcccagcctggctctgttctctgtcctgtcaccccatccccactcccctggtggcctgactcccactccctggtggccccatcccccagttcctcacgatatggtttttacttctgtggatttaataaaaacttcaccagttaaaaaaaaaaaaaaaaaaaaaaaaaaaaaa

SEQ ID NO: 2740 - DNA, 3043 bp, Homo Sapiens
  NM_005767
tggattaggagagcttctggatagctgaacacatggaggtttctggagggtgtggcccccagagggcatggaagctctgcacccctgctcccatacctcaccctacgcatctcctcatctgtatcctttgcaatatcctttgtaataaaccgaaaattttatcataatgagcatcaaaagaatcccaaatgagaaaactgctttttgcataagtgtaaattaagagatggaagtcacatttcaccatggcaaacatttgctgcatgcaaaatgactgaaacaaggtcttgatctgtcaccaggctgaagtgcagtggtacaatcaaagctcactgcagtctcaacctcctaggctcaaacaatcctcccacttcagcctcccaaccagctgggaccacaggttgacatcaccacacccaggtctgctggaatttgctggaggtccactccagaccctgtttgtctggatatcaccagcagaggttgcagaacaacaaagattgctgcctgttccttcctctggaagctttgtcccagaggggcacccaccagacggcagctggagctctcctgtgtgccactggagtacgaaaaagaaaaaatcctgcagctagctcggtgtctgcccaaacggctgcccagttttgtgcttgaaacccagggcctgggtggtgtaggcacccgagggaattgcctggtctaagggttgtgaagatcacggaaaaggcatagagtctgggccggaatgcatcgttcctcgtggcacattccctcatggcttcccttagctaggggaggaagttccctggccccttgcacttcccgttccctctgctatggctcttcctcagtagaaacaactggcaacaaaattcaagtttatgattcattcatcagcaaacatgtgagaatcatctacaaagaaccaagaattgtgagaaagcgacctcaagatacaactggcaactgaggaaaaggcctcaattcaacaagagctaacaagcttgggagtttatttcggaatctttaaaagactcttctgcttacccacaatctgggatccactgcaggaaaacaaaaaaggaaaacttcatttaaaagaagcaagaagtaaaatgggacaaattgggaatgtttaagtctctgaaactctgcactgaaaagaaaataagattgataacttaagcttaacattctgaggcataaagaaacattaactttggagtattcatcttgactactgaaatacaagtttagaagacaagtggtttcattctggtcacagatcacagcttttctttaaatttataatcctatgggttggactcgttgactgtattttttaaaggttgctcgtcagttaactgagccttggaattcatggattttctaaagactaacaaatgaaaatattttcctgttgaagaacccagcggaaattttacagcaacaaatttcatgtttcttttgggtatttctgagaaaaaggaaatatttataaaaccatccaaagatccagataatttgcaaataaattggaggttatagaggttataatctgaatcccaaaggagactgcagctgatgaaagtgcttccaaactgaaaattggacgtgcctttacgatggtaagcgttaacagctcccactgcttctataatgactcctttaagtacactttgtatgggtgcatgttcagcatggtgtttgtgcttgggttaatatccaattgtgttgccatatacattttcatctgcgtcctcaaagtccgaaatgaaactacaacttacatgattaacttggcaatgtcagacttgctttttgtttttactttacccttcaggattttttacttcacaacacggaattggccatttggagatttactttgtaagatttctgtgatgctgttttataccaacatgtacggaagcattctgttcttaacctgtattagtgtagatcgatttctggcaattgtctacccatttaagtcaaagactctaagaaccaaaagaaatgcaaagattgtttgcactggcgtgtggttaactgtgatcggaggaagtgcacccgccgtttttgttcagtctacccactctcagggtaacaatgcctcagaagcctgctttgaaaattttccagaagccacatggaaaacatatctctcaaggattgtaattttcatcgaaatagtgggattttttattcctctaattttaaatgtaacttgttctagtatggtgctaaaaactttaaccaaacctgttacattaagtagaagcaaaataaacaaaactaaggttttaaaaatgatttttgtacatttgatcatattctgtttctgttttgttccttacaatatcaatcttattttatattctcttgtgagaacacaaacatttgttaattgctcagtagtggcagcagtaaggacaatgtacccaatcactctctgtattgctgtttccaactgttgttttgaccctatagtttactactttacatcggacacaattcagaattcaataaaaatgaaaaactggtctgtcaggagaagtgacttcagattctctgaagttcatggtgcagagaattttattcagcataacctacagaccttaaaaagtaagatatttgacaatgaatctgctgcctgaaataaaaccattaggactcactgggacagaactttcaagttccttcaactgtgaaaagtgtctttttggacaaactatttttccacctccaaaagaaattaacacatggacattttaaagtctttagtataaagaaaatttgtattcaatgtgttaagcattaacatgtattttatttgtgtatccactccatctgatttttctgagccattttgatttgttccttcattaaaaaaaatctcttaaagttatttagtgtctaaaagtgactgacttaaattatgtggtgccaatctgtaatgtctttgaattcctttttatattaaatgatttaatttactaaaaaaaaaaaaaaaaaaaaaaaaaaaaaaaaaaaaaaaaaa

SEQ ID NO: 2741 - DNA, 2297 bp, Homo Sapiens
  NM_005768
aatgcgcacgccgtgggcgggccccgagccggaattgggggtgaagcgatagcgttttgcccgcattcggggcgcgcggagctggggggtccctgtggggctcccggagttaagatggcgtcctcagcggagggggacgaggggactgtggtggcgctggcgggggttctgcagtcgggtttccaggagctgagccttaacaagttggcgacgtccctgggcgcgtcagaacaggcgctgcggctgatcatctccatcttcctgggttacccctttgctttgttttatcggcattaccttttctacaaggagacctacctcatccacctcttccatacctttacaggcctctcaattgcttattttaactttggaaaccagctctaccactccctgctgtgtattgtgcttcagttcctcatccttcgactaatgggccgcaccatcactgccgtcctcactaccttttgcttccagatggcctaccttctggctggatactattacactgccaccggcaactacgatatcaagtggacaatgccacattgtgttctgactttgaagctgattggtttggctgttgactactttgacggagggaaagatcagaattccttgtcctctgagcaacagaaatatgccatacgtggtgttccttccctgctggaagttgctggtttctcctacttctatggggccttcttggtagggccccagttctcaatgaatcactacatgaagctggtgcagggagagctgattgacataccaggaaagataccaaacagcatcattcctgctctcaagcgcctgagtctgggccttttctacctagtgggctacacactgctcagcccccacatcacagaagactatctcctcactgaagactatgacaaccaccccttctggttccgctgcatgtacatgctgatctggggcaagtttgtgctgtacaaatatgtcacctgttggctggtcacagaaggagtatgcattttgacgggcctgggcttcaatggctttgaagaaaagggcaaggcaaagtgggatgcctgtgccaacatgaaggtgtggctctttgaaacaaacccccgcttcactggcaccattgcctcattcaacatcaacaccaacgcctgggtggcccgctacatcttcaaacgactcaagttccttggaaataaagaactctctcagggtctctcgttgctattcctggccctctggcacggcctgcactcaggatacctggtctgcttccagatggaattcctcattgttattgtggaaagacaggctgccaggctcattcaagagagccccaccctgagcaagctggccgccattactgtcctccagcccttctactatttggtgcaacagaccatccactggctcttcatgggttactccatgactgccttctgcctcttcacgtgggacaaatggcttaaggtgtataaatccatctatttccttggccacatcttcttcctgagcctactattcatattgccttatattcacaaagcaatggtgccaaggaaagagaagttaaagaagatggaataatccatttccctggtggcctgtgcgggactggtgcagaaactactcgtctcccttttcacagcactcctttgccccagagcagagaatggaaaagccagggaggtggaagatcgatgcttccagctgtgcctctgctgccagccaagtcttcatttggggccaaaggggaaacttttttttggagaaggcgtcttgctttgtcacccacgctggaatgcagtggcgggatctcagctcaccgcaacctccacctcctgggttcaagtgattttcctgcctcagcctcccaagtagctgggaatacaggcacgccaccatgcccagctaatttttgtattttcagtagaaacgggatttcaccacgttggccaggctggtctcgaactcctgaccgcaagtgatccacccgcctccgcctcccaaagtgctgggattacaggcgtgagccaccgtgcccggcccaaaggggaaactcttgtgggaggagcagaggggctcacatctcccctctgattcccccatgcacattgccttatctctccccatctagccaggaatctattgtgtttttcttctgccaatttactatgattgtgtatgtgccgctaccaccaccccccccatgggggggtggagaggggtgcaaggccctgcctgctccactttttctaccttggaactgtattagataaaatcacttctgtttgttcagtttttca

SEQ ID NO: 2742 - DNA, 2882 bp, Homo Sapiens
  NM_005771
atctgaaaaattaataattccttaattatcaaatatccattatttaaatttataattgtgtcataaatattgtcataaatagatttgctgttttaaagcttgttccttcattttctctgttttgttttagataaacattgtcataaatagatttgttgttttaaagcttgttccttcattttctctgattgttttgttttagattcagaggttacttatgcttgtttgttacatggatgttacatgtgtaatgggggatattggacttctagtgtactcatcacccatatactgaacactgtactcaaaagggattgaaagaaactaggaaacttggcaggaagatcattcttaagccaggaaaaaaatttttaatgctcacatgtgaacatgtgatggtcataccagaaggagcacccacctccctccctctgtgacagacacattttcttagccttcacctttccttctttcaagttgctgaaaatccacagtgtttctgttcatttgttactttcattctcacctatcttctctcttgctccatctaccagaacaataattccccatataatacttctcacttcacttttcaacgcaggacctcttgttgggtctgatctgtttgtctgtccgctttatcaatattatcagatgtaagtttacatgaatacacacacatattcactaaactgaggggaaaaaatgccttgtaggtcataaaaaagcagggaaattcccaacaattcatatttgatccctggatccaggggtggcagcaataagcctgctttagatatttactccccattttatgatccggtggtttggtttttcaaatgatgatatggctcctttcgcaatgacttgatgtttaggaggtgtgcttcaataaatacattttaaaatcaacaatcaagttagagttgtacaaatggctctgaaatgtcccactacactgttagaccaagggcacagattgtgcttctgtactatttatcctagtatccctcggcatatattaactgctctaaaaatctccttggctacacgctgcatcaaatcaaagttaaatgttataccacctttctattctatttttaatattcaaagagggtgctcagattttagaacaaatttcaatgtttaagtacacacaaaaaaatcattaactcatatatttcaagagtaggaaatgggaactggtgttaaaactcttataacaaatgtcactgtcttaagggacagtgtttaaaaacgcatacctggccgggcgcggtggctcatgcctgtaatcccagcactttgggaggccgaggccggcggatcacaaggaaaacaaactcaggaagaaaaagaaaagcagaagtgatcaaggagagcgctcgagttgcaatattttcctttggctgctgacaggcagttactataaagcattgtgcatggacaccatcttcttgtattatacaagaaaggagtgtacctatcacacacagggggaaaaatgctcttttgggtgctaggcctcctaatcctctgtggttttctgtggactcgtaaaggaaaactaaagattgaagacatcactgataagtacatttttatcactggatgtgactcgggctttggaaacttggcagccagaacttttgataaaaagggatttcatgtaatcgctgcctgtctgactgaatcaggatcaacagctttaaaggcagaaacctcagagagacttcgtactgtgcttctggatgtgaccgacccagagaatgtcaagaggactgcccagtgggtgaagaaccaagttggggagaaaggtctctggggtctgatcaataatgctggtgttcccggcgtgctggctcccactgactggctgacactagaggactacagagaacctattgaagtgaacctgtttggactcatcagtgtgacactaaatatgcttcctttggtcaagaaagctcaagggagagttattaatgtctccagtgttggaggtcgccttgcaatcgttggagggggctatactccatccaaatatgcagtggaaggtttcaatgacagcttaagacgggacatgaaagcttttggtgtgcacgtctcatgcattgaaccaggattgttcaaaacaaacttggcagatccagtaaaggtaattgaaaaaaaactcgccatttgggagcagctgtctccagacatcaaacaacaatatggagaaggttacattgaaaaaagtctagacaaactgaaaggcaataaatcctatgtgaacatggacctctctccggtggtagagtgcatggaccacgctctaacaagtctcttccctaagactcattatgccgctggaaaagatgccaaaattttctggatacctctgtctcacatgccagcagctttgcaagactttttattgttgaaacagaaagcagagctggctaatcccaaggcagtgtgactcagctaaccacaaatgtctcctccaggctatgaaattggccgatttcaagaacacatctccttttcaaccccattccttatctgctccaacctggactcatttagatcgtgcttatttggattgcaaaagggagtcccaccatcgctggtggtatcccagggtccctgctcaagttttctttgaaaaggagggctggaatggtacatcacataggcaagtcctgccctgtatttaggctttgcctgcttggtgtgatgtaagggaaattgaaagacttgcccattcaaaatgatctttaccgtggcctgccccatgcttatggtccccagcatttacagtaacttgtgaatgttaagtatcatctcttatctaaatattaaaagataagtcaaacattaaaaaaaaaaaaaaaaaa

SEQ ID NO: 2743 - DNA, 2169 bp, Homo Sapiens
  NM_005772
gtggcccgaagcgggggccgccccggtcgggcggggaggcggggaggtggccactggctccgccccgctcccctctgacccggtgtctagtctctccgtcttcctgttccaaaccacgtggacgcgtctgggctgctggaggcagcccgagccgccgccgtcggtgtcgccgccaccaccaccatcggagtcacgagtcccgcgtctgtccgaagtcgccgctctcgggctgctcacgtctcttcggagagcgcgcacatggcgactcaggcgcactccctcagctacgcagggtgcaacttcttgcgccaacgtctggtcctgtctaccctgagcgggcgccccgtcaaaatccgaaagattcgggccagagacgacaacccgggcctccgagattttgaagccagcttcataaggctattggacaaaataacgaatggttctcgaattgaaataaaccaaacaggaacaaccttatattatcagcctggcctcctgtatggtggatctgtggaacatgactgtagcgtccttcgtggcattgggtattacctggagagtcttctttgcttggctccatttatgaagcacccgttaaaaatagttctacgaggagtgaccaatgatcaggttgacccttcagttgatgttcttaaggcaacagcactccctttgttgaaacaatttgggattgatggtgaatcatttgaactgaagattgtgcgacggggaatgcctcccggaggaggaggcgaagtggttttctcatgtcctgtgaggaaggtcttgaagcccattcaactcacagatccaggaaaaatcaaacgtattagaggaatggcgtactctgtacgtgtgtcacctcagatggcgaaccggattgtggattctgcaaggagcatcctcaacaagttcatacctgatatctatatttacacagatcacatgaaaggagtcaactctgggaagtctccgggctttgggttgtcactggttgctgagaccaccagtggcaccttcctcagtgctgaactggcctccaacccccagggccagggagcagcagtacttccagaggaccttggcaggaactgtgcccggctgctgctggaggaaatctacaggggtggatgcgtagactcgaccaaccaaagcctggcgctactactcatgacccttggacagcaggatgtttccaaagtcctgctaggccctctctctccctacacgatagaatttttgcggcatttgaagagctttttccagattatgtttaaaattgaaaccaagccatgtggtgaagaactcaagggtggggataaagtgctgatgacctgtgttggcattggtttctccaaccttagcaagaccctcaagtgataaccatcacaagataaggccccaatgcctacagacaaagcagaagctgccacggacaccaatgggaccaagtccaaatggattaatccaggacagaatagccacttgcttaattttctgtgaagaaatatcaatatacaaataaaagacatccctgtagcatatggtttccagctgtttctccagtggcattgccattgcccaggaggggcccagtcaccatgagagctcccttgccttacctggaggaagaatgtgccttcaggccacagtcgtgctgctagaacagtctcgtagctgcagttcagctgtgcttcctcagcctactatcataggcttcctcagccctctgtcatatggctgttttgcaaacctgtggagtctgttactgttctttctgcaaggactcacctccttgagccttggtttttgttgtagggattaaatgagataatatgagtggcagctcttcatgagtcctgcagtgctaagcaaatgtcagaaattggtgtattagactatttatctttgatcttctgaatggattgctgtcatggacacggacacggatcttcatctggttcattgtatttatatgtgagggatggatggctgcggggctccaagtaagttattgggatgtttttatattccaggtgtgctgtacattcttattttattttcacaatagctctgtgatgtaagtgctatctccatgagaaaattcataaagggtgttttgttcctttgaaatgtataatgtaaagacattaaatctcctcatttaag

SEQ ID NO: 2744 - DNA, 2228 bp, Homo Sapiens
  NM_005773
ggcgggacttccgttgtcctccttgtggcggtcgttttggcatttgtctggactgattacttggtagaaagccccggagcgctgggtcagcatcatccgtgactgactgagaaggcgcgagaggagtcttccccgctgcacagaggcgtggctgaggctcggcggcgcccagggtacccaggcccggcccggaataaggacatcctctctggccccgctccgctcacagagtcagatggcggcggccgagctgacggccccggcccagggcattgtgacctttgaggacgtggctgtttacttctcctggaaggaatggggtcttcttgatgaggctcagaaatgcctgtaccacgatgtgatgctggagaacttgacacttacaacctccctgggtggttctggagcaggggatgaggaggcaccttatcagcagagcacttctccacagcgggtgtcacaggttaggattcctaaggcccttccttctccccagaagaccaacccctgtgagatatgtggcccagtcttgagacagattttgcacttggttgaacaccaaggaacacaccatggtcagaaactgtatacagacggggcatgtaggaaacaattacaatttactgcataccttcatcagcaccagaagcagcatgttggacagaaacacttcagaagcaatgggggcagagacatgtttttgagcagctgcacatttgaagtatctgggaagcccttcacttgcaaggaggttgggaaggatttcctggtgagatcaagatttcttcagcaacaggctgctcacaccagaaagaagtcaaacagaaccaagagtgcagtggcctttcacagtgtaaaaaatcattacaactggggagaatgtgtgaaagctttcagctacaaacatgtacgtgttcagcaccagggagacctcattagggaaagatcttacatgtgcagtgaatgtgggaaatcttttagcacaagctgtagcctcagtgatcatttgagagttcacacttcagaaaagccttatacatgtggagaatgtgggaaatcctataggcaaagctctagccttattacgcaccgaagaattcacactggagtaagacctcatcaatgtgatgaatgtggaaaattatttaacaggaagtatgaccttcttatacatcagagagttcatactggagaaaggccttacaagtgcagtgaatgtgggaaatcctttagccatagctctagcctcattacacaccagagaattcatactggaatgaggccttatgagtgcagtgaatgtgggaaatcttttatccatagttctagccttattacacaccagagagttcacactggtacaaggccttatatgtgcagtgaatgtgggaaatcctttagccagagctgtcacctcattaaacaccggagacttcacattggagaagggccttatgagtgtagtgaatgtgggaaattgtttacttatagatctcgtttcttccaacaccagagagttcatactggagtaagatctcatgaatgtcatgaatgtggaaaattatttagcaggaaatttgacctcattgtacatgagagagttcacacaggagaaaggccatatgagtgcagtgaatgtggaaaatcctttacctgtaaatcctacctcatctcacactggaaagttcatactggagcaaggccttatgaatgtggggagtgtgggaaatcatttactcatagctctacgctccttcaacaccagagagttcacactggagaaaggccttatgagtgcaatgaatgtgggaagttttttagccagagctccagcctcattagacataggagaagtcacaccggagaaaggccttatgagtgcagtgagtgttggaaatcctttagtaaccactctagcctcgttaaacaccgaagagttcataccggagaaaggccttatgaatgcagtgaatgtggaaaatcctttagccagagctctaacctcactaatcaccagcgaattcacagtggggaaaggccttatgagtgtagtgactgtggaaaattttttaccttcaactccaacctcctaaaacatcagaacgttcacaagggataaaggttaggtaacacacatagggctgttacggactgagaagtgtccctgcaaaattcacagacataaataaataaatacgtattttcaataaaaaaaaaaaaaaaaaaaa

SEQ ID NO: 2745 - DNA, 3140 bp, Homo Sapiens
  NM_005775
ctccggcccagccccggcccgcagtccagatccgagacccaaactccgcccgccccgccgcgcgactctcacggtccggcctccggcgcgcgccccttcggcctccctcttcctgcgccggcgcccggcccggcccggcccgtcctgacccggtcacgagggccgcgacggcccgcgcttctccttgcccttcctcctcgagcgcccgcgccaggcagcagccgggcagggatgctcctgcgctcccgggcggcctcgggcccagccacctgctcgccggggaagaggacacgcagaggagcagctggcttgcccggagtcctcccaccttgacccaagcatgcagggcccaccccgcagcctccgcgctgggctcagcctggacgacttcatccctggccacctccagtcccacatagggtcttcctcccgggggacacgggtgcccgtgatccggaatggtggctccaacacccttaatttccagttccacgaccccgcgcccaggactgtgtgcaatgggggctacacaccaagacgagatgcttcccagcacccggaccctgcgtggtatcagacctggccaggccctgggagcaagccctctgcaagcacaaagatccctgcctcccagcacacccagaactggtcagccacgtggaccaaggacagcaagcgtcgggacaagcgctgggtcaagtacgagggaatcgggcccgtggacgagagcggcatgcccattgccccccgatccagcgttgacagacccagagactggtaccggagaatgttccagcagattcaccggaaaatgccagacttgcagctggactggaccttcgaggagccacccagagaccccaggcatctaggagcccagcaaagacctgcccacaggcccggcccggcaacatcttccagtggaagaagctgggaccactctgaagagttacctagaagcaccttcaactacagacctggagcattctccactgtgctgcagccctcaaatcaggtgctcagacgccgggaaaaagtagacaatgtctggacggaagagtcctggaaccagtttctgcaggaactagagactgggcagaggcccaagaaaccgctggtggacgaccctggtgagaagccctcccagcccattgaggtgctgctggagagagagctggccgagctgagcgccgagctggacaaggacctgcgggcaattgagacccgactgccgtcccccaagagctcgccggcgccccgacgggccccggagcagcggcccccggccggcccggcctcagcctggagctccagctacccacatgcaccttacctgggttccgcccggtccctgagtccccacaaaatggctgatggaggaagccccttcctaggtcggagggactttgtctacccttcctcaacccgagaccctagtgcctctaacggagggggcagcccagccaggagggaagagaagaagagaaaggccgccaggctcaagtttgacttccaggcgcagtcccccaaggagctgactctgcagaagggtgacattgtctacatccacaaggaggtggacaagaactggctggagggagagcaccacggccgcctgggcatcttccctgctaattatgtggaggtgctgcccgcagatgagatccctaagcccatcaagcccccgacctaccaggtgctggagtatggagaggctgtggcccagtacaccttcaagggggacctggaggtggagctgtccttccgcaagggagagcacatctgcctgatccgcaaggtgaacgagaactggtacgagggacgcatcacgggcacggggcgccaaggcatattccctgccagctacgtgcaggtgtctcgtgaaccccggctccggctctgtgacgacggcccccagctccccacgtctccccgcctgaccgctgccgcccgctcagcccgtcaccccagctccccctcagccctgcgcagcccagctgaccccatcgacttggggggacagacctccccccgtcgcactggcttctccttccccacccaggagcctagaccccagacccagaatcttggcacccctggtccagctctgtcccactctcgaggtcccagccatcccctggacctggggacctcctctcctaacacctctcagatacactggaccccgtaccgggcgatgtaccagtacaggccccagaacgaagacgagctggagctgcgcgagggggacagggtggatgtcatgcagcagtgtgacgatggctggtttgtgggtgtctcccggaggacccagaaattcggaacgttccctggaaattacgttgccccggtgtgagtggtctccatggcaacttggagccagccaggatggggtggggagcggtggcactcgtgggagggagaggacccccgcccacatcctccttccccaggacctgagctcccagcatctgcagacgacccccgcagcctttccctcggacccccctcgaagccccctggactgattcccacccacgactcacaggcattcctcccacagccctttcatttcctccccaccccactccccaaatacagaggtctgctttgaagcggagaccatttccaggccttattgagaccagaccccaagtcccccacccccatcctgctccagcgtttcctctaacagggaccagctctccgctttgcccccacggggttcctctaaccagaaccagcttcctagcctcgtagagaccaaaggccgcccccgcctgctggggttcctcccagcaccccagcttgctggctgccctctttgccttctggcctccagctgggtgtgggggggcggagcaaggcgggggacagacgcagcaccttcttagcgatctaggcctggcaagagctctggccccaaggcctcctcttcccaggggctgccaagtcctggccctggccctggcatatcaccccgcactgtggggccaggcaccactagcctggctcaaatattccccagggagactgctgtgtgctgcccgcctgcctgctggctctcccccagccccacatcccctctggaagagaatgtaaaataaacctggacacaagggaaaaaaaaaaaaaaaaaa

SEQ ID NO: 2746 - DNA, 3758 bp, Homo Sapiens
  NM_005777
aagagtctgcgggaccggcagctgtacttcatctcccagcgggccgagcgctgaaggcagcggcgcggcgcctttgtggtagcagtggccccgcgcggaggaagttccggtgtccgcggcgctgggtcggtggcggaggctgaggagaaggaggagcgggccgtggaggcttcgccgcctaggtactgctataaccagaatttggtagaaaaaggatttacttgttggggccctcttgataaaaagagatgtggggggattctcgacctgctaacagaactggaccttttcgtgggagccaagaagaaaggtttgctcccgggtggaacagggattatcctcctcctccccttaagagtcatgctcaagagagacactctggcaactttcctggcagagattcacttccctttgatttccaggggcattcggggcctccttttgcaaatgtagaggagcattctttcagctatggagctagagacggaccgcatggtgactatcgaggaggggagggacctggacatgatttcagggggggagatttttcgtcttctgatttccagagcagagattcatcacagttggacttcaggggtagggacatacattctggggattttcgggatagagaaggaccacctatggactataggggtggagatggtacttctatggattatagaggtagggaggcacctcatatgaactacagagacagggatgctcacgctgttgacttcagaggtagggatgctcctccatctgacttcaggggccggggcacttatgatttagattttagaggccgggatggatcccatgcagattttaggggaagggatttatcagatttggattttagggccagagaacagtcccgttctgattttaggaatagagatgtatctgatttggactttagagacaaagacggaacacaagtagactttagaggccgaggttcaggtactactgatctagactttagggacagggatacgccacattcagatttcagaggtagacaccgatctaggactgatcaggattttaggggcagagagatgggatcttgtatggaatttaaagatagggagatgccccctgtggatccaaatattttggattacattcagccctctacacaagatagagaacattctggtatgaatgtgaacaggagagaagaatccacacatgaccatacgatagaaaggcctgcttttggcattcagaagggagaatttgagcattcagaaacaagagaaggagaaacacaaggtgtagcctttgaacatgagtctccagcagactttcagaacagccaaagtccagttcaagaccaagataagtcacagctttctggacgtgaagagcagagttcagatgctggtctgtttaaagaagaaggcggtctggactttcttgggcggcaagacaccgattacagaagcatggagtaccgtgatgtggatcataggctgccaggaagccagatgtttggctatggccagagcaagtcttttccagagggcaaaactgcccgagatgcccaacgggaccttcaggatcaagattataggaccggcccaagtgaggagaaacccagcaggcttattcgattaagtggggtacctgaagatgccacaaaagaagagattcttaatgcttttcggactcctgatggcatgcctgtaaagaacttgcagttgaaggagtataacacaggttacgactatggctatgtctgcgtggagttttcactcttggaagatgccatcggatgcatggaggccaaccagggaactctaatgatccaggacaaagaagttaccctggagtatgtatcaagcctggatttttggtactgcaaacgatgtaaggcaaacattggtgggcaccgatcttcctgttcattctgcaagaacccaagagaagtgacagaggccaagcaagaattaataacctaccctcagcctcagaaaacatccataccagcaccattggaaaaacagcccaaccagcccctaagaccagctgataaggaacctgaacccaggaagagggaagaaggccaagagtcacgcttaggacatcaaaagagagaagcagaaaggtatctgcctccttctcgaagggaagggccaactttccgaagagaccgagagagggagtcatggtctggagagacacgccaggatggagagagcaaaactatcatgctaaagcgtatctatcgttccacaccacctgaggtgatagtggaagtgctggagccctatgtccgccttactactgccaacgtccgtatcatcaagaacagaacaggccctatggggcatacctatggctttattgacctcgactcccatgcggaagctcttcgtgtggtgaagatcttacagaaccttgatccgccatttagcattgatgggaagatggtagctgtaaacctggccactggaaaacgaagaaatgattctggggaccattctgaccacatgcattactatcagggtaaaaaatatttccgagataggaggggaggtggcagaaattcagactggtcttcagatacaaatcgacaaggacaacagtcatcatctgactgctacatatatgattctgctactggctactattatgaccccttggcaggaacttattatgaccccaatacccagcaagaagtctatgtgccccaggatcctggattacctgaggaagaagagatcaaggaaaaaaaacccaccagtcaaggaaagtcaagtagcaagaaggaaatgtctaaaagagatggcaaggagaaaaaagacagaggagtgacgaggtttcaggaaaatgccagtgaagggaaggcccctgcagaagacgtctttaagaagcccctgcctcctactgtgaagaaggaagagagtccccctccacctaaagtggtaaacccactgatcggcctcttgggtgaatatggaggagacagtgactatgaggaggaagaagaggaggaacagacccctcccccacagccccgcacagcacagccccagaagcgagaggagcaaaccaagaaggagaatgaagaagacaaactcactgactggaataaactggcttgtctgctttgcagaaggcagtttcccaataaagaagttctgatcaaacaccagcagctgtcagacctgcacaagcaaaacctggaaatccaccggaagataaaacagtctgagcaggagctagcctatctggaaaggagagaacgagagggaaagtttaaaggaagaggaaatgatcgcagggaaaagctccagtcttttgactctccagaaaggaaacggattaagtactccagggaaactgacagtgatcgtaaacttgttgataaagaagatatcgacactagcagcaaaggaggctgtgtccaacaggctactggctggaggaaagggacaggcctgggatatggccatcctggattggcttcatcagaggaggctgaaggccggatgaggggccccagtgttggagcctcaggaagaaccagcaaaagacagtccaacgagacttaccgagatgctgttcgaagagtcatgtttgctcgatataaagaactcgattaagaaaggagacaagttccatgggatacaacctccctcttgttttgtttgtctctccttttcttttgttactgttcttgctgctagaacttttttaaataaactttttttcaatgtgattaaaaaaaaaaaaaaaaaaaa

SEQ ID NO: 2747 - DNA, 5061 bp, Homo Sapiens
  NM_005779
gggcagggcggctcggccgcctctttctctcgctgcccccgcccctcctcctcctccctctccccgagtgctagcccgggcggccgccgagcttggcgctctctcgcctcgctgcctcctcccccgcgccgcggaccctctcccctcccttgcgttgcccccctctcccgccgcctcctcccgctctcctctcgctctcctcccgcctccttcttccaggcgcggccagcgggggcaagagcgaggtggctgcgaggaggcgtcactgaaagccctgacttggggaaggctgcgggctcggagccggagacgccgagctggggccgggtgagttgggaatcagactcttgagttgacagctggcctatggtttctgcattttgttaagaagcacctcatgcaagcgagggacctgggactgctcacagccaggtggcatttttctgaagttgttcattaagacttcccagcattcctacagatataaataggtgaggccgcaggcggtgctctgggtccgggagcgctgtccccagcatgaacgcggccggcggcgggagtgaatgactgcagctgcgacttccttcccgggccgcccgagcctccttccccaccgactttcttgttttgattaactccgtggactcctgactctttcttcgcccggaacatcaatatgtgtcatgtcattgtcacctgtcgctcgatgctctggaccttgctgagtattgtggtggcttttgccgagctcattgccttcatgagtgcagactggctgatcgggaaagcgaggagccgcggcggcgtggagccggcgggcccgggcgggggctccccggagccctaccaccccaccctgggcatctacgcccgctgcatccggaacccaggggtgcagcacttccagcgggacacgctgtgcgggccctacgccgagagcttcggcgagatcgccagcggcttctggcaggccacagctattttcctggctgtgggaatctttattctctgcatggtggccttggtgtccgtcttcaccatgtgtgtacagagcatcatgaagaaaagcatcttcaatgtctgtgggctgttgcaaggaattgcaggtctattccttatcctcggtttgatactctaccctgctggctggggttgccagaaggccatagactactgtggacattatgcatctgcctacaaacctggagactgctccttgggctgggccttttataccgccattgggggcacagtcctcactttcatctgtgctgtcttctctgcacaagcagaaattgcaacctctagtgacaaagtacaggaagaaattgaagaggggaaaaatctgatctgcctcctttagtttggaagagacaatgccattttctcccttgagtaatcttgtgaaacagtccacagtttcatcatttgagtcaagtggagaactaacctttacctaccaaagccacgttccacggcccgaggcttaaacaggaccaatgagaggccacatccagctacgcaaagttactggacatgcggtctgcagtgcacattataaggaatggaacatgaaaatagtatataatcctagacctggagttgccaagttctgtcagactccatctcccccaggttcaatgaaggataataatctaaatcattagggcagcagtttctctggtaacggaagagaccgtccgccagatctgcaggctgtttctgctccaacactgcttgcttgtgagcatctctgcctcagaatggggttttgggttggagttcttgttttcctctgttctttcaagttgtctccaacgaacagaaaactataaacttactggggacaggatgtgtgctaaagggcacagcaagacactgtcttttgcttagctgaccaaaggggtcagcagggatggcgtggagtcatgctgtggaacttattctaggctgaatcctagggtaaggtggatcaactgaactgtcactccagagattttagaaatttgagtaaagaaacaataaggacctatacaatcatatgagaacaaaaatatgaaatcttgctagtgaagacgtattttttcttcttcccagcagccaggctagcaccagttctggcccagtctcctcttcttctggagatcacatgtttttcttctaaggttaggattgtgctttgactgcgaaaggaaacctcactgtttcctccttccagggactgaggtctccaagctagctgtggcttatgcagatgttcactgggaggacctgccagaatctcggcacttggggggagacctttactcccagtttggtgaccatgctgtagtcagctctatttccaatcccgacagtagcagaatggcattctacaacaaaaagaagctagttatgggagttaagtttttgtagttactggtgttgatcctgaaagcagactgagataacattaaattgctgcaactgaagaactgcagccaagaccttaattccaggaaagcacagaggacaaagttaattcaaaaagaggcgctagatcaaggtcacagcactgcctacacctgtttacaaaaagaatcaaataccactatgaataaggattcaggggtttttaatctactttccataaattaccaatatcactgattcaggaagatagtatctcagaatgaccagagcagcacagaaacaagctactctgacattatgggagcttcaaaattgtatcatgatacagaaacactccttagcactttaagaaagtgagatggaactgccagatttctggaaggagaaaaagtgtaggtatttgggttcattaatctgctcacttgaggactttgttttgaaaaagtaccttctgtggacaaggtattgtgctaccagctatacaaccctgacttcagagtttgcaaccttgccctgagtgaatcatgttaaagctgtctgagtctaaagcaccgtatcttggtgcagaacagataattatacagagatggaatgggacaaccgcagttttactacattctggtgtttggcctatatgagaaaccatcttctcacagattaagggctaagggcaaaaggggtgggaggtgtggaactagccttaatgagtttcccattcctgaaccaaaattcaaagtgagtgagatgtaaatcctgtgattttggtgaagaaaaaaacgggtatcttcatagcagcctaggaaaccttaaccatatctctaacaccacacagaaagaggctggaggagccactggacaaagcttctgtctctgtgtgtacatttataatgttctaaccaagtctcaaaccttgatgaaaaacacaaaatttttccataaacttatcagaagactcacttttctttctttcttggatagagaaaccattttctgacactaggtttacaatctcagtgtccttacaagttaagtcctaagctcacaggatcctccgagcatgtccatcacctgctctttggctaaggtggcagtgtacctctagatcaacctgggaacagtcacaagggagtgtgacttcttggccataataaactcactcgatagtgtttatgttattaatctgaatgcaacagaagacaaaagcacaggcatgcacacacacagaaccccaaaccactaaaaactacctaaacactgacttagtaaatagtaaaaaggtaatgttgggacttttaaaccttgaatccattagccaggcttgggatgaaaggaccatctaaaatcatgctagtctaaaccatgctcttccacacagctgtttaaaaaccactgggtatgaggaatatgctagaaagaaatgttaaaaatagattgttggctcacacttatttttctaataaataggaccattattactaccaggaaagtcttatttattttgcctgaaattggcttaaagaaagtctcatgacgggatgggatgggctgcgcttctcaatgaactctgaggcagaaatatttgccttggattctgtggattctttaaacctgtgtgctaataattcaaacaatgttgcattaattgtataagggtttttgtatagttttcaaacatctgtggtgtaatgatctttgttaaacatatattctgtaaagtgccatagtctttttttatgtgtagcatatttaaaaatatatatgtatattatacatacacaagtttgtgtgaaagatgtgcaataacaaaggtgtatgtatgttttgttgttttgttttggaaactggacaggagtcaaaacagggatgtttgtttctgttttggcaaggagagttccacatttttgccttcatggcttattcagtaacccataattttaatgctacacaaatcttatgtgaagaaaagactggtatgaaatcattttttcctgggtctaaaataatcgctagtgttatgtcaaagttaagcccgcacgccaggcccagttaatgctagtctttcatgtgaaatgtgaagctgccatgttgccttttctcttagtaggataactagtagctggtacataatcactgaggagctatttcttaacatgcttttatagaccatgctaatgctagaccagtatttaagggctaatctcacacctccttagctgtaagagtctggcttagaacagacctctctgtgcaataacttgtggccactggaaatccctgggccggcatttgtattggggttgcaatgactcccaagggccaaaagagttaaaggcacgactgggatttcttctgagactgtggtgaaactccttccaaggctgagggggtcagtaggtgctctggagggactcggcaccacttgatattcaacagccacttgagccaaatataaaattgtatttacagctgatggactcaatttgagccttcaaacttgtagttatcctattatattgtaaactaatacattgtctagcattgatttggttcctgtgcatatgtattttcactatgtgctcccctccccagatcttaattaaaccagattttgcaattcattcttattctttcaaaaaaaaaaaaaaaaaa

SEQ ID NO: 2748 - DNA, 2180 bp, Homo Sapiens
  NM_005780
aggaggcggtgcgtgcctcgcctgccaaagggagatccgctcctctgcgtgcgatccccggcgcccgcgcgcgcccacagcgctccgccagagctgccgccgcggactcgccgggagtgggggtctccgctggtgccagcccgcttctggagaccctccgcctcctgccaacccctgctcttccaggtcgggccccggggttctgcggctgttagggacagaggcaaagaagggcaggacggtccggtttcccgtggatgttcccgcccgagaaagacagcaagttgtgtgtgcgcccgggacgcgggagggaaggtagccgccgcccgccagccatggaccatcatctttagtgcagaggatggaaagttgatgcccagtaagactgaagatccattctgcattacggaactgtggattatctgtgggtccctggtgatttcacaccttcattcactcctgcagtccctgaacacttacttggggtcctcattgccctatctggtgaaagatggcatccagcctgacttgtactggagtaatctgggctttgctgtcttttctttgtgctgccacctcctgcgtggggttctttatgccttactggctctggggatcacagctgggcaagcctgtgtccttcggtaccttccggaggtgctcatatcctgtgcatgatgagagtcggcagatgatggtgatggtggaggaatgtgggcgctatgcctccttccagggcatccccagcgcagaatggaggatctgcaccatagtgaccggcctgggttgtggcctcctcctcctggtggcgctcactgccctcatgggttgctgtgtttccgacctcatctccaggacagtgggaagagtggctggaggaattcagtttcttgggggcttgttgattggtgctggctgtgccctctaccccttgggctgggacagtgaggaagtccggcagacttgtggctacacttctggccagtttgacctggggaagtgtgaaatcggctgggcctactactgcacgggagcaggtgccactgccgccatgctgctgtgcacgtggctggcttgcttttcgggcaagaaacagaagcactacccatactgagatggagctaccaagagcagacagaggagaagatgggccaaaggggcttggagaggtcaaaacatccacctaccttcaaaaggtgggatagtagttctaatccaatacaatgctaataaaatgaaacccgataaaatcaggaacatgatataggaaggaaggattgtaggagatttgtgggggaaaaaaaaggagagtatagaatgatggagaaaaatggaccaaaggctaaaaatattgcagggcatcgggtgtttctattccacagagtattgttaatgtacaacacacacacacacacacacacacacacacacacacacacacacacaacaaatctacatatacaaacaagggtttgggttttagttttttttttttaaggtgaggactcagaaaatcaaagggctagtagaaacagtgttatgttgggaagcagggtacccccaaagatgttccctgtaggtcacggcactcccaaaagcacacaagcacatacagacatatgcatccccacacacgcctatgcacaaacgtggattatcgcacagactgggaggtttagtggtgcatttctcctctgttttctttttaatatacatttaaaatacagtattatcactttataaaacatacattaagcctaataaatggaccaataagccaaactatcagtattttgtatatcctgcataaactctaatttagttcctcaacatattttcagtgtttatgcagacctttagagttaagcctttgtatttccatgttattccacaatatgcaatatttctctgagtagcttctgctatgatattcttatgaagaaaaggggcaactttctgtccactataggagagaattcagccgaagatatgagagtaatgagagacattttccagtcattggatcgtgttttcttttgtccattattgtactgtgctgtaccacatttatttctatattcattttgtaaaaaatttaaaagtgctattttgtttgtatttgaaaatctctgtgaataaattctctctttgatcaataaaaaaaaaaaaaaaaaaaaaaa

SEQ ID NO: 2749 - DNA, 4982 bp, Homo Sapiens
  NM_005786
agctcgatgtgtctgtctatcagttgagactgtctgaaagctctgcgatccgaatgtgtgttatatttcactgaaaagaggagagagcgagagtgcatctccctctctcccaggagtttgagggggggggggacagtccacgctcatctcgcccacccagtgaatgtctgctcttcaccccctttgcacacactctccgggttgttgttgccttttttttttcttggaggggggggtgctttttgtgtatttttcaaatttttttctgttggaagatcaagaccggccaaaaatccatgatcaaaatgtgtttgcattagatttcgcattggaagaagcggcgatcctggcggccaagccccccgggtggaagcgcggggcaccaagtggcgctccggcggggtgacactgtttgatctgtgactgtttggaaggtggagcagcgcctgacatctccccccggcgcatcttatgttcctgaggaagaattgaaggcagcagaaatagatgaagagcacgtggaggatgacgggctgtctttggacattcaggaaagtgagtacatgtgcaatgaagagacggagatcaaagaggcgcagagctaccagaactccccagtcagctctgcgactaaccaggacgccggctacgggtcgcccttcagtgagagcagcgaccagctagcccatttcaaaggctcttcctctcgagaagagaaggaggatccgcagtgtcccgacagcgtctcgtacccccaggacagcctggcacagatcaaagctgtgtatgcaaacttgttctccgagtcctgctggtccagcttagctctggatttaaagaagtcgggttccaccaccagcaccaacgatgccagccagaaggagagctccgcccccacccccacaccccccacctgccccgtcagcaccactggccccaccacgagcacgcccagcaccagctgcagctccagcaccagccacagcagtaccaccagtaccagcagcagctccgggtacgactggcaccaggctgcactggccaagacgctgcagcagacgtcctcgtatgggctgcttcctgagcccagcctgttcagcaccgtgcagctctaccgccagaacaacaagctctacggctccgtcttcacgggcgccagcaagttccggtgcaaagactgcagtgccgcgtacgacacgctggtggaactgacggtgcacatgaacgagacaggccactaccgtgacgacaacagggacaaggactccgagaagaccaagaggtggtccaagcccaggaagcgctccctgatggagatggaggggaaggaggatgcccagaaggtgctgaagtgcatgtactgtggacactcctttgagtccttgcaggacctcagcgtccacatgatcaaaaccaagcattaccagaaagtgcctctgaaggagccagtgccagccatcaccaaactggtcccctccaccaaaaagcgggcgcttcaggacctggcgcccccctgctcccctgagccagcaggaatggccgcagaggtggccctgagtgagtcagccaaggatcagaaagcagcgaacccgtacgtcacgcccaataaccgctatggctaccagaatggcgccagctacacctggcagtttgaggcccgcaaggcgcagatcctcaagtgcatggagtgtggcagctcccacgacacgctgcagcagctcaccgcccacatgatggtcaccgggcacttcctgaaagtgaccacctcggcttctaagaagggcaagcagttggtgctggaccctgtggtggaagagaagatccagtccatcccactaccgcccaccacccacacgcggctgccggcctccagcatcaaaaagcagcccgactctcccgcggggtccacgacttctgaagaaaagaaagagccagagaaggagaagccgcctgtggctggcgacgcggagaagatcaaggaggagagtgaggacagcttggagaaatttgagcccagcaccctgtacccgtacctgcgtgaggaggacctggacgacagccccaagggagggctggacattctcaagtccctggagaataccgtctccacggccattagcaaagctcagaatggtgcgccctcatggggtggctaccccagcatccatgcagcctaccagctcccgggcaccgtgaagccactgccggcggccgtgcagagcgtgcaggtgcagccgtcctatgctggcggcgtgaagtcgctgtcttccgccgagcacaacgccctcctgcactccccagggagcctcacgcccccaccgcacaagagcaacgtgtctgccatggaggagctggtggagaaggtcacgggcaaggtcaacatcaagaaggaggagagaccccctgagaaggagaagagctccctggccaaggctgcgtcccccatagcaaaagagaataaagatttcccgaaaacggaggaagtcagcggcaaaccacagaagaagggccctgaggccgagactgggaaggccaaaaaggagggaccgctggacgttcacaccccaaatggcacagagcctctcaaagcaaaggtcaccaacggctgtaacaacctggggatcatcatggaccactcaccggagccttccttcatcaacccgctgagcgctttgcagtccatcatgaacacccacctgggcaaggtgtccaagcccgtgagtccctcgctggacccgctggcgatgctgtacaagatcagcaacagcatgctggacaagccggtgtaccccgccacccctgtgaagcaggccgatgccatcgaccgctactattatgaaaacagcgaccagcccattgacttaaccaagtccaagaacaagccgctggtgtccagcgtggctgattcggtggcatcacctctgcgggagagcgcactcatggacatctccgacatggtgaaaaacctcacaggccgcctgacgcccaagtcctccacgccctccacagtttcagagaagtccgatgctgatggcagcagctttgaggaggcgttggacgagctgtcaccggtccacaagaggaagggccggcagtccaactggaacccgcagcaccttctcatcctgcaggcccagttcgcctcgagcttgcgggagaccacagagggcaagtacatcatgtcggacttgggcccgcaggagagggtgcacatctcgaagtttactgggctctccatgaccaccatcagccactggctggccaatgtgaagtaccagttgaggaggacagggggaacgaaattcctaaagaacctggacacagggcatcctgttttcttttgcaacgattgtgcctctcagttcagaactgcttctacatacataagtcatttggagacacacttgggcttcagcctgaaggatctctccaagctgccactcaatcagattcaagaacagcagaatgtttcgaaagtcctcaccaacaaaactctgggcccactgggggccaccgaggaagacttgggctccacattccaatgtaagctctgcaaccggacttttgcgagcaagcacgcagtcaaactgcaccttagtaagacccacggcaagtctcccgaggaccacctgatctatgtgactgagttggagaaacagtagcgtccaggtatgcaagagaccgcggaacattgcactaaacgtcgtcgagctgcactaggcctggcctgagcctctgaaatcagtctttcctttgttgctggcccgcctctctggaccttggttttcttacacatattttgtatatttatatgctctctgtccgatctgtgcatgttatttttctttttccgtgagtcaaagtctgacctttattttcaacatctgttcttggtgttaagctatcttttgtaggaaatagtggggcacactactcagagacattatttagcagtaaagaaagacacaaataacaatgataaaaagacatcctaaaatggtgaagttgccatgacaataaaggtcatagaacctggtagtgtcaaatttaaccctttgaggactgtaattgcatttctgtgcctttcacttgaaaaaaaaaaaagaagaaaaaaaggcttaaaggcatttcattcagatcaaaagctgtgtcagacacaaaacttatttaataattaaaaaatgagcttttatatgcagaactggtttgtgaggaaacatgcatgcagctgtgggaagatagaaagctgtctaggactcacggggttcggaagccacacctctacatgtctaaaacaaaaaacaacaacaacagataccccactcgccactatgcccaaaccctctggatgctgaaaaatgccactttcggcaaaaaaaaaagtatgcaagctattatttaaaaatgtgtaaaaatgctatttcttttttcctgtaaaatattgcagtttatagttatttacaaatgtaagctttggtacaagctgacctttctatagcgtgctgcattggtaaatgaaaaaaaatggggcaaacgttggagtcctttccttgtaaattgccagcatcagcttaaaaactcctgtatgttacatatcgtaccattttaatctcttcaactttctttgtaccttctggctgtatgctttctcttttaactttttatattgtcattttatattaaatttctgtgtatataatgtaaaaccacaatttttgaataaaatttagttcctgcagcttgatttaaatagaggacttttactggcacctgcatctctccagatgcatgtactcagagggactgtcagacaaaaataaatacataaaaacaaagcaagcaatgcactattaattatacattttgatgttctatcattaatattgtacagtacattttggttcacacaattaaatccactgttttctcagatgtaaaataaacccacatgcagttcttgatttacaaaaaaaaaaaaaaaa

SEQ ID NO: 2750 - DNA, 1550 bp, Homo Sapiens
  NM_005787
ggtgggcccacacaagcggcgcaccgttaagatggcggctgggctgcggaaacgcggccggtccggttccgcggcccaggcagagggactctgcaagcaatggctgcagcgcgcctggcaagagcggcgcctgctgctgcgggagccgcgctacacgctgctggtggccgcctgcctctgcctggcggaggtgggcatcaccttctgggtcattcacagggtggcatacacagagattgactggaaggcctacatggccgaggtagaaggcgtcatcaatggtacctatgactatacccaactgcagggtgacaccggaccacttgtgtacccagctggtttcgtgtacatctttatggggttgtactatgccaccagccgaggcactgacatccgcatggcccagaacatctttgctgtgctctacctggctaccttgctgcttgtcttcttgatctatcaccagacctgcaaggtacctcccttcgtctttttcttcatgtgctgcgcctcttaccgtgtccactccatctttgtgctgcggctcttcaatgacccagtggccatggtgctgctcttcctcagtatcaacctcctgctggcccagcgctggggctggggttgctgctttttcagcctggcagtctctgtgaagatgaatgtgctgctcttcgcccctgggttactgtttcttctcctcacacagtttggcttccgtggggccctccccaagctgggaatctgtgctggccttcaggtggtgctggggctgcccttcctgctggagaaccccagcggctacctgtcccgctcctttgaccttggccgccagtttctgttccactggacagtgaactggcgcttcctcccagaggcgctcttcctgcatcgagccttccacctggccctgttgactgcccacctcaccctgctcctgctgtttgccctctgcaggtggcacaggacaggggaaagtatcttgtcgctgctgagggatccctccaaaaggaaggttccaccccagccccttacacccaaccagatcgtttctaccctcttcacctccaacttcattggcatctgcttcagccgctccctccactaccagttctacgtctggtatttccacacactgccctacctcctgtgggccatgcctgcacgctggctcacacacctgctcaggttgttggtgctggggctcatcgagctctcctggaacacatacccttccacatcctgcagctctgctgccctgcacatatgccatgccgtcatcctgctgcagctctggctgggcccgcagcctttccccaagagcacccaacacagcaagaaagcccactgaagtccacccctttccctcaggacctgagtctaccctcaggacctggggttggttggactctgcccttccaaataaaccttgctaagtccaactctgtgcaacctacatggaggtgggggcagccgatgcctggtccaggctgtgagggacacgtatggagcagataaagaattcactcaagcagtaaaaaaaaaaaaaaaaa

SEQ ID NO: 2751 - DNA, 2743 bp, Homo Sapiens
  NM_005788
acgtgacccgcacggcgcctcgaggccggaagcgattgcgagccagcgcgcgcgcttcggcgttcccggcggtctgcgaagtttccggagccccggtcccgccgcgggttcgcgcttgtgctcgcgctcgttcctggagtcggcggccgctgcgcgcgctcgttgcccaacccggtccccgcccccagacacgccgggctctcggggcaccacagccatgtgctcgttagcgtcaggcgctaccggcggccggggcgctgtggagaatgaggaggacctgccagaactgtcggacagcggggacgaggccgcctgggaggatgaggacgatgcagatctcccccacggcaagcagcagaccccctgcctgttctgtaacaggttattcacatctgctgaagaaacattttcacactgtaagtctgagcatcagtttaatattgacagcatggttcataaacatggacttgaattttatggatacattaagctaataaattttattagacttaagaatcctacagttgagtacatgaattccatatacaacccagtgccttgggagaaagaagagtatttgaagccagtattagaagatgaccttttacttcaatttgatgtagaagatctttatgaaccggtgtcagtacccttctcataccccaatggactcagtgaaaatacatctgttgttgaaaaattgaaacatatggaagccagggcactgtctgctgaagccgcattggccagagcacgtgaggatctgcaaaaaatgaaacaatttgctcaggattttgtgatgcacacagatgtcagaacctgctcgtcatctactagtgtcattgcggacctccaggaggatgaggatggtgtttatttcagctcatacgggcattatgggatacatgaagaaatgctaaaggacaaaatacgaacagaaagctaccgagatttcatataccaaaatccacatatcttcaaagacaaggtagttttggatgttgggtgtggaactggaattctctctatgtttgctgctaaagctggggcgaagaaggttcttggagttgatcaatctgaaatactttaccaggcaatggatattataagactaaataaacttgaagatactattacactaattaaaggaaagattgaagaagttcatcttcctgtagaaaaagtagatgttatcatatctgagtggatgggctattttcttctgtttgagtctatgttagattctgtcctttatgcaaagaacaaatacttggcaaaaggaggctcggtctaccctgacatttgcactatcagccttgtagcagtgagtgatgtgaataaacatgctgatagaattgctttttgggatgatgtctatggcttcaagatgtcctgcatgaagaaagcagttattccagaagctgttgtggaagttttagatccgaagactcttatttcagaaccttgtggtattaagcatatagattgccatacgacgtctatctcagatttggaattttcatcagattttaccctgaaaatcacaaggacatccatgtgcacggcaattgctggctactttgatatatattttgagaagaattgccacaacagggtcgtgttctctacgggccctcagagcaccaaaacacactggaaacaaacagtatttctactggaaaaaccattttcagttaaagcaggtgaagccttgaaaggaaaggtcacagttcacaagaataagaaagatccacgttctctcaccgtgaccctcacgttgaataattcaactcaaacttatggtctccagtgaaacagccataaaagcacactaccttgtagtttttaatgtgggggtagagtgggtcagcaggagggagctggttttatgtgagcagatggatggatgatggaccctttcctaatgagcctcctcaataagagagaagttctcattgtgggaatctgacatagttcagctgaggaagagaatcagctgatcctcatggtctgccacgtaatcattttcttagacgtttgctccaccagatttaaccaaatgtaactcccacattgagtttatctatattgaaaatcatttacattggcctatatttggaagagagatagtcttttgtttttaataagtttcttactataaattttaaacaaattggttagttatttggatattttattaaactagtaacacaggtactacacattttattatggactcctctgaggaggagtttttaattgtatttgctagaaaatcaggatgtaataaagatttgtataaaaaaactaaaatatggaaaagagcttcagccttcatatacaaatcatatatgcagacagcctagttgattatctagcatacttagggttctcattttgtagtttcttccctctttgtgactattccttagccttatagatttctagtactgcccaggaaatctaatttcaatacatttatcctaggtttcatgaaagtttttaaagattgggataaatatgtacttatttactaacgtattatctttttcaaaccagatttatgtgcaaaggttaaacatgtaactgttactaagcagtctataaagttgtcatttacaattactgattcaatttgaaatgtagaataaaattttaataaaatgtatccttataaaatattttaaaaatattgatattataaaagttttcaataaaatatatcaaacaaaaaaaaaaaaaa

SEQ ID NO: 2752 - DNA, 3189 bp, Homo Sapiens
  NM_005789
ggcgtgagcggcgaaagccgggagggcgagcgagagagcaagcaggcagcaggctgccggcgggcgggcggacggcacagagggagggagcgagcgagcagtgagtaagccagcaagggcggtcgggtcccgaggtcagccgagatttctcaggtccctccggccccctccctggagtccacagcgcctccggtgtccagaggatcggacacggcccggcccggccatggcctcgttgctgaaggtggatcaggaagtgaagctcaaggttgattctttcagggagcggatcacaagtgaggcagaagacttggtggcaaattttttcccaaagaagttattagaacttgatagttttctgaaggaaccaatcttaaacatccatgacctaactcagatccactctgacatgaatctcccagtccctgaccccattcttctcaccaatagccatgatggactggatggtcccacttataagaagcgaaggttggatgagtgtgaagaagccttccaaggaaccaaggtgtttgtgatgcccaatgggatgctgaaaagcaaccagcagctggtggacattattgagaaagtgaaacctgagatccggctgttgattgagaaatgtaacacggtcaaaatgtgggtacagctcctgattcccaggatagaagatggaaacaactttggggtgtccattcaggaggaaacagttgcagagctaagaactgttgagagtgaagctgcatcttatctggaccagatttctagatattatattacaagagccaaattggtttctaaaatagctaaatatccccatgtggaggactatcgccgcaccgtgacagagattgatgagaaagaatatatcagccttcggctcatcatatcagagctgaggaatcaatatgtcactctacatgacatgatcctgaaaaatatcgagaagatcaaacggccccggagcagcaatgcagagactctgtactgaggccagggccagggccaggggactctgtgagtctggctcaagaccgacattgccttggtttgttacatgactatcgtgatggggaaactggctggaaatagtaatcacacctctctgtttttagttagagtctaatgaaactctcatctagttctgtgatgtgtttacctcttttttcaggcctcaggaactcttctatttccttccctaataccccacacccaacctgtcgtaatttctggagaactccaggtttgtgtgtgcaggatgttggcacaaaaatacctgtgttttcattctccccctctctccctcctgtgtcttgcgctttatgttttcttccgtttgataattagttggttaaaagctgagggaaccggaaggaaagtgctaggtgttttttaggaactagggtggcggggggacgaacttctcttcctcacatgaggttactgtttctttcctctgtggggcattggatcctcccacagttgccctggtgatgacttagggcttcccatctgtgtacatcccactttgaatcttgatcgtgacaagaaataccttaggccttcagtcaattccgaagctccttcagttgtttttataatgggcgttttcacatgcacatatgtgtatgcatgtatacgcccatacagacatgcacacacagactcctactccattagctaacataccctccctctccacaacccctgtcacatacctttcaggaggtgacagttgtcttagttgtcatctacccagacaaacgtcctgggcccgtcctccctcctgatactgtagcctcttggtacccagggtgagttggtggagaacagagagatgagaagcagagggcttggggaaagcctgttcctctctgactcagccctttttggcattattgcaagagcttgactcctggttgccttttcccagccagttttcagttggggtgaaggtttctgcaagtgtgaggtccagatgctgctgctcatgttgggctttccttttgggaactatttctctttatttatagtgtcgggcttccggggaaagcaatcattggtgtgtatgtgtatgtgcatgcacacacgtgcatatacacatttgtgtatgtggaaatgtgctgggcaagtcaaaactatagaagagttgcctcctgtctctcgaatcttccagagatatcacttaattgttaacagcttttgtgttaatccccttcagcccctagctcttttattctaccacggctggagagttgatacctgcagtcagcctgccagtgactcttagtgtctgtttctgacttatttttcctgtctctgtcttccaacccccaataatatttccaccggggatgcatcatttttactcccaatattctgtagagagggagtcaggatgctgtcttcccacgaatagtactcagtaacaaaccaattgcattttagttgggcagtgctcccacccaccctccagatcccttccagctaaaacccttcccccttccctccatgtgtttctcagtttcccgtttcgtttgttggactgttccactgcccctcctcctcaccctatcacccatggatcgtaatgtaaaattcttttaccatgtcaagaaattattaaaaatacaggtactttgacctctttctaaagccgcagaccctggtgcaatgctctggtggctagggatgtactcatgctcatatgtgtgcacgcttggacacccacctccatggacacctagccaccctgttgtgtgtccttatgccagttgagctgaatcttttccccagtatagtggaaagactgaggcttctgcctactgagcaaggttgggtgcttcatttgtgttcagtctgaattatgggaaagttagctcttcccagacctaagctgccttctctccctactttcagaagatcctagttccttccttcccgagtgatacccatgaactgccagtagaggctgctatcgttccatgtgtaaggaatgaactggttcaaggcgcgtcctacccagtcattttctttaccttatactaattcttcctgaataatgtcttcagtttcttgaggagactcctagttttggttttcaaattacttggagggctgcctaggaatctatctccctctgaaataaagtttcctcatcttccaccttgcaaaaaaaaaaaaaaaaaa

SEQ ID NO: 2753 - DNA, 2488 bp, Homo Sapiens
  NM_005791
aggtcaggggcgtggcgaaggtcgctgctttcctgctacaacgggcctactttagctaaaacagaaacgtaaggccaggacgggtcaccctttgtgggcccctgaaaaatacaaaacgaagtttggagagagttgaaaggcgtttgggctgaccatggagatttttgtttcccaccctcctgcgaaagcgctcgcgctgccattggctctggctgagggcgagtccggaacctgtgcgccgcggaactttcggctctgaaatccaagttgcgctgggcgcatctttgccgcgcggtttccgggcggctcccttcccttgcatgctgcattgtgtcgggagttgctgacagccatggcgccgcaggtctggcgtcgacggaccctggagcggtgtctgacggaagtcggcaaagccacgggtcggcccgagtgcttcctcacgattcaagagggattggcatcaaagttcacttctttaacaaaagtgctttatgactttaataaaatattagagaatggtaggatccatggaagccccttgcaaaaacttgtgatagaaaattttgatgatgagcagatttggcaacaactggaattgcaaaatgaaccaattttacaatactttcagaatgcagttagtgaaacaattaatgatgaagatatcagtcttctcccagagagtgaagaacaggaacgtgaagaggatggttcagagatagaggctgatgacaaggaggacctagaagatttagaggaggaggaagtgtccgacatgggtaatgatgatcctgaaatgggtgagagagctgaaaactcaagcaaatctgatctgaggaaaagccccgttttcagtgatgaggattctgaccttgactttgatatcagcaaattggaacagcagagcaaggtgcaaaacaaaggacagggaaaaccaagagaaaagtccatagtagatgataaattcttcaaactctctgaaatggaggcctatttagaaaacatagaaaaagaagaggaacgaaaagatgataatgatgaggaggaggaagatattgatttttttgaagatattgattctgatgaagatgaagggggactgtttggaagtaaaaaacttaagtcaggtaaaagttccagaaatctgaaatacaaagatttttttgatccagttgaaagtgatgaagacataacaaatgttcatgatgatgagctggattcaaacaaagaagatgatgaaattgctgaagaagaagcagaagaactaagtatttcggaaacggatgaagatgatgaccttcaagaaaatgaagacaataaacaacataaagaaagcttgaaaagagtgacctttgctttaccagatgatgcggaaactgaagatacaggtgttttaaatgtaaagaaaaattctgatgaagttaaatcctcctttgaaaaaagacaggaaaagatgaatgaaaaaattgcatctttagaaaaagagttgttagaaaaaaagccgtggcagcttcagggggaagtgacagcacagaagaggccagagaacagcctcctggaggagaccctacactttgaccatgctgtccggatggcacctgtgattacagaggaaaccacccttcaactggaagatatcattaaacagaggataagagatcaggcttgggatgatgtagtacgtaaagaaaaacctaaagaggatgcatatgaatataaaaagcgtttaaccttagaccatgagaagagtaaattgagccttgctgaaatttatgaacaggagtacatcaaactcaaccagcaaaaaacagcagaagaagaaaatccagaacatgtagaaattcagaagatgatggattccctcttcttaaaattggatgccctctcaaacttccactttatccctaaaccgcctgtaccagagattaaagttgtgtcaaatctgccagccataaccatggaggaagtagccccagtgagtgttagtgatgcagctctcctggccccagaggagatcaaggagaaaaataaagctggagatataaaaacagctgctgaaaaaacagctacagacaagaaacgagagcgaaggaaaaagaaatatcaaaagcgtatgaaaataaaagagaaggagaagcggagaaaactgcttgaaaagagcagtgtagatcaagcagggaaatacagcaaaacagtagcttcggagaagttaaaacagctgaccaaaactggcaaagcttccttcataaaggatgaaggtaaagacaaggccttaaagtcctctcaagcattcttttctaaattacaagatcaagtaaaaatgcaaatcaatgatgcaaagaaaacagaaaagaaaaagaagaaaagacaggatatttctgttcataaattaaagctgtaatatattttgaatataatgtaaatattaatgtgtaagcttatattgtgtcattgttctgttttataataaaattcttgagaaccttccaaa

SEQ ID NO: 2754 - DNA, 3905 bp, Homo Sapiens
  NM_005800
cccaaacccagccactcacacatggcgggctcagcagccaccggccccgcccctcctcgtcgccgcagtcgcaactgcgtctgcggccacagggcggacagccacgcctctgcggagggcgaccggaagtgctcacgtcttcaccttccccgccacgccaccgtcctttcaggcccagcgtgcagcaggaaggaggactcttttgccgcggactcaagccggaagccgccttcctagtggagacgcgagtgggggaggagcagtccgaggggaacgtgggttgaacgttgcaactagggtggagatcaagctggaacaggagttccgatcgacccggtaccaagaaggggagtgcccgcggcagggttcattgaaaaaatccttagtgatattgacatgtctcaagtgacataaattagccaatgactcggaatgatggattctccgaagattggaaatggtttgccagtgattggaccagggactgatatagggatatcttcactccacatggtggggtatttgggaaaaaattttgattcagctaaagttccatcagatgagtattgccctgcttgtagagagaagggaaagttaaaagccttaaagacttaccgaattagttttcaagaatctatctttttgtgtgaggatctgcagtgcatctatcctttgggctctaaatcacttaataacctaatttctcctgatttggaagaatgtcacactccacataagcctcagaaaaggaagagcttagaaagcagctataaggattcacttcttttagcaaattccaaaaagactagaaattatattgctattgacggtggaaaagttttgaacagcaaacataatggagaagtatatgacgaaacctcgtcaaacttacctgatagtagtggtcaacagaatccaattaggacagctgattccttggagcggaatgagattttggaagctgatactgttgacatggctactacaaaagatcctgctacagttgatgtctctggaactggcagaccttcccctcaaaatgaaggatgtacatctaaactggaaatgccactggagagcaaatgtacatcatttccccaggctttatgtgtccagtggaaaaatgcttatgctctctgttggttagactgtatcctgtcagctttggtgcactcggaagagttaaagaacaccgtgactggactgtgctcgaaggaggaatctatattctggcggttgcttacaaaatataatcaagcaaatacacttctatataccagtcaattgagtggtgttaaagatggagattgtaaaaaacttacctcagaaatatttgcagagatagagacctgtctgaatgaagttagagatgaaatttttattagccttcagccccagcttagatgcacattaggtgatatggaaagccctgtgtttgcatttcccctgctcttaaaactagaaacccacattgaaaagctcttcctatattctttttcttgggactttgaatgttcgcagtgtggacaccaatatcaaaacaggcatatgaagagtctggtcacctttacaaatgtcatccctgagtggcacccacttaatgctgcccattttggtccatgtaacaattgcaacagtaaatcacaaataagaaaaatggtattagaaaaagtatctcccatattcatgttgcactttgtagaaggcttaccacagaatgacttgcagcactatgcatttcattttgaaggctgtctttatcagataacttctgtaattcagtatcgagcaaataatcattttataacatggattttagatgctgatggaagttggctggaatgtgatgacttaaaaggcccatgttctgaaaggcacaagaaatttgaagttcctgcttcagagatacatattgttatttgggaaagaaaaatatcccaagtgacagataaagaagctgcctgccttccacttaaaaagactaatgaccaacacgctctcagtaatgagaaaccagtatctttaacatcgtgttctgtgggtgatgctgcctcagctgaaacagcctcagtaactcaccctaaagatatatcagttgcccctcgtactctttcacaggacacagctgtaactcatggagatcatttactttcaggtccaaaaggtttggttgacaatattttacctctgacacttgaagaaactatccagaaaacagcctcagtttcacagttaaattctgaagctttcctgttagaaaataaacctgtagcagaaaatacaggaattctcaaaaccaatactttgctatcacaagaatcactaatggcttcttcagtatcagctccatgtaatgaaaagcttattcaagaccaatttgtggacataagttttccatcccaagttgtaaatacaaacatgcagtcagtacagctgaatacagaagatactgtaaatactaaatctgtgaataatactgatgctactggtcttatacagggagtgaagtcagtagaaattgagaaggacgctcagttaaaacaattccttacaccaaaaactgaacaattaaaaccagaacgtgtcacatctcaggtatctaatttgaagaaaaaagaaactacagcagattctcaaaccacaacatctaagtcattacagaatcagtctctgaaagaaaatcagaagaagccatttgtgggaagttgggttaaaggcttaataagcaggggtgcttcttttatgccactctgtgtttcagctcataatagaaacactataactgatttacaaccttcagttaaaggggtaaataattttggtggctttaaaactaaaggtataaaccagaaggccagccacgtatccaagaaagctcgtaagagtgcaagtaagcctcctcccatcagtaagccaccagcaggccctccatcgtctaatggcacagctgcccacccacatgctcatgctgcttcagaagttttggaaaagtctggaagcacctcatgtggagctcaactcaaccacagttcttatgggaatggtatttcttcagcaaaccatgaagacttggtggaaggtcagattcataaacttcgtctaaaacttcgtaaaaagctaaaggcagaaaagaagaaattagctgctcttatgtcttccccgcaaagcagaacagttcgaagtgaaaatctagaacaggtgccccaggatgggtctccaaatgattgtgaatcaatagaggacttgttaaatgagctaccatatccaattgatattgccagtgagtctgcatgcaccactgttcctggtgtttccctgtacagtagtcaaactcatgaagaaattttagcggaattattgtctcctacacctgtttcaacagagctgtcagaaaatggggaaggtgactttaggtatttgggaatgggagatagtcatatcccaccaccagtaccaagtgaattcaatgatgtttcccagaacacacatctgagacaggaccataattattgtagccccaccaagaaaaatccatgtgaagttcagccagactctctgacaaataatgcctgcgttagaacattaaacttggagagtccgatgaagactgatattttcgatgagtttttttcctcctcagcattaaatgctttagcaaatgacacattagacctacctcatttcgatgaatatctgtttgagaattattgaattaatgcttgttaacttttttcatataatatttattattattagaagaacttacaatgtgttcaggtagtgtttatacactggacttgtgtaattacttgtgtaataaccatgaacaaaatgcaaggtttaacctttggttctgcccatgaagcatgtaatctttcttacacattaaaatcactgaatgtgta

SEQ ID NO: 2755 - DNA, 1839 bp, Homo Sapiens
  NM_005803
agcaacggggtgcggcagggtggggaacgcgggagcggggccagctcccaggaaagctggtctgcgagcggcccctgcccggctcccaggtccctgcgcgaccccgcccttcccgagaccccagccgggctgccgcccgcgtcccggaagctccagcctgaaccatgtttttcacttgtggcccaaatgaggccatggtggtctccgggttctgccgaagccccccagtcatggtggctggagggcgtgtctttgtcctgccctgcatccaacagatccagaggatctctctcaacacactgaccctcaatgtcaagagtgaaaaggtttacactcgccatggggtccccatctcagtcactggcattgcccaggtaaaaatccaggggcagaacaaggagatgttggcggccgcctgtcagatgttcctggggaagacggaggctgagattgcccacattgccctggagacgttagagggccaccagagggccatcatggcccacatgactgtggaggagatctataaggacaggcagaaattctcagaacaggttttcaaagtggcctcctcagacctggtcaacatgggcatcagtgtggttagctacactctgaaggacattcacgatgaccaggactatttgcactctttggggaaggctcgaacagctcaagtccaaaaagatgcacggattggagaagcagaggccaagagagatgctgggatccgggaagctaaagccaagcaggaaaaggtgtctgctcagtacctgagtgagatcgagatggccaaggcacagagagattacgaactgaagaaggccgcctatgacatcgaggtcaacacccgccgagcacaggctgacctggcctatcagcttcaggtggccaagactaagcagcagattgaggagcagcgggtgcaggtgcaggtggtggagcgggcccagcaggtggcagtgcaggagcaggagatcgcccggcgggagaaggagctggaggcccgggtgcggaagccagcggaagcggagcgctacaagctggagcgcctagccgaggcagagaagtcccaactaattatgcaggcggaggcagaagccgcgtctgtgcggatgcgtggggaagctgaggcctttgccataggggcccgagcccgagccgaggctgagcagatggccaagaaggcagaagccttccagctgtaccaagaggctgctcagctggacatgctgctagagaagctgccccaggtggcagaggagatcagtggtcccttgacttcagccaataagatcacactggtgtccagcggcagtgggaccatgggggcagccaaagtgactggggaagtactggacattctaactcgcctgccagagagtgtggaaagactcacaggcgtgagcatctcccaggtgaatcacaagcctttgagaacagcctgagccttcagccctcacagatgcccagcctcatagctgaagttgcctgaatgatcctcctgttgcatgtaacccactggcctccctgagcatgtccattgacagtgaggtcccacccctcatctctccttgccaaatagtttgtgccttgtcttgaagggggttgctccccttgccaacctcacactgctatgattgccaactccagcggtcccatgtcagccttctgatgatcccactccaccccacctcaacttatttaacttcctaattaaatcagactgtttgagcctgttgtctagaatattttcctgaccaagactgagggatgggctggaggttttcaactttgctacccaaataaattgctgtaagtaagtactaaaaaaaaaaa

SEQ ID NO: 2756 - DNA, 1558 bp, Homo Sapiens
  NM_005804
agcagcagcccgacgcaagaggcaggaagcgcagcaactcgtgtctgagcgcccggcggaaaaccgaagttggaagtgtctcttagcagcgcgcggagaagaacggggagccagcatcatggcagaacaggatgtggaaaacgatcttttggattacgatgaagaggaagagccccaggctcctcaagagagcacaccagctccccctaagaaagacatcaagggatcctacgtttccatccacagctctggcttccgggactttctgctgaagccggagctcctgcgggccatcgtggactgtggctttgagcatccttctgaggtccagcatgagtgcattccccaggccatcctgggcatggacgtcctgtgccaggccaagtccgggatgggcaagacagcggtcttcgtgctggccaccctacagcagattgagcctgtcaacggacaggtgacggtcctggtcatgtgccacacgagggagctggccttccagatcagcaaggaatatgagcgcttttccaagtacatgcccagcgtcaaggtgtctgtgttcttcggtggtctctccatcaagaaggatgaagaagtgttgaagaagaactgtccccatgtcgtggtggggaccccgggccgcatcctggcgctcgtgcggaataggagcttcagcctaaagaatgtgaagcactttgtgctggacgagtgtgacaagatgctggagcagctggacatgcggcgggatgtgcaggagatcttccgcctgacaccacacgagaagcagtgcatgatgttcagcgccaccctgagcaaggacatccggcctgtgtgcaggaagttcatgcaggatcccatggaggtgtttgtggacgacgagaccaagctcacgctgcacggcctgcagcagtactacgtcaaactcaaagacagtgagaagaaccgcaagctctttgatctcttggatgtgctggagtttaaccaggtgataatcttcgtcaagtcagtgcagcgctgcatggccctggcccagctcctcgtggagcagaacttcccggccatcgccatccaccggggcatggcccaggaggagcgcctgtcacgctatcagcagttcaaggatttccagcggcggatcctggtggccaccaatctgtttggccgggggatggacatcgagcgagtcaacatcgtctttaactacgacatgcctgaggactcggacacctacctgcaccgggtggcccgggcgggtcgctttggcaccaaaggcctagccatcacttttgtgtctgacgagaatgatgccaaaatcctcaatgacgtccaggaccggtttgaagttaatgtggcagaacttccagaggaaatcgacatctccacatacatcgagcagagccggtaaccaccacgtgccagagccgcccacccggagccgcccgcatgcagcttcacctcccctttccaggcgccactgttgagaagctagagattgtatgagaataaacttgttattatggaagcctggctcccaccccatctaaaaaaaaaaaaaaaaaaa

SEQ ID NO: 2757 - DNA, 2505 bp, Homo Sapiens
  NM_005806
gtgcggatgcttattatagatcgacgcgacaccagcgcccggtgccaggttctcccctgaggcttttcggagcgagctcctcaaatcgcatccagattttcgggtccgagggaaggaggaccctgcgaaagctgcgacgactatcttcccctggggccatggactcggacgccagcctggtgtccagccgcccgtcgtcgccagagcccgatgacctttttctgccggcccggagtaagggcagcagcggcagcgccttcactgggggcaccgtgtcctcgtccaccccgagtgactgcccgccggagctgagcgccgagctgcgcggcgctatgggctctgcgggcgcgcatcctggggacaagctaggaggcagtggcttcaagtcatcctcgtccagcacctcgtcgtctacgtcgtcggcggctgcgtcgtccaccaagaaggacaagaagcaaatgacagagccggagctgcagcagctgcgtctcaagatcaacagccgcgagcgcaagcgcatgcacgacctcaacatcgccatggatggcctccgcgaggtcatgccgtacgcacacggcccttcggtgcgcaagctttccaagatcgccacgctgctgctggcgcgcaactacatcctcatgctcaccaactcgctggaggagatgaagcgactggtgagcgagatctacgggggccaccacgctggcttccacccgtcggcctgcggcggcctggcgcactccgcgcccctgcccgccgccaccgcgcacccggcagcagcagcgcacgccgcacatcaccccgcggtgcaccaccccatcctgccgcccgccgccgcagcggctgctgccgccgctgcagccgcggctgtgtccagcgcctctctgcccggatccgggctgccgtcggtcggctccatccgtccaccgcacggcctactcaagtctccgtctgctgccgcggccgccccgctggggggcgggggcggcggcagtggggcgagcgggggcttccagcactggggcggcatgccctgcccctgcagcatgtgccaggtgccgccgccgcaccaccacgtgtcggctatgggcgccggcagcctgccgcgcctcacctccgacgccaagtgagccgactggcgccggcgcgttctggcgacaggggagccaggggccgcggggaagcgaggactggcctgcgctgggctcgggagctctgtcgcgaggaggggcgcaggaccatggactgggggtggggcatggtggggattccagcatctgcgaacccaagcaatgggggcgcccacagagcagtggggagtgaggggatgttctctccgggacctgatcgagcgctgtctggctttaacctgagctggtccagtagacatcgttttatgaaaaggtaccgctgtgtgcattcctcactagaactcatccgacccccgacccccacctccgggaaaagattctaaaaacttctttccctgagagcgtggcctgacttgcagactcggcttgggcagcacttcggggggggagggggtgttatgggagggggacacattggggccttgctcctcttcctcctttcttggcgggtgggagactccgggtagccgcactgcagaagcaacagcccgaccgcgccctccagggtcgtccctggcccaaggccaggggccacaagttagttggaagccggcgttcggtatcagaagcgctgatggtcatatccaatctcaatatctgggtcaatccacaccctcttagaactgtggccgttcctccctgtctctcgttgatttgggagaatatggttttctaataaatctgtggatgttccttcttcaacagtatgagcaagtttatagacattcagagtagaaccacttgtggattggaataacccaaaactgccgatttcaggggcgggtgcattgtagttattattttaaaatagaaactaccccaccgactcatctttccttctctaagcacaaagtgatttggttattttggtacctgagaacgtaacagaattaaaaggcagttgctgtggaaacagtttgggttatttgggggttctgttggctttttaaaattttcttttttggatgtgtaaatttatcaatgatgaggtaagtgcgcaatgctaagctgtttgctcacgtgactgccagccccatcggagtctaagccggctttcctctattttggtttatttttgccacgtttaacacaaatggtaaactcctccacgtgcttcctgcgttccgtgcaagccgcctcggcgctgcctgcgttgcaaactgggctttgtagcgtctgccgtgtaacacccttcctctgatcgcaccgcccctcgcagagagtgtatcatctgttttatttttgtaaaaacaaagtgctaaataatatttattacttgtttggttgcaaaaacggaataaatgactgagtgttgagattttaaataaaatttaaagcaaaaaaaaaaaaaaaa

SEQ ID NO: 2758 - DNA, 4422 bp, Homo Sapiens
  NM_005808
gcggccgccgcgccgcgcacccatggacggcccggccatcatcacccaggtgaccaaccccaaggaggacgagggccggttgccgggcgcgggcgagaaagcctcccagtgcaacgtcagcttaaagaagcagaggagccgcagcatccttagctccttcttctgctgcttccgtgattacaatgtggaggcccctccacccagcagccccagtgtgcttccgccactggtggaggagaatggtgggcttcagaagccaccagctaagtaccttcttccagaggtgacggtgcttgactatggaaagaaatgtgtggtcattgatttagatgaaacattggtgcacagttcgtttaagcctattagtaatgctgattttattgttccggttgaaatcgatggaactatacatcaggtgtatgtgctgaagcggccacatgtggacgagttcctccagaggatggggcagctttttgaatgtgtgctctttactgccagcttggccaagtatgcagaccctgtggctgacctcctagaccgctggggtgtgttccgggcccggctcttcagagaatcatgtgtttttcatcgtgggaactacgtgaaggacctgagtcgccttgggcgggagctgagcaaagtgatcattgttgacaattcccctgcctcatacatcttccatcctgagaatgcagtgcctgtgcagtcctggttcgatgacatgacggacacggagctgctggacctcatccccttctttgagggcctgagccgggaggacgacgtgtacagcatgctgcacagactctgcaataggtagccctggcctctgcctgcctcccgcctgtgcactctggaacctctggcctcaggggacctgcctgtcctcagctccctgggagctgaaagtgaggatactccgtgctccaggccacagggtgaatgtggccatgcctacctgttttgtttttttaagaacagaaacaactattttaaaagaactcttttaagaaatttcataaagggacatgcattttactgggtttgcttttcttaaaacataccaaaaaagaaaaaaatagaaaaaaaaaaaaaaaaagcttgatctctatcagacttcctttcaactgtcctcccctccaagcagaccacctgtccccttctatcccagctcagagcagctgacccaactcagaatctctttcctacaggatgaagtgccttttgaatgttattttaagccgagagttaatttttctacacaacatatttccagacatcttttagtcttttattgtcttagatactataagaagatgaacatgacaattttctagaacctggtagcgtgtgtgtgtgtggcggggggtgctgagggaggggagtgagtcacaggagcctgtcccccaacaggtgtgactgctctgacaacctgtggcatgctgcagggtcaggctcctgataggaggatttcatgactatgtcattgtctccactcatttttgacccagtttggaatgtatctgcaattgtgtggctcaacactttaggaaacaatagattattttatattattatttctgatggtgacaagtttgtcttgaggtcacattttctccttgaaaagtgacatcctgtcacttctgctctcacactactgccatacatttgtgttttttgttgttattgtttgggtagagcagttacaagaaaccctaaaacccttggatataaaagaaatctgtttattgatttttaaatctttcctttccaaaagctggatacacatggagctgtttgggaattttccttgctgctaccgcgctgccaccaaatggaattgaccagcggctgttacactgttctttgccactgtgcctatgctcagaatatgctcactgctaagctacaaactcggacagggtcagaaacagaggtgtcccatcccattgcagcctccaccacctgtaaccccttcctggcattggccactgaagggtacaaaggcaaaaggaccacagcaccacttaggtgtagcatggattttaaactgcagtcagtatcagatcctgtttgataaataagctgactgttctctcttgagaacctgtggcctcaaccagccaccaagctgatgtggcccaagtccatctcttggtcttctcctttgaagcacagcctatttctgagccaagggttggggaagcctgtctagatgtgggactcattgccccaaaccagggagaggaagagctcccacagggagagcccaggctctctttgcagcctttcccagtttggtgtttaagcagtgccatgttccttgtttgacaacaagacagtctgtaaagtattgctcttaaaaacaattaaaaagaaccctttcatattggcaccattgccttagtcctctgtgggttggtcttcagccagcattctggtgggagtgactggcattaacaagactggaaatcgggggtcaaagtaaaatatctttgttttgctttcattcacaaagtaatgaagccagctgccaattacatcctcccaacagcactttggtctgtggactgctgtgtgaatattcagaagggaagtaagtattcagggggtaaacaggtctcccagcattctgagtgttccaaaccagtaatccacatgccaattcaaatagaacagccccttgctagatattaccacagataatgacagttacatggtagaactgcccatgccacaaatatttatttggaaaagtagtcattaaatgaacccactgccttaaatgtcttgaatgttgcagtcaagtgtctgtcatgtgttgatatccacacagaattaggccctaatgagagccttagaccctcaaccatgcccccttcgttggcatcacagggccttatttggaagagcgggcaaagaggatggaaatcataaaatatttcatgggaatcgaacctagggatagtgctccacttctgacgatggagtgaagacacttggcagacttgagccagacacttcacctagtagttcctgaaactgtgagcaccactgcactaagccagtgcggagctgttagggacgggcccagctcctgcaccacggacacagaatgtctggagagggccagcaggccctctgagggttctggaatctgtgcaccttatttgaccacactccaaaattctgtttttattttaacccttgaatctgctttatgtacataatcaaaatatctatatctatatctatatctatatctatatatttttaatcatctacatgtaaatgaagcaatagaattctaacataaggccaagaaatgagacgaatgtttggggtttatgttttttaaggtaaatacgggtattgtttttaattattaccatgtattaaattgtgggctttgaaacctaatgaaacctgttagccacttctctgtgccatatacttcccatgttaccaaaatacccccaactctttagccaaaagagaaccctgacctcctgagtttccatgctcctttctgtaccaggtttaaatgtagtcttctggagaagtatttttgacattgagctctgggacaggacaccttgggtttgtggactgcagcccactatgatgttattacttctctggccaggcctccagtggaagtgcacaggcactcccaatgttgttaatgctctgtcttccatttgttctggaatcctacgtgttggtctgtggttccatgcattagctgtttgtaaataatgcatttgcatactgaaaaaggaatgccacctgccacagttgatggtgaggaagctcctttgacgtggtgcaattttgatgagatgtctctggggacacgaggatgccctaatgatgctgacttgtcatggttgcagcatttgaacttttggtgttaaaaaaaaaaacctgtaagtctgtaacctggcaacattttacaaccctgtatttttaaagatggctttctaataaaaaatccagaaccacacagccctatggtcaaacaatcctacgtttgtgcctctgcttttaaaggtgctgtgctggacagttggcatgccagggttcgagaagagtgaatggcttgacgtacttgcagttaactgtgcaaaattggctggctgcctctgttcctactgtactgtaactttgatcatgtctgttcctgttccattctcccaggagcttctctgcagactgacacaccctcccccaccccgggtagtggagatgctggtgtctgggtagtcatggatttctgctggacatttgaatgtgataaacaatccagcattacttaggaaatgctacatgcggaatgtgcacgtttccaggggcgagtattgtcaatcaaaaggtttgcaatgatttccttcctgccaaaaataaacatgtgaaactgca

SEQ ID NO: 2759 - DNA, 1815 bp, Homo Sapiens
  NM_005810
cttagctgaagatgactgacagtgttatttattccatgttagagttgcctacggcaacccaagcccagaatgactatggaccacagcaaaaatcttcctcttccaggccttcttgttcttgccttgtggcaatagctttggggcttctgactgcagttcttctgagtgtgctgctataccagtggatcctgtgccagggctccaactactccacttgtgccagctgtcctagctgcccagaccgctggatgaaatatggtaaccattgttattatttctcagtggaggaaaaggactggaattctagtctggaattctgcctagccagagactcacacctccttgtgataacggacaatcaggaaatgagcctgctccaagttttcctcagtgaggccttttgctggattggtctgaggaacaattctggctggaggtgggaagatggatcacctctaaacttctcaaggatttcttctaatagctttgtgcagacatgcggtgccatcaacaaaaatggtcttcaagcctcaagctgtgaagttcctttacactgggtgtgtaagaaggtcagactttgatagatgaccactctgtcctgaccctcagatctgtcatgtatccctaaaaggagggagctggccactggctgttgggaaagccatgagtatatagttagcaaatactgaactttctcagatatggcattagatgcaagacaacctcctagggattgatgcctaactgatggattctctttgagactatttagatattatgtgagcaatttaaagaccagatctaagcaaattttgaaatagatgtttgttttttgtatttctcagtatggaaactaatgctgccactctcatccccgtcccaaccatctctgtcaaaaatatacctttttcatatgatattctgagctaatctgataaaatctatgccaatatatactattgcttgtgtactagagaagtacattattgctgtactcctctgtacattactgatccctgatggtatatttctatcctaacagtgtccctttgcagatcaagctttattctgaagaataaacctagctggcatgctggtgtgtacctgtagtcctagctatttgggaagctgaggtgggagggtcgcttgagcccaggagtttgaggctgcagtgagctatgattgtgccactgtactccagcctgggagatagagcaagactccatctctaaaaaaaaaaaaaaatgctaatgtgagaatataaattgtgggaaatgagtgagggcaaggtggtacttcctccttctgagctcttcacacgtaatgcaaaaacccggtcttaactgattttgttttttttctgagtatgcatatatgtggttgaatgaaccaatgtgtgattgtatcttttccattatgtgactgtttgacctgcatattaatttcaagatagcagtcaattcgataaggcattttcatagaggaaagtttacagaaacagtttatgtggttggatcaccaaattatcttaggtactaaggcctcaaaaataagaaaaactttattatttctcctcagtagagtttggacatacataaggagagaaggtacagtgatgaaggagaccataattctgtagtgttgatgatcctggattataatctttttctctttatctttcatagtttttttaaaaacatggactgtatcttatctaccactatatcccaaatacctaagatagtgcttacgttcagtgactattaaataaataaatggatgaattaaaaaaaaaaaaaaaaaaaaaaaaaaaaa

SEQ ID NO: 2760 - DNA, 2793 bp, Homo Sapiens
  NM_005814
ctacccctttgtgagcagtctaggactttgtacacctgttaagtagggagaaggcaggggaggtggctggtttaaggggaacttgagggaagtagggaagactcctcttgggacctttggagtaggtgacacatgagcccagccccagctcacctgccaatccagctgaggagctcacctgccaatccagctgaggctgggcagaggtgggtgagaagagggaaaattgcagggacctccagttgggccaggccagaagctgctgtagctttaaccagacagctcagacctgtctggaggctgccagtgacaggttaggtttagggcagagaagaagcaagaccatggtggggaagatgtggcctgtgttgtggacactctgtgcagtcagggtgaccgtcgatgccatctctgtggaaactccgcaggacgttcttcgggcttcgcagggaaagagtgtcaccctgccctgcacctaccacacttccacctccagtcgagagggacttattcaatgggataagctcctcctcactcatacggaaagggtggtcatctggccgttttcaaacaaaaactacatccatggtgagctttataagaatcgcgtcagcatatccaacaatgctgagcagtccgatgcctccatcaccattgatcagctgaccatggctgacaacggcacctacgagtgttctgtctcgctgatgtcagacctggagggcaacaccaagtcacgtgtccgcctgttggtcctcgtgccaccctccaaaccagaatgcggcatcgagggagagaccataattgggaacaacatccagctgacctgccaatcaaaggagggctcaccaacccctcagtacagctggaagaggtacaacatcctgaatcaggagcagcccctggcccagccagcctcaggtcagcctgtctccctgaagaatatctccacagacacatcgggttactacatctgtacctccagcaatgaggaggggacgcagttctgcaacatcacggtggccgtcagatctccctccatgaacgtggccctgtatgtgggcatcgcggtgggcgtggttgcagccctcattatcattggcatcatcatctactgctgctgctgccgagggaaggacgacaacactgaagacaaggaggatgcaaggccgaaccgggaagcctatgaggagccaccagagcagctaagagaactttccagagagagggaggaggaggatgactacaggcaagaagagcagaggagcactgggcgtgaatccccggaccacctcgaccagtgacaggccagcagcagagggcggcggaggaagggttaggggttcattctcccgcttcctggcctcccttctcctttctaagccctgttctcctgtccctccatcccagacattgatggggacatttcttccccagtgtcagctgtggggaacatggctggcctggtaagggggtccctgtgctgatcctgctgacctcactgtcctgtgaagtaacccctcctggctgtgacacctggtgcgggcctggccctcactcaagaccaggctgcagcctccacttccctcgtagttggcaggagctcctggaagcacagcgctgagcatggggcgctcccactcagaactctccagggaggcgatgccagccttggggggtgggggctgtcctgctcacctgtgtgcccagcacctggaggggcaccaggtggagggtttgcactccacacatctttcttgaatgaatgaaagaataagtgagtatgcttgggccctgcattggcctggcctccagctcccactccctttccaacctcacttcccgtagctgccagtatgttccaaaccctcctgggaaggccacctcccactcctgctgcacaggccctggggagcttttgcccacacactttccatctctgcctgtcaatatcgtacctgtccctccaggcccatctcaaatcacaaggatttctctaaccctatcctaattgtccacatacgtggaaacaatcctgttactctgtcccacgtccaatcatgggccacaaggcacagtcttctgagcgagtgctctcactgtattagagcgccagctccttggggcagggcctgggcctcatggcttttgctttccctgaagccctagtagctggcgcccatcctagtgggcacttaagcttaattggggaaactgctttgattggttgtgccttcccttctctggtctccttgagatgatcgtagacacagggatgattcccacccaaacccacgtattcattcagtgagttaaacacgaattgatttaaagtgaacacacacaagggagcttgcttgcagatggtctgagttcttgtgtcctggtaattcctctccaggccagaataattggcatgtctcctcaacccacatggggttcctggttgttcctgcatcccgatacctcagccctggccctgcccagcccatttgggctctggttttctggtggggctgtcctgctgccctcccacagcctccttctgtttgtcgagcatttcttctactcttgagagctcaggcagcgttagggctgcttaggtctcatggaccagtggctggtctcacccaactgcagtttactattgctatcttttctggatgatcagaaaaataattccataaatctattgtctacttgcgattttttaaaaaatgtatatttttatatatattgttaaatcctttgcttcattccaaatgctttcagtaataataaaattgtgggtgg

SEQ ID NO: 2761 - DNA, 4433 bp, Homo Sapiens
  NM_005816
ttcctgtctacgtttcatttcctgggggcttgccaagtgataaacagacccaggcgtgtgtggtagagttcgggttttttagcacgaagtgggtggctggagtttgcttgaaaacatcaattgactttgtgatcattacagaaatgctggtgtaaggtgttcagaagacaatggagaaaaaatggaaatactgtgctgtctattacatcatccagatacattttgtcaagggagtttgggaaaaaacagtcaacacagaagaaaatgtttatgctacacttggctctgatgtcaacctgacctgccaaacacagacagtaggcttcttcgtgcagatgcaatggtccaaggtcaccaataagatagacctgattgctgtctatcatccccaatacggcttctactgtgcctatgggagaccctgtgagtcacttgtgactttcacagaaactcctgagaatgggtcaaaatggactctgcacttaaggaatatgtcttgttcagtcagtggaaggtacgagtgtatgcttgttctgtatccagagggcattcagactaaaatctacaaccttctcattcagacacacgttacagcagatgaatggaacagcaaccatacgatagaaatagagataaatcagactctggaaataccatgctttcaaaatagctcctcaaaaatttcatctgagttcacctatgcatggtcggtggaggataatggaactcaggaaacacttatctcccaaaatcacctcatcagcaattccacattacttaaagatagagtcaagcttggtacagactacagactccacctctctccagtccaaatcttcgatgatgggcggaagttctcttgccacattagagtcggtcctaacaaaatcttgaggagctccaccacagtcaaggtttttgctaaaccagaaatccctgtgattgtggaaaataactccacggatgtcttggtagagagaagatttacctgcttactaaagaatgtatttcccaaagcaaatatcacatggtttatagatggaagttttcttcatgatgaaaaagaaggaatatatattactaatgaagagagaaaaggcaaagatggatttttggaactgaagtctgttttaacaagggtacatagtaataaaccagcccaatcagacaacttgaccatttggtgtatggctctgtctccagtcccaggaaataaagtgtggaacatctcatcagaaaagatcacttttctcttaggttctgaaatttcctcaacagaccctccactgagtgttacagaatctacccttgacacccaaccttctccagccagcagtgtatctcctgcaagatatccagctacatcttcagtgacccttgtagatgtgagtgccttgaggccaaacaccactcctcaacccagcaattccagtatgactacccgaggcttcaactatccctggacctccagtgggacagataccaaaaaatcagtttcacggatacctagtgaaacatacagttcatccccgtcaggtgcaggctcaacacttcatgacaatgtctttaccagcacagccagagcattttcagaagtccccacaactgccaatggatctacgaaaactaatcacgtccatatcactggtattgtggtcaataagcccaaagatggaatgtcctggccagtgattgtagcagctttactcttttgctgcatgatattgtttggtcttggagtgagaaaatggtgtcagtaccaaaaagaaataatggaaagacctccacctttcaagccaccaccacctcccatcaagtacacttgcattcaagagcccaacgaaagtgatctgccttatcatgagatggagaccctctagtctcgtgagactttgccccatggcagaactctgctggaatcctattgagaaggtagacattgtgctttattaatatagtcgctcttcagccatgcctttgctgcagctgaaatggaagtcagaagtgagtgacctgttttcccagcaactcaccctcttccatctccaaacgcctgaagcttaaccaagagtgagaggatatgtcatgttcacactcaatgcaattcgtagtggttttcttgcttatgtaagaagtacatattagtctgccatctttaaaaaaaaatacagtattttcatttaaattctctgatggagggacaacaatggtttcaactgtatgcccatgcctgatcctcttatttgaacatctatcaacattgtaaactctttgccaaaatcctggggctttgctgcattccctaagataattacaggaaaaagaaaatgtaaaagtgctaacaaggctgccaagtaatggagaagtatggttagtcttcatattgaaattctgttgcttattttcatggaaggaaacagaatactttgcacaggaaccacattttcaatcctccttcactgtcttcctaccatgttcagcccagactcctgccacatggaccaggatgaagagggatcaaagagataattagccaaaaacccagtagcctagaagatacaaaactccactggcctctaaaattatattagccaagagtggtttcatttgagtgccttcgtgtgtatgtccatcaaactggaaccaaactgttttgtaagtaaacaggcagcctaagcccaaccctactttctaattccagttattctctttttcatctggggatttacctgttcatttaatctgcctgttttgatctgttttgaaaaagataaagagcctcaaatcagaccagcactgattaattaaccctgctcctaccaatcttttttaaagcagttgaagcagaatgtataggtgtcagagaagaaacctagtcagccagacgtgctctgtattcagcaatagtttgtgaatgaataaattactaatcctccttgtcgcttgaaaccttcccacactccctgctccaggagggaaaaacagatgttgttgacagatagagtgataggcaaattctgtgtggactttagtcccaaaaggaaactttagttcacttgcagtatgcttatccttgactgcacatgagaatgccttgtgcagagttatttggagattatgtctttttcttaaacaccatggctgtcacacttcagttcaattaaatcagaatgtctgaggagtgagacacaggcatcaacactctcaaatgattcacatgttcagccaaagttgagaaccatcgagcctgtggaagttctttctcatggctcagaatcttaggtaggtgcttaactcttgtggtggccagcctccaagatgagccccagtgttcttgcctcctactattcacatctttatgtggtcccctccaatgctgaatacagatgatttgtgtaacctgaggccaggattaaggggaggcaatcaatgcacctagggaaaaaatttaaggaggtattcacactcagggtcatgcacttgcacaatgttgagaatgagtaccactctcaccattggtatagccaaaaaagcttggaagtgaccaaggctaggtcacaaaatacactgtggcttcttctttgatctctctttgaccatactgacactgggaaaagcccattcccatgccatgaagacaccaaggcagccctattgagaaatctacctgtcgtggccgggcgcagtggctcacgcctgtaatcccagcactttgggaggccgaggtgggtggatcacgaggtcaggagatcgagaccatcctggctaacacagtgaaaccccgtctctactaaaaatacaaaaaattagccgggtgtggtgtcgggcacctgtagtcccagctactcaggaggctgaggcaggagaagggtgggaacccgggaggcagagcttgcagtgagccgagattgtgccactgcacactccaatctgggtgaaagaccgagactccgcctcaaaaaaaaaaaaaaaagaaagaaagaaagaaagaaagaaatctacctgtcaaggaactaaggtattttgctaacaagcaccaacttgccagccatgtaagggagccatcttggaagcagatcctccagcctccagtcaagtcttcagataattgcaacttcagttgatcttttgaccaagacctcaagagagccagaactacccagctaagccttttactaaatttctgaacttctaacactattagataataagtgcttattgtttaacaccattaattttgagtataatttgttacatagcgacagataactatacagctcaacaactagaaaaataaactgtttacctgccttaattatttatctttagttccttattagttctcaagaaacaaatgctagcttcatatgtatggctgttgctttgcttcatgtgtatggctatttgtatttaacaagacttaatcatcagta

SEQ ID NO: 2762 - DNA, 2345 bp, Homo Sapiens
  NM_005817
tggcgcgggcaatccctcaacctgattggtcccctcgcccgtcactccagtgcgcccccaacctaccacgcagtaaaagccacccccgcctcggcccggacggtttccaagctggttttgaagtcgcggcagctgttcctgggacgtccggttgaccgcgcgtctgctgcagagaccatgtctgccgacggggcagaggctgatggcagcacccaggtgacagtggaagaaccggtacagcagcccagtgtggtggaccgtgtggccagcatgcctctgatcagctccacctgcgacatggtgtccgcagcctatgcctccaccaaggagagctacccgcacatcaagactgtctgcgacgcagcagagaagggagtgaggaccctcacggcggctgctgtcagcggggctcagccgatcctctccaagctggagccccagattgcatcagccagcgaatacgcccacagggggctggacaagttggaggagaacctccccatcctgcagcagcccacggagaaggtcctggcggacaccaaggagcttgtgtcgtctaaggtgtcgggggcccaagagatggtgtctagcgccaaggacacggtggccacccaattgtcggaggcggtggacgcgacccgcggtgctgtgcagagcggcgtggacaagacaaagtccgtagtgaccggcggcgtccaatcggtcatgggctcccgcttgggccagatggtgttgagtggggtcgacacggtgctggggaagtcggaggagtgggcggacaaccacctgccccttacggatgccgaactggcccgcatcgccacatccctggatggctttgacgtcgcgtccgtgcagcagcagcggcaggaacagagctacttcgtacgtctgggctccctgtcggagaggctgcggcagcacgcctatgagcactcgctgggcaagcttcgagccaccaagcagagggcacaggaggctctgctgcagctgtcgcaggtcctaagcctgatggaaactgtcaagcaaggcgttgatcagaagctggtggaaggccaggagaagctgcaccagatgtggctcagctggaaccagaagcagctccagggccccgagaaggagccgcccaagccagagcaggtcgagtcccgggcgctcaccatgttccgggacattgcccagcaactgcaggccacctgtacctccctggggtccagcattcagggcctccccaccaatgtgaaggaccaggtgcagcaggcccgccgccaggtggaggacctccaggccacgttttccagcatccactccttccaggacctgtccagcagcattctggcccagagccgtgagcgtgtcgccagcgcccgcgaggccctggaccacatggtggaatatgtggcccagaacacacctgtcacgtggctcgtgggaccctttgcccctggaatcactgagaaagccccggaggagaagaagtagggggagaggagaggactcagcgggccccgtctctataatgcagctgtgctctggagtcctcaacccggggctcatttcaaacttattttctagccactcctcccagctcttctgtgctgtccacttgggaagctaaggctctcaaaacgggcatcacccagttgacccatctctcagcctctctgagcttggaagaagcctgttctgagcctcaccctatcagtcagtagagagagatgtccagaaaaaatatctttcaggaaagttctcccctgcagaattttttttccttgttaaatatcaggaatataggccgggtgcggtggctcacacctgtaatcccagcactttgggaggctgaggcgggcggaacacctgaggtcaggtgttcgagaccagccaggccaacatggtgaaaccccgtctctactaaaaatacaaaaaaaaatgagccgggcatggtagcaggtgtctgttatcccagttaggaggctgaggcaagagaatctcttgaacctgagaggcggaggttgcagtgagccaagatcgcgccattgcactccagcctgggggacaagagtgagacttagtctcaaaaaaaaaaaaaaagaaaaaaaaatcagggatatagttcatatcccacttctttgtttacaccgatgtccctgaatatcagcctgtagctaatggacttgggatttctggtctaagtgggcctcctggggatggggtggtacactgagcttctgagcctcattgtagagtagaaaggtactggggcctgtgtggtaagccttgttgaaatgctctggtattcagtattgccttaataaacttcacccacaactgcatacaggcaaaaa

SEQ ID NO: 2763 - DNA, 2751 bp, Homo Sapiens
  NM_005826
aagcagttccgggaaaccccgcgtgctgccgggatcgcgtctcagtccatcaggggggggagggggtggcgcgcgcgccatttctagtcgttttcaaagcgcctcgcgctgattctcacgggcccggctgccggcccccgctctgccctgcataataaaatggctaatcaggtgaatggtaatgcggtacagttaaaagaagaggaagaaccaatggatacttccagtgtaactcacacagaacactacaagacactgatagaggcaggcctcccacagaaggtggcagaaagacttgatgaaatatttcagacaggattggtagcttatgtcgatcttgatgaaagagcaattgatgctctcagggaatttaatgaagaaggagctctgtctgtactacagcagttcaaggaaagtgacttatcacatgttcagaacaaaagtgcatttttatgtggagttatgaagacctacaggcagagagagaaacaggggagcaaggtgcaagagtccacaaagggacctgatgaagcgaagatcaaggccttgcttgagagaactggttatactctggatgtaaccacaggacagaggaagtatggtggtcctccaccagacagtgtgtactctggcgtgcaacctggaattggaacggaggtatttgtaggcaaaataccaagggatttatatgaggatgagttggtgcccctttttgagaaggccggacccatttgggatctacgtcttatgatggatccactgtccggtcagaatagagggtatgcatttatcaccttctgtggaaaggaagctgcacaggaagccgtgaaactgtgtgacagctatgaaattcgccctggtaaacaccttggagtgtgcatttctgtggcaaacaacagactttttgttggatccattccgaagaataagactaaagaaaacattttggaagaattcagtaaagtcacagagggtttggtggacgttattctctatcatcaacccgatgacaaaaagaagaatcgggggttctgcttccttgaatatgaggatcacaagtcagcagcacaagccagacgccggctgatgagtggaaaagtaaaagtgtggggaaatgtagttacagttgaatgggctgaccctgtggaagaaccagatccagaagtcatggctaaggtaaaagttttgtttgtgagaaacttggctactacggtgacagaagaaatattggaaaagtcattttctgaatttggaaaactcgaaagagtaaagaagttgaaagattatgcatttgttcattttgaagacagaggagcagctgttaaggctatggatgaaatgaatggcaaagaaatagaaggggaagaaattgaaatagtcttagccaagccaccagacaagaaaaggaaagagcgccaagctgctagacaggcctccagaagcactgcgtatgaagattattactaccaccctcctcctcgcatgccacctccaattagaggtcggggtcgtggtggggggagaggtggatatggctaccctccagattactacggctatgaagattactatgatgattactatggttatgattatcacgactatcgtggaggctatgaagatccctactacggctatgatgatggctatgcagtaagaggaagaggaggaggaaggggagggcgaggtgctccaccaccaccaagggggaggggagcaccacctccaagaggtagagctggctattcacagaggggggcacctttgggaccaccaagaggctctaggggtggcagagggggtcctgctcaacagcagagaggccgtggttcccgtggatctcggggcaatcgtgggggcaatgtaggaggcaagagaaaggcagatgggtacaaccagcctgattccaagcgtcgtcagaccaacaaccaacagaactggggttcccaacccatcgctcagcagccgcttcagcaaggtggtgactattctggtaactatggttacaataatgacaaccaggaattttatcaggatacttatgggcaacagtggaagtagacaagtaagggcttgaaaatgatactggcaagatacgattggctctagatctacattcttcaaaaaaaaaaattggcttaactgtttcatctttaagtagcattttgctgccatttgtattgggctgaagaaatcactattgtgtatatactcaagtctttttatttttcctcttttcataaatgctcttggacattattgggcttgcagagttcccttattctggggattacaatgcttttatcgtttcaggcttcattttagcttcaaaacaagctgggcacactgttaaatcatgattttgcagaacctttggttttggacagtttcatttttttggatttgggatagattacataggagtatggagtatgctgtaaataaaaatacaagctagtgctttgtcttagtagttttaagaaattaaagcaaacaaatttaagttttcttgtattgaaaataacctatgattgtatgttttgcattcctagaagtaggttaactgtgtttttaaattgttataacttcacacctttttgaaatctgccctacaaaatttgtttggcttaaacgtcaaaagccgtgacaatttgttctttgatgtgattgtatttccaatttcttgttcatgtaagatttcaataaaactaaaaaatctattcaaaacattaaaaaaaaaaaaaaaaaaaa

SEQ ID NO: 2764 - DNA, 6369 bp, Homo Sapiens
  NM_005828
aaaacggaaggtggttgtcgtccgttcccaagctggtttgaaactaggggtcgggctcggccgtcgtcgttgtttgtcgccgcatccccgcttccgggttaggccgttcctgcccgccccctcctctcctcccttcggacccatagatctcaggctcggctccccgcccgccgcagcccactgttgacccggcccgtactgcggccccgtggccaccatgtccctgcacggcaaacggaaggagatctacaagtatgaagcgccctggacagtctacgcgatgaactggagtgtgcggcccgataagcgctttcgcttggcgctgggcagcttcgtggaggagtacaacaacaaggttcagcttgttggtttagatgaggagagttcagagtttatttgcagaaacacctttgaccacccataccccaccacaaagctcatgtggatccctgacacaaaaggcgtctatccagacctactggcaacaagcggtgactatctccgtgtgtggagggttggtgaaacagagaccaggctggagtgtttgctaaacaataataagaactctgatttctgtgctcccctgacctcctttgactggaatgaggtggatccttatcttttaggtacctcaagcattgatacgacatgcaccatctgggggctggagacagggcaggtgttagggcgagtgaatctcgtgtctggccacgtgaagacccagctgatcgcccatgacaaagaggtctatgatattgcatttagccgggccgggggtggcagggacatgtttgcctctgtgggtgctgatggctcggtgcggatgtttgacctccgccatctagaacacagcaccatcatttacgaagacccacagcatcacccactgcttcgcctctgctggaacaagcaggaccctaactacctggccaccatggccatggatggaatggaggtggtgattctagatgtccgggttccctgcacacctgtcgccaggttaaacaaccatcgagcatgtgtcaatggcattgcttgggccccacattcatcctgccacatctgcactgcagcggatgaccaccaggctctcatctgggacatccagcaaatgccccgagccattgaggaccctatcctggcctacacagctgaaggagagatcaacaatgtgcagtgggcatcaactcagcccgactggatcgccatctgctacaacaactgcctggagatactcagagtgtagtgttggtggcgctgtgcccacgaggcaggggcttttgtatttcctgcctctgccccacccccaaagtaagaagaaacatgtttccagtggccagtatgtctttcattgctttgcacccactgttaccagaagctgctctaggagttcctggccagtcaccccatcgccctctgtggcagactcagtgctgtgtggcgcctcctcagcccagggctgagttttaagattttctctcctttcctcttctcctttggttcctcaattaaaaaatgtgtgtatatttgtttgtcaggcgttgtgttgaggagcagttcacgcactggctgtgtctattcctctgcccaggtgtctctgtttgctgcccaaggcagcagttcatgtctcgtccatgtccatgttcgtgttagcacttacgtgggaacaaataccaatttgtcttttctcctagtatcagtgtgtttaacaaattttaactttgtatatttgttatctatcaggctaatttttttatgaaaagaattttactctcctgcttcatttctttgtcttatagtcctccctctttgcaccttcttctcttccctcagtgcctggagctggtactgggcccctggccccatgagcagtttgccttcttgagtcactgcctgtgtagtacatacctgaccgggagtccaaaccaccttggtgctctgaagtccactgactcatcacacctttcttagcctggctcctctcaagggcattctgggcttgtaaacagacataggaagcctctgtttaccctgaagcaccactgtccagcccattggttcccactggcagcatggtagagctgagagaaacaggctctcagggtacctgacttgaggggaatcgtttcatgaagctgaacttcaagcatatttccagtacattctttcagagtctgtttttccatccaaatataagccccaggccattccacttagtgtcttttcaatgataggcaagaatgatatctgagttgaacttcggtgcttctgttgtttgagtttactgtgcctggtggtatattgggcattctttggattgagtgttctgaggtgagagagtcttcccgaggcatcctgtctgtgcttccaaccctgaacaagaccttacatgagagatggactgatggactgcggcaatcctgggctgtcaagtggatagatagttaaaaagcattatactgtgggtaatgaaaagggaggaaaaaaaaagaaggaaaaggaattatagacccccagggtcagccagttaagagctctacccacacctgtcaacccctctctcccccagtttaggttctgagcagtattggacttgtagcctgcagttgtcttttgacttgcaggccgcaggtgtctttctgttatgtgaatgagttccatggaggggcatatgtgtgattccaccgttagatgagcccttggggcaggcagtttgggatgtgctcttgggggaaagttggctgtttccttgcgctctgctcctacccgaaggtttttaagtccctctgaattgctcatctgagattagtagagtagcaggcctgaaggatgatggttttgtcctctttggttctcacctgcttgagaagtaaaacagtaactttgttcttctgggcccttaagcttttttggttaagtcttccttttcagaagtagatgtcattatatgccaaaagtctagctctttgctttaccatacagggacctgtcccaaagaaaaaggctctttttttagccagcatatttccccttctacccttttactttgttgttctgattttaggactctggctggccatgtgcttgtggttgcctctcctgcatttgccactggatttgcactgcatcgtttggagatacaaagcgagcagttcttggtcagaaccctcctctgcttttcattgtgtttgataatggttactgggtccttctctcaagggtagcaaggccaagctgatggctgcttgtttaggaggccatcagttccttcctgtggagaagggtctgaaatggaagtcagtggtagaaggggctggtctgctgggcagggcttacatccactgagttctaagattcctttcctgatctgcacctacgcctggtctgtatggtggaatttgtcagctggaactcagaaacaacaacttgaaaaaaaaataataattagaacatatttgcataagatagctatttactctggaaaccaacaacttttgagatttcccttgccctgtggacgcccagctcctgtcatccttccttaggtcctgcagtacagtcttcccctgaatgccaccggggacccagggggactccacccccctaagcaagcacacacatactcacagttgatgagttgctggtctttgagtcccagctctcttaccctccctttactccaccagcccgacgacccatgactgaggaggggatttctacagtctcaggatttagaaagtctgtaagccatccatgctccagaaagcaccgatctgttgtagttgcaaaaacaactctgtaatttgttgaggttctcaaactgacagccagcgagactgggtgggaggccctggatctgttctccctgactgcgggaggagcagccactaggactttagcaggaagcccacatggaggctccgccaggctgtggcccagctggtgatggcccttttgctcctggcagcctgaggcacagctgcctgtattgtcctcatctgttctgactgaaggatggaggtgctgaataaattaggcctcaggcctctaccaccagagagctggagaatgggtccacgtcattcaaggacctgaattttttatgctcaggagcattggaatcctcttcttccagggaggaattagcctgcaaggttaggacttgaagagggaaggtatttaataactgggcgaggatgggtgtggtggctcacacctgtaatcccagcattttgggaggctgaggtggccagatcccaaggtcagaagatcgagaccatcctggctaacatggtgaaaccccatctctactaaaaatacaaaaaaaaattagccgggggtggtggcgggtacctgtagtcctagctacttgggaggctgaggcaggagaatggcgtgaacctgggaggtggagcttgcagtgagccaagatcgtgccactgcactccagcctgggcgacagagcaagactccgtctcaaaaaataaaaaaaaaaaaaaaataggtgaaaattccttataaatccaggattggctctgagagaactggctaagattcaggaagaaacaaaaaattcagaatcctacaaggttttgatgacaattagggccaaaattttaggaggagatgtaggatgcaggagaaaattaaagtgttttctttatatcagaggaggaaatagtagaggtcagtgaaggtctggggtagggaaacattcagactgtccattgcatggctgtggagtgagactgcccttagcctgggtcagccttcctgggccataaattgggcatccgtgatgctaggtaactgtgggaacaaaatgacagcttagagcagccatgggtgatgtttggtggtaaaaaacctacaggcgtttggggtcccatgattgttccagaccatgactcttcctggttgtgggtttgttacagagcaggagaagcagaggttatgacagttatgcagactttccccctcctttttctcttttctcttccccttgcttttccactgtttcttcctgctgccacctgggccttgaattcctgggctgtgaagacatgtagcagctgcagggtttaccacacgtgggagggcagcccagtactgtccctctgccttccccactttgagaatatggcagcccctttcattcctggcttggggtaggggagaccattgaagtagaagcctcaaagcagacttttccctttactgtgtgtactccaggacgaagaaggaagatcatgcttgatacttagattggttttcccagggaagagggcggagcagagcaaagtcactgtgaaccctgggccaggccctggctgggccagctcctgagagcgtctcgtgttgcagacccttgcccacttcacccacctgcaccttctccccctctcacagtgtcactgctgctaatggtcaaagtcaaatgtgtggccacatgggatgggccaggtcctctcaggctactttctggatgtcatttttaaaatatggaaacatgcaggtgccttcccaaagaggcttggactggtatatccaacgagaaacaaataagctaaagaaagtttaaactcaagaagaaagatgttgacagtctatgtaacagctggaaagtttataggcacccacctttgggacaacccagtgattatgaacatgtgatatctactatttaaaagaaatgttctcaccttgggttgattgtggtataccatgtgttatgaaaattgttgagctgaagctttgaatcgatttagttgagtctgactcacttgctttggttcctgtgtattttactacccctcttgtcagtgaccttccttccccaccccacccagagtgaatttgtagcatgattgtataaacctctatgtagaaaatggagatttcttgctctgaaatgttaagctctaactgatccatttctgtgtcctttagcctagtatgtctgaacttccattcttgttatatatttaaactttccctctatattataggttttgtggcatccacggtcaggtgtagaggaagctgccccttgcagaactgtactgtaatatttttcttttataaatattttcacaggactgattgtacacagggcttgtaataaaattttaacactgtgctgtgaaacaactatggggaatctccattgaaggctacttcatgggcacctgaaagtggagtgttatagctatgactttctatttcttgtttcctaagtaaattaaacctaattttcaccctttcattctgtttcagcctcctgtataagaagtaccgtattttctgcccatcatactttgtaataaaacttgaacatgtatagattgactgaaaaaaaaaaaaaaaaaa

SEQ ID NO: 2765 - DNA, 5934 bp, Homo Sapiens
  NM_005829
taaccgacgaacggccgaatgaccggcgtctccactccgcggaacgttctgcgagcgctaaggggatggcgggagtgcatgatttggagcgggcggtgagaaaagcaagctcccgccgcctctccgttttggcaacccggctgacggtcgtttcggcttctggggccagccgtcggtctgggcgagggacatagatccggattcgcatcctgactggccaaccaacgctggccgaggtgaccactctcctcggcatccgcacctgccctccaaggcgtcagagaggccggacccttgggtgctagggctcgtgagcgccggggccaagtttccgagtgccgctctcagcagcgcaccaaccggaagtgatcgtgttgtggcggaaggaggagctttctgggagtagccggtgctgagagaaccgtggctggcaaagatgattcaggcgattctggttttcaacaaccatgggaagccacggctagtccgcttctaccagcgtttcccagaagaaattcaacagcagattgttcgagagactttccatctagtcctcaagcgggatgacaacatctgtaacttcttggagggtggaagtttgattggtggctctgactacaaactgatctaccggcactatgctaccctctactttgtattttgtgtggattcctcagagagtgaacttggaatcttggacctcatccaggtttttgtggaaactctggataagtgtttcgaaaatgtgtgtgaattggatttgatcttccatatggataaggtgcactacatcctccaggaggtggtgatgggtgggatggtgttggaaacaaacatgaatgaaatcgtggctcagattgaggctcaaaacaggctggagaaatccgagggtggcctttcagcagcccctgcgcgggctgtgtctgctgtgaaaaacatcaacctgccagagattcctcggaacatcaacattggcgatctcaacatcaaagttcccaacctgtcccagtttgtctgaggatcaagtattggcctgaaatagagtccttaagacaagcaaagacaagcaaggcaagcacgtctggaaacagaacccattttgagccttagaagagtcaagcctcaggacctggaaactttgtgtctggggaagactgtttggcatggaatagggaagggattcctattgacactgctcgggtgcacccagttctcacatgtgcagtcatgccgttctctgatgcatacggccactgcagatgtgaggggccctgccttcctcagtagggagtcaacatgcccaagtcatttgcacctttacctctcacatggatgctcccaagggttagggactgcattgagcaggcccacctgcttcccagaacctcctcactagggctgagcaccttctctgagtagagtcttcatccttagcaccacagacttctgaggtcctgtgccctttacttgctggtgaggtgtcataggtagaaaagggctggcccttcagatctgggggtgtggtgagtggcaagtaagggcagaattttaggagaaccagagtcacccgctggctctactgagattgttacacccagaatccttttgtgtttttttgtggttttttttttttgaggtggagtcttgctctgtcacccaggctggagtgctgtggtgcaatctcggctcactgcaacctctgcttcccgggttcaagcatttctcctgtctcagcctccccagtagctgggattacaggcacccaccaccatgcccagctaattgttgtatgtttagtagagacagggtttcaccatgttggccaggctgggctcgaactcctggacctcaagtgatctacccgccttggcctcccaaagtgctggcattacaggtgtgagccaccgtgcccggccaccagaatcctttggtatagccaagccttttggttaccgcctcatgaagaatatgcttcccgcattgtcctagtcccagttgtattctcacaggtgttatgtgcaggacacaatccaaatcataaacctggctcatgcccaacacatttctgctaatagggagagggacccaccacacacccacacatgccagaggtccctcctcacagaggagagggcctgtgtctgtagaaggttaaagctgacaacatgtgaaacatcccagaattatgactcttcccaagtttaaaatacattctcctcatgagagcagaaggtttgttgctgtgttgtgaatgatgagctgcctccatagggaacccactgccacctgggccagcttctggagcatgagaacctgagccagggtcacccttgtggggcctggacatgacgcacgctggctgcgactaggagcagggctgcctcttctccctccccaaggtctgcttgtgggcacgctctgttccctcaggtgccattctcccagggcttaggcgcccataaatgttctttctgtggtggagtagggcctcctgcttccatactgtcgcatgggctagatctcaggtgtggtgttgagccaccttaagatgagggctgcttcgcagtaaagtttccagcctgggcccctcttgggccttctggctggggaccctcagcctcctgatgctgttgcagggcaggtctgagagggtgcccagcagcacccggtgtcagggccaccttgttttccatttttgaacagcgctccctgtggtttgtgcccactgctcaatacagcctccgatcctcactcttgaaagctccatgataagcacagagatgggcagtgtgggtcagaaggtgggccgcttcctgtggaagagggaagtgtaggtgaatagatatcaaaacccctgatgtcattcttttgaggggttggattttcttttttctggcagacatttcagtacattcacatttctctcacatttgctgaatgtgagatcagaataaaggagatcggcgtttatttcgtaccttctgtaagttggcatgagcaagatcattcaactgtccttacaacaggcattcttatccccattttgcagatgacgaaagtagacccagctccagtaaccttcccttagattacacggggctgagatctgagactgttcacttgactccactgtccttttctttcctcgctgcttaagatggcttctcccaatgttatcatcttcttttttatagataaggaaactgagcctcagagagtctgacttctcacaaaccgtggtctaaataggcttgattttctaaggtggccagtgatcatgtcatagagtataagagccaaagagtcgtctgtgtccctccatttaactgatgttgaagccgaagcccaaggtggtaaatgttatgttgagggtcacaaatccagagccacatccctcttcttgagttcgtttgttacgtggtttaatgcattactgcaggacagcccttatgctagatttcctgggatagcctagattttgaatgttttgcctgccagaaaccaatggttttaaaaaatcattgagtggtcctacagattcaaagcgagcatccaaacatccctcacatggcctcttacaatgacataaaactgaagcccacttttttatttggaaaactcaatccctttggacaagccacaataatttttcattaactacttgaggttgcctgcaaattcagctagctttccagcctgctatcagcaaagccataaacatcttttttaaaaataggttaaggttggccaggtgcggtggctcacgcctgtaatcccagcactttgggaggccgaggcgggcagatcacgaggtcaggagatcgagaccatcctagctaacacagtgaaaacccatctctactaaaaatacaaaaaattggccagccgtggtagtggacacctgtagtcccagctactcaggaggctgcggcaggagaatggcatgaacccgggaggcagagcttgcagtgagccaagatcgcaccactacactccagcctgggcaacacagcaagactccgtctcaaaaaaaaaaaaaaaaaaaataggttaaggttgtatagaatactaggctttcctttttttgtgagatgggggtctcacactgtggctcaggctggagtgcagtggtgtgatcatggctcactgcagcctcgaagccccggggtcaagtgatcctctcacctcagcctcctaggtagctggaaccacaggcacgcaaccaccactcctggctagttttatttttttagtagaataaggtctcactatgttgcacaggctggtctctaactccttacctcaagccatcctcccgccttggcctcccaaacatgttgggattacaggtgtgagccactggacctggccaaatactgggttttcagtgctcactgccactaataaaaatctgaaattctttcattatgcaatttctaagtgcctggtgagggccaagctcagttctaggctctgaagattaagagagaaacaaggctctgtctgctcctgttgtctctgtgagcatctttgacagagtgctcagattgttgggatatagtgcatcggactggcagcctgaatttgtggagaccgcagtcagtaactttgtgatatatggaatatttagaggacagtaacccatttccctacgccctacctgatcacatcgtgccctgctgggccataccccaaacagcccaccttcctctaggcctggccatggccctgtgcctgccacattgaggattaagtcaggatatcttgagccctctcaaatccctgtttattcaggcctctgccacatatagagccagccttctgtccccaccacttccactaccatggagcccacttagtaaaacgctctctgggcccagcttcgccagaaaagacaccaggggagcaaggctcaaaccaggggcagctaaatctgatcttgtggaccagtctctagtaagggctttcagcgtggctgtctgtccattgctttccaaataggatgcagcaatgattggtacatgggtattaagatcggtagtaggggctagtccaagtttagcaatagccaaactggagagcctctgaagtatgagagtcccagagggatttgtcagctcctggcagacatcctgattttcaccttcctgagtctaccctaccccagagggtgccagtctcactgtggtgatggttagcccagtgtgtgctgcactcacacaccagcacggggtccgtgcttgcaggctggtggatgctgtcctctgggttaagactgtctcccttctcgggagcactggagggttctccatctgcgtgtttcagtggaagttggcagatacgaaaacaggcccctatagggaagcagttccatgaaaatgattaattctttccaaaagacttaaaattttttcctatttcaattttcctttcaaaaaaggaaatacattcatgtagttcaaaacttaagaaaacaaaagtctgttcagcaaaagactcccactccggttccccaaacgctgagccccaccccccatccctggtagcaagaagtgtttccaattttaaggttaagaaacaaagtccctggatttgtgttagggatgtcttcctgagagtgggttgtgttccgtttgaccctggcggttgacctcggcccactaggatcatgccgccctctccagggaggagggcctccccatcaccctgtacagtggcaccccagccctggcactgcccgcccttgctcagcgtacctttcccatggcactctgacgtactggatgtttggtttctgaagttactggctgtttaccctgccgggatgtaagcccctccagggcaggggcttgtctcgtgttcagtgctgcatcccagctgctgggcacggtacctggtccatggcgttcaataaataactgttggatgagtgaa

SEQ ID NO: 2766 - DNA, 1721 bp, Homo Sapiens
  NM_005833
gcagtccggggctggagggtaggggcgagggtccccggataccgggtctatcacggtctcgggcagggagtctgaatcttttaggggagtgggcccaagccgggtgcaaagaacggggaagggccttccctggctccgtcccggccactttgaccgaatcagcctgttctttcccgaccccgtctcctatcccctagaactgccacgtggggatgagatttgctgggctggtagcggcggctgctgcgggaggtcccgcccacgtgaagccagcctaactgagctctggactttggggacagctgtcagtggcctaggccgcaggacaccatgaagcaactgccagtcttggaacctggagacaagcccaggaaagcaacatggtacaccttgactgtccctggagacagcccctgtgctcgagttggccacagctgttcatatttacccccagttggtaatgccaagagagggaaggtcttcattgttgggggagcaaatccaaacagaagcttctcagacgtgcacaccatggatctgggaaaacaccagtgggacttagatacctgcaagggcctcttgccccggtatgaacatgctagcttcattccctcctgcacacctgaccgtatctgggtatttggaggtgccaaccaatcaggaaatcgaaattgtctacaagtcctgaatcctgaaaccaggacgtggaccacgccagaagtgaccagccccccaccatccccaagaacattccacacatcatcggcagccattggaaaccagctatatgtctttgggggcggagagagaggtgcccagcccgtgcaggacacgaagctgcatgtgtttgacgcaaacactctgacctggtcacagccagagacacttggaaatcctccatctccccggcatggtcatgtgatggtggcagcagggacaaagctcttcatccacggaggcttggcgggggacagattctatgatgacctccactgcattgatataagtgacatgaaatggcagaagctaaatcccactggggctgctccagcaggctgtgctgcccactcagctgtggccatgggaaaacatgtgtacatctttggtggaatgactcctgcaggagcactggacacaatgtaccagtatcacacagaagagcagcattggaccttgcttaaatttgatactcttctaccccctggacgattggaccattccatgtgtatcattccatggccagtgacgtgtgcttctgagaaagaagattccaactctctcactctgaaccatgaagctgagaaagaggattcagctgacaaagtaatgagccacagtggtgactcacatgaggaaagccagactgctacactgctctgtttggtgtttggtgggatgaatacagaaggggaaatctatgacgattgtattgtgactgtagtggactaataaaacccacatttttattacctgtcagttactttcagaatagttaagtaaaacattagctgttttatacctccaaaatatcttctgcattatatatctgtttttctcctactttggtaggtgaagaaactaatgcaaataattcttatgtgcactaaaccttgctatattgcctctcaaaaaaaaaaaaaaaaaaaaaaaaaaaaaaaaaaaaaaaaaaaaaaaaaaaaaaaaaaaaaaaaaaaaaaaaaaaaaaaaaaaaaaaaaaaaaa

SEQ ID NO: 2767 - DNA, 967 bp, Homo Sapiens
  NM_005834
tgggggagcagagggcagcacttcctccagctccaaaagagtgcacccaccccaacgttaccaatacactcgtgcaggcggaaagctccgacgccggtgtgcgtctacgctgggggcgtggcctgactgcgcggccagacgccagcgccatggaggagtacgctcgggagccctgcccatggcgaattgtggatgattgcggtggagccttcactatgggtgtcatcggtggcggagtcttccaggccatcaagggtttccgcaatgcccctgttggaattcggcaccggttgagaggtagtgccaatgctgtgaggatccgagccccccagattggaggtagcttcgcagtgtgggggggcctgttctccaccattgactgtggcctggtgcggcttcggggcaaggaggatccctggaactctatcaccagtggagcattgaccggggctgtgctggctgcccgcagtggcccactggccatggtgggctcagcaatgatggggggcatcctgttggccctcattgagggcgttggcatcctcctcactcgctacacagcccagcagttccgaaatgcgcccccattcctggaggaccccagccagctgccccctaaggatggcaccccggccccaggctaccccagctatcagcagtaccactgaggaagccactgccaccatgggagctacttctcggttccctccccgatggtctacctcgaagggagggctggctcccagttagccctgggaccctccagagagggtttctactctgctccctagtcccagggtgggggtggggcaccccagctgccctgacagatgggtcccctttttctctctcagggcaccccagccccacactcacatgtacgaagttctcaccccagctcctttgtgtggcaccctgatgagtatttaaagcccgttttgaaatgcctaaaaaaaaaaaaaaaaaa

SEQ ID NO: 2768 - DNA, 3952 bp, Homo Sapiens
  NM_005839
ggagtttagggcctgacagaagcccgcccccgctggcgctcgtgcgcacgcgtggcgggctctcggcgcactgagcaggcgcggcctcgtgtcggccggagggggcgggcgcaacgacgcgcgctgcgtcccggcgctcggctttccctccgccggtcccgccctccgtcgcggcggcgcggtgtaccctgggatagggagcgatctccgagcgaggcggcaagatggacgcgggatttttccgcggaacaagtgcagaacaggataatcggttcagcaacaaacagaagaaactactgaagcagctgaaatttgcagaatgcctagaaaaaaaggtggacatgagcaaagtaaatttggaggttataaagccttggataacaaaaagagtaacggaaatccttgggtttgaagatgatgttgtgattgagtttatattcaaccagctggaagtgaagaatccagactccaaaatgatgcaaatcaacctgactggatttttgaatggaaaaaatgctcgagaatttatgggagaactgtggcccctgctgctaagtgcacaagaaaacatcgcgggaatcccttctgctttcctagaactgaagaaagaagaaataaaacaaagacagattgaacaagaaaaactggcatctatgaaaaagcaagatgaagacaaagataaaagagataaggaagaaaaagaaagcagcagagaaaaaagggagcggtctcgtagcccaagaagacgcaaatccagatctccttcccctagaagacgatcttcccctgtcaggagagagagaaagcgcagtcattctcgatctccccgtcacagaaccaagagccggagtccttcccctgctccagaaaagaaggaaaaaactccagagctcccagaaccttcagtgaaagtaaaagaaccttcagtacaagaggctacttctactagtgacattctgaaagttcccaaacctgaacctataccagagcctaaagaaccttctccggaaaaaaattccaaaaaagaaaaggagaaggagaagacccgaccacgatctcggtcacgctccaaatcaagatcccggacgcggtcccgctctccttctcacactcgacctagacggcgccatagatcccgatcaagatcgtattcacctagaaggcggccaagcccaagaaggcggccatctcctcgaagaagaactccgccaagaagaatgcctcctccaccaaggcatagaaggagtagatctccagtaagacgaagaagacgttcgtcagcatccttgtctgggagtagctcatcatcctcttcatctcgttcacggtcaccaccaaagaagcctcccaagaggacatccagcccccctcggaaaactcgtaggttatctccttcagcaagtcctccaaggcgaaggcacaggccatcacctcctgcaactccaccacccaaaactcggcattcccctacaccccagcagtcaaaccgtacaagaaaaagtcgtgtttctgtgtctccagggagaacttcaggtaaagtgacaaaacataaaggtactgagaaaagagaatccccttcaccagcaccgaagcctagaaaagtagagttatctgaatcggaagaagataaaggtggcaaaatggctgcagcagattctgtgcagcagagacgccaatacagacgacaaaaccagcagtcttcatctgactctggctcctcctcctcctcagaagatgaacgacccaagagatcccatgtgaagaatggtgaggttggcaggcggcggagacattccccttcccggagtgcttctccatcaccacgaaagcgccaaaaagagacttcccctcgtggtagacggaggagaagtccatccccaccacccaccagaaggcgacggtctccttctcccgcccctcctcctcgacggcgcaggactcccacaccaccaccacgacgaaggactccttctcctcccccacgtcggcgctcaccttctcctagaagatactctcctccaatacagaggagatactctccttctccacctccaaagagaagaacggcttcacctcctccccctcctaaacgaagagcatcaccatctccaccaccaaagcggcgggtctcccattctccacctcccaaacaaagaagctccccagtcaccaagagacgttcaccttcattatcatccaagcataggaaagggtcttccccaagccgctctacccgggaggcccgatcaccacaaccaaacaaacggcattcgccctcaccacggcctcgagctcctcagacctcctcaagtcctccacccgttcgaagaggagcgtcgtcatcaccccaaagaaggcagtccccgtctccaagtactaggcccattaggagagtctccaggactccggaacctaaaaagataaaaaaggctgcttccccaagcccacagtctgtaagaagggtctcatcctcccgatctgtctccgggtctcctgagccagcagctaaaaagcccccagcacctccatcccccgtccagtctcagtcaccgtctacaaactggtcaccagctgtaccggtcaaaaaggccaaaagcccaacaccgagcccatcaccgccaagaaattcagatcaggaaggaggtggaaagaaaaagaagaaaaagaaggacaagaaacacaaaaaggataagaagcacaagaagcacaaaaaacacaagaaggaaaaggctgtggctgcagctgctgcagctgctgtgacccctgcagccattgcagctgccacaaccacattagcacaggaagagccagtggcagcgccagagccgaagaaggagactgaaagtgaagctgaagataaccttgatgatttagaaaagcacctgcgtgaaaaggccctgagatcaatgaggaaggcccaagtgtccccacagtcttagggggaaatgtttgttatgatgtaaattttatttggtttgtacgcagttcaatttcaaaattgctaaaatgtgtttgagctttagactataacatttgttgtaataattgctaggttgaagttcaacatgtaaaaaaagggggcatggatttacattgcaaaaggtgtccacagtgtattagtgacattctttcattgacagctgacataattcattgagtgaaatattttaagccaaaaaaaaattccctttttaaaaaagggggtttaaatactgttggcatttttatggttcctttaaatgccctagctattcccagaggggtttttttgtttgtttttttggttttgattttctttttgtttttctttcttcttcttatttttttcatttgagtcttagctcccatttaagttatgcttctgaccttgtatggtctgtaagcttgcccagaaataagaccactgttttgaactaccacaaaagtataaatgaatattttaatgccacaatctttcctgttgcctgtggagtctctgctgaaatgaatcaggattcgagctctaggatgagacagaaaatgaaagcatgttgtttgccaggacactgtgggtttatattgatgtgtaacaagttgatttggaacactggactctcattctgttattctggttttgttttttttgttttgttttttttcttttgtaaaggcaatgagctagtcccagaaaggatccttcagttacatacaatttgtttaatgaaatgtcatggctctgttcatatttttgtcttgttcttccaattggtatatacaactttcagagcctcttgtatttggaaggctggaagggcccagactttggaatagtgtcttggtttcactgtttttgttttgattttttttttgttttgattttttttaaactaaagctatataaagcttgtggattaaacagaataaatttctaaatttaaaaattttgccactcttaaaaaaaaaaaaaaaaaaa

SEQ ID NO: 2769 - DNA, 9038 bp, Homo Sapiens
  NM_005840
acaacttaccctgctgagctttctttgggaaatacgtccatcaagatttagatctgcctgtaaaatctatacaaagtatatgccactacaggtttgactcgccccctcccccgtttttttgttttgttttgttttgttttgttttgttttgtgttttctctgctgtgtcaaagaacaagacagaactatctctgtttctggctccactgcctgccagtgaaggagttttcattcagactttccgaagagaggtggagaaacctaaagactgaggagaagagatcctttgagccagatggggcattagttcttctgcttttctcagcatggataaaccatttcctcaaggattttctcatgtgccctgaaatccatgtaactacaagggctcctctttatcaccataagtgccaccctgacttaaaaccactcagagctaaaaaatcaaggcaaaatggatgctgcggtgacagatgattttcaacaaattctgcctattgaacagctgcgctctactcatgctagcaatgactacgtggaacggcctccagccccctgtaaacaggccctctccagcccttcccttattgtgcaaacccacaagtctgattggtctctggctaccatgcctacttctctcccccgcagtctcagccagtgccatcaactgcagcccttgcctcagcatctgagccaatctagcattgccagctcaatgtcccatagcaccactgcctctgatcaaaggctcttggccagcattacaccctcaccttcaggccaatccatcatccgaacccaacctggagcaggggtccacccaaaggctgatggtgctctgaagggagaagctgagcaatctgcagggcaccctagtgagcacctcttcatctgtgaggaatgtgggcgctgcaagtgcgtcccctgcacagcagctcgccctctcccctcctgctggctgtgcaaccagcgctgcctttgctctgctgagagcctcctcgattatggcacttgtctctgctgtgtcaagggcctcttctaccactgctccactgatgatgaagacaactgtgctgatgagccctgctcttgtgggcctagttcttgctttgtccgctgggcagccatgagcctcatctccctcttcctaccctgcctgtgctgctacctgcctacccgtggatgcctccatctgtgccaacagggctatgatagcctccggcgaccaggctgccgctgcaagaggcacaccaacactgtgtgcagaaagatctcttctggtagtgcacccttccccaaggcccaggaaaagtctgtatgaccttccaacaaggtggatccagagcttttctccttcgagtccccaacagcaaagcataggcctcatctttggagagggggaggagtgataaactagccaaagttagggcctctcttttgttcctgcagtgtcaggggaatgaccaagtacatcctggtgcaggatgccttgttctttctcacagtatctatcccactcctcttcagtctttacaccctgccagctcagcctttatggttgtcatggcaaattcaggtgatatatgggtatgaggtttgaacactgaggactgacagggccagcaacgtggaggtttaggggctccccaatgtaatacctctcgatgcaggctctgatcgtcactctgttttctgctgtgcctttggaagctttcttctaagatggttttcacaggtacatgtggaacagcgttcaaccttccagggaatacgaccccttctccctgttactgcccttctcttctttattcctctctcctctttcattattctgttctgtattcctttccccttcattctcaccctgtctgcttttactttttctctttcttcctccctttctccttctcccctccttctttttcagactgatcctttctctgcctgtatttctatctcatttgatctatatttgtctctctctacctgtccctttttctctaacatgtccaaaagtgctgtttttccatagatgtttccttagatgccaaactttgctatgctatactatttactaatttttattaagggaaatggattactgtaatgaactgatcactagcaatagtgtgtatcccgatgtgtgtgtgtgctcacaaccactctcacctgttcgtgagcgcatgaggcgaagttatcttatatttccaggtttaactagttggagtttttctccctttctcaataatcaacttatagtgctgacagattccactagcatgctgagtaggatagtaaatcaggatgctcataactttgtatgtctgacccaagtgccaaaggcagacgtgctttatagctaaatgaacaaagcaaaggatacagaggtatgttctctcttagaagctaacttccctgagactgcatggctcaggcgttaataatggacataaaaagtcataaaacgttagagctggaaggaatcttaactattaatctagttcaatgcccttattttacagatgggaaaactgaggcctggaggtaggaagggacttgcccccaaggccgcacactgagttaacagcagaattgagactggaatataggccttctgactcctagttcagtattcttacccctgtaccacattgagtcatgggactttttcctagggctctattaacagtgacagaaagccattcccattcaattacttttcaggaaccatgcctagttagtgtggtggtctttctccagtgcatggtgggtagctaattaactatcaggtgttgaggctgcccccagtggacatcacctttggctctgtcaccttgtagaagctcaagtgtggaaaagaaaagcttaaagaagccctaaccaagctgtatcttcgccattgcatctactctttgctgcacacactgtgcttgctcctggctttgtctgcaatggcagctgcctgagaacctaaatttcagcaacagtgaaaaactgagatgaaagatgtataatgtagagaactgacttctctcttaaaaagtacagagagcctgtgctgtgaacccccttcaatgggaaaaagctgcagtggtgatggcaggctcctaaagactgctgctaaaagacacaagaattatacagtttccctctataagtgaatccaaaattcactgacgaattcagagattgagggcacttgcttgaaatcaaggtgctccaacttagtttaagacctccagactctaactttatagatcatctcttctagagtgtgcatggatgtgtgttgcagggtggagaagtggggagaagtgtatagtagtacacggggggaagaggggacctccatgtccctttgttggatacatattacagaaatatgtgccactcactttttgttggttctgaatcttcctgaagtgtactgacatttgggctgcacagagccccacaccttcacttacacctcctcttctagaattgctttgctctatttttgtatatataaatatgttatgatgattattaataatgttaatgatattgctgcaaatggtgccatatataaggttaggcttcttggaacatttataaacccaaaccaatacctgtaacctcttatgttgctttcagatccttcaattttaagtaactttttaatcttacaagtctgcttgattgtactttacacttatctaccctgaaaagctctgcccagttctctgggtcaagctggatggtgatgagtagcaacacacacttctctgcttctgcctgaaatgtgcttagagctcagttatctaaggattctctgacactagtgcattgttcctggagctaaattattctatggatgtttgcttattagtttcaggccccaaaataacacgagcccctccaccttgatagctccttgatatcccaatcttgcagtcctaactcaggcaaattgtgcactgccagaggggccctgggttctgccatatacccagaggagcctttctcagtgtgtttctaaatggccttacacttggtagaagaaattgaagggttactcaaatacagttgcaatctgcaatctgctgttgagtcagggctttcacttgtgtccaagttggcctgatatggactgcatctgctttacgtatagatgggtcctgttgggatatgcgcatggacgtgtgagtgagtgtgcgtatgtatcccttctgtgattatatatattcacacatctctatatattttaatgtattgcacatgtatatttaaaatatatacgaaagaactctaaatcctgcagggaggctctgttttcattatttttctactttgtgtcatgtcctgtataaacaggaatatttagagggtgtttcctgcttagcatttttttgcagttaaatcatctgttagcccctaactctactgccttccacatattggttccttgatacatttcatatgatatcagccaagagttttcctgtggttccagcccatcttccctaatcacaatagcaataataaatatagtgaatacttacatagtgcttactatatgctaagcactatttttagcatgttatttatattagctcattcattcctcacaattctacaacataggtatcattccaacctctattttacagatgagaaaactgaagcacagagaagttaagtgacttgccaaaaggtaacaattgtaaatggtagagctaagatttgaacccagggtgtctgactcccaggtccatgctccagagtcagatatagaaggctggagcacagtgtaaaccattctggagtaacaagcctcaaatggtgaataattctttccctaactctggtccacctgcaacctaggagttaaaataagtatcttgctatgttaagagtaaagcaatagttacaggcatcatatattagctgtcttgctcccaaaatggtgacattacaaacttttccactattccctttgaaaacatgcttgcagccagttaccatttcttagcttatgatgtagagctattaagggagtattttcacttgtgccaaagagggtaagcgtttattagccttatctttattggccagggaaaactaattcaatttttttttgaacaaagtataactgagactatttttggagcttaagatttgttagagctgttaacattcaaccttattgattatattgagagcgctcttctgattcaaatgtaagcaaaccactgatgaccactggtccgtataacacattttaccaacagctccttcacactgaatcctttaacttggccaaaggacccttaaagaacatctagtccaatgtcaacattttatagctggagaaagggatgcacagagagggaaaataacctgtccaaagtcacacagttctgaaaattgagtggaattatgactttataccagagttcctaatttccaggtatcttagcctcagtttcttaaaaaatagagtttgaagcaaaagctatgtgcgatccagggtagtatgagtaaggaaagggttaatgagggagggaagaaagaagaacaaataaaaagcatgtcactgagttggccacggtctgttccttggcaagctaatttcgcaattttttgtgacagaccatataaaactactacatctccatacagcccacgtggtggaggaaaggaggtgaattcatctgctagctctcatctcattagtcaaattcttccccatgtgatatttacccttctacatttttgggtagtgcgtgatgggcacttaaatatgtaccttggcatttcatgcttcagcaataatgggaaggattgtggctccactataaacagtaaggcaagtatatgaatatagggagattaaatttaaagtgctacactagggtggtgcttttaccttatgtctttaatcacattccttcgaagtaagttagagataacctaccacctttaaagtaaataaagctttattgtggctcttagaactgtactatgtttgccttcctgagcctatttattctctagcttgctttaaagggcttcttttttatatggaaattaattccctgttcaattaaaggagtaacaaactctcaaaatatctttcttcttaatataaaaaggaatttcacattattgaactcctcaaaaagcatgtgtaagtcaaaatatgtatgtgaaggcacatatgttcttttaggttccatgagcataatagcaggaaaactggttaagtcaataaatgctggggaaaaaatggctaaacaaggtattctgtaacatgaaaataaagcaatgagttggttggctggctttttaaaaaatatttcagccactaattatgacacagacacattataagaattatgctaccttttattcacatatacaatagttccctgtgtcctatagatcattgtcacataaagcaaaagcattagtgccccatttggacctttggccgaaggtttgataagattttgtaggactgaaattcttggtccctttatcctagtttaggcccatatccttattttcactctcaaagataagatcatgacactaccagtgttgctgctgttaaaggccaggatggacaagataaggaaaggcattttgggaatgacactgactaatgttaggaatcttgctgtcattacaatccaagttatatatgtttgctcccatatgtatttgttggccaatctcctgaaaaagaagaaggtaattctaacccacacattgtcattcccaaactaacctggcaatccttttgaccataccaggtaatagtcatccctctgatggtaaaagacagagatgtcaaggctctggaagctcccaggtccttgaagaactaactaaactgctgaacacagaagtggtaatgtaggcaagccacaggtatgttctcttgtaacaagatggggttgaccatatgtgaaccctgaagagtcattttgaacctgtgtcctaaggcctagagtactttaatcctcatcttcaaagtcttaccactctgataacaaaaagaaacactacaaagaaactgcaaggaaagggacagtcattttttttaatatctaccaattatttagttattcatatatgcatttctttatatagaaaagtatttatatgaagtttccaaaagactctgatattcagctttatagtcttggatagaaaatcatgtgtccttggatggggattcgcacaccaaggcttaacagaattagtttggggaatactcatttttactctagagattagttggcttaaacaactttactcgtgaatttttttcttaatggaggtgaagacctcccaaagaggagaaggccccaggcctttcttaatatataaaccatattgaaagaaagaaagaaaaaagtaatgggaagtaatagtaaatgtggatccagaaagaaaaacaaaggttaagaaaatgatgtatgtgaaagaaaaaaagctctataatcagtgtgtttctctcacctaaaacaccatttactaactacttggttcagttgtaccctttaactctattttgtccttgacttatatcaacactcttcttttccaaactcctatagctctccatctggaatgattctatggggtggggggtcgggggaggagaaagggagacagcagaagaaagaaagagagagaaagatagagagagagagagagatgggtggagacttggcctctctcctagaggttcaaagttagaatatgccactaacactatctgcctttcaaactcccttctaggacatgctccatagtacttagatcttatatcaaatgacaaggtttctctccttcagagagaaataccagactggatttgtggtttccctggattggttttttctgagtcaaagtggtgttgtagaaatcacagtaccctgagaccaattaagtcagaatctttggaggtgttgaggaatggatttttaaagttcccagatgattataatatgcaaacagatttgagaaaattgaatcactttattccataaatgcagatagtgaggctaagagagggaaagtgacttactcataaccacaccgtgagttagtgaccaagtcaggataagaatccaggtctgctgactcctaggccagaattcttgtctttatactacactgcttctatctctaccctattccccctctgagcctttgcttttctcatctgtaaaatgacgataataaagcctagagagtgtatgagaatcattaaagcagaagcatttttcttaatgtacaaggttctatacaaatgcaagggaattaatgtataacatatatgtggggctaagtctctaaaacaacataataaaagttgtttttattttagtcaatcttttaggtattgtgtctacctgatagcatgtaacaagattgaacacttgtgtaggtcgtatgtgcctttaatctgaggttggcctcagtgacaatcaaaattagcagttgaggaaaaaggtcatacatttttctcttgcccttgctggaatagggatcaagaggaatataaaagcagtgggatatctggatttcttatactcagtcaaccacaacatggccttagtactgaactagcccagggtttcaatggaactcgtagatctcattcccaaggctggtcctggttgaagggagaaggtcaaaaaaggacgtgtcttctgaaaggcattacccatggaaagccaagggggagggttgcccactaggaggagcttcttttgtagaagccagaatggaggaaaggggctttctgacttggagcatctgaggaaatagattatttgaggatctagtactcccagaataatctgtaaccacaagaaacacatttcttgaactccagcgccccagaacaggatatccatatccaatcccatcgtatccatcctggatgttatgaatttccagagagggccacttctacccccctaggagtcatacatctggctacttatttgttaaaaataaaattctgtaccatttat

SEQ ID NO: 2770 - DNA, 2612 bp, Homo Sapiens
  NM_005841
tgcagagggcgcagctccaccgtggtaacttgcaatgtggccgcccctgcgctggcttctttctcctcggccctcggtgaacccagcttttcctttaaagcatagacaaatccttgcttagggtcagccagaccgtgggcttgctttgggctcccgcgtggacgctgaaggctcttcatgatttctcagaaaccttggtgggccacccaaaaagtgtgttggaaatccacggtgatccttaatatggtgatgggattgtccgaaaaggatttcagatgcatgccaggtttccactgattgccagaactcgagatcactacacatggatccccaaaatcaacatggcagtggcagttcgttagttgtgatccagcagccttctttggatagccgtcagagattagactatgagagagagattcagcctactgctattttgtccttagaccagatcaaggccataagaggcagcaatgaatacacagaagggccttcggtggtgaaaagacctgctcctcggacagcaccaagacaagaaaagcatgaaaggactcatgaaatcataccaattaatgtgaataataactacgagcacagacacacaagccacctgggacatgcagtactcccaagtaatgccaggggccccattttgagcagatcaaccagcactggaagtgcagccagctctgggagcaacagcagtgcctcttctgaacagggactgttaggaaggtcaccaccaaccagaccagtccctggtcataggtctgaaagggcaatccggacccagcccaagcaactgattgtggatgacttgaagggttccttgaaagaggacctgacacagcacaagttcatttgtgaacagtgtgggaagtgcaagtgtggagaatgcactgctcccaggaccctaccatcctgtttggcctgtaaccggcagtgcctttgctctgctgagagcatggtggaatatggaacctgcatgtgcttagtcaagggcatcttctaccactgctccaatgacgacgaaggggattcctattcagataatccttgctcctgttcacaatcacactgctgctctagatacctgtgtatgggagccatgtctttatttttaccttgcttactctgttatcctcctgctaaaggatgcctgaagctgtgcaggaggtgttatgactggatccatcgcccagggtgcagatgtaagaactccaacactgtctattgtaagctggagagctgcccctcccggggtcagggtaaaccatcatgatttttggaggtgggttgtacctcctgaacttttagctttcaagttgtggctgttttttgtttttgtttttgtttttgttttctttagaatttttccctgtttcccaccttctcttcccctgttgccaaggtctaactcatggatttttctctttcctcatggatgatcttcagcaagagtggactgggaagctgcacctggctcccactttcaacaagagcctctgccatccacttgagggtattgagagccagtgggcttttgtgtagcctttttgttctgcaagcaactttctaaagttgtgtacatgaacatacacccacatccagactacagtgatttagagttgttttgattgggtaccgtgggagcagggaaattggttttttaaaaagcaactgtttaattgcttaaataagctatgtattaaatctgtctccagttagggctatcttcctagcataggccccttaagtagcatgggggatatattttttgctataacgtaaaaattttcctttaaccactgccctctccttctttctccttcaaggttctttccccctcagttttgttgttgtcttactctggagatgccaagtgtattttttctttctatgtaattttagattcgccttacaatgtaaatcttcacattggagataatattggttggaccttgcccatcttcactctagccttcgtatttgtgaaggactcagccaccttccttcttcaccccatgcttctcaccaaatttttgttgtcattgagggcacttggataactcaagttgatatttatagctgatcaatctatatgtgtcacagaactatgctgcctaaagtgatcttggctccttaatggtccttttggccccttggatagttaacagctgagtaattctaatctcttctgtgttttccttgccttaaccacaaattgtggtgctttttgtatattttatgtataaatcacaaagttgaattctgactatttttaagacaaaagtctgttaaacttttttattgtaaagaatatttattatgcgaatctctattattttatggtatttattgcaaaagactgttgaaatgtactcatgtttgaatataacaaaatatcaatacttaacggaaaataaggtgacacgaagaaagtacatatgttaactataatgcagaaaatatattaattaatgaaaaaaaaaaaaaaaaaaaaaaaaaaaaaaaaaaaaaaaaaaaaaaaaaaaaaaaaaaaaaaaaaaaaaaaaaaaaaaaaaaaaaaaaaaaaaaaaaaaaaaaaaaaaaaaaaaaaaaaaaaaaaaaaa

SEQ ID NO: 2771 - DNA, 5843 bp, Homo Sapiens
  NM_005845
gagcggacaggcgtggcggccggagccccagcatccctgcttgaggtccaggagcggagcccgcggccaccgccgcctgatcagcgcgaccccggcccgcgcccgccccgcccggcaagatgctgcccgtgtaccaggaggtgaagcccaacccgctgcaggacgcgaacctctgctcacgcgtgttcttctggtggctcaatcccttgtttaaaattggccataaacggagattagaggaagatgatatgtattcagtgctgccagaagaccgctcacagcaccttggagaggagttgcaagggttctgggataaagaagttttaagagctgagaatgacgcacagaagccttctttaacaagagcaatcataaagtgttactggaaatcttatttagttttgggaatttttacgttaattgaggaaagtgccaaagtaatccagcccatatttttgggaaaaattattaattattttgaaaattatgatcccatggattctgtggctttgaacacagcgtacgcctatgccacggtgctgactttttgcacgctcattttggctatactgcatcacttatatttttatcacgttcagtgtgctgggatgaggttacgagtagccatgtgccatatgatttatcggaaggcacttcgtcttagtaacatggccatggggaagacaaccacaggccagatagtcaatctgctgtccaatgatgtgaacaagtttgatcaggtgacagtgttcttacacttcctgtgggcaggaccactgcaggcgattgcagtgactgccctactctggatggagataggaatatcgtgccttgctgggatggcagttctaatcattctcctgcccttgcaaagctgttttgggaagttgttctcatcactgaggagtaaaactgcaactttcacggatgccaggatcaggaccatgaatgaagttataactggtataaggataataaaaatgtacgcctgggaaaagtcattttcaaatcttattaccaatttgagaaagaaggagatttccaagattctgagaagttcctgcctcagagggatgaatttggcttcatttttcagtgcaagcaaaatcatcgtgtttgtgaccttcaccacctacgtgctcctcggcagtgtgatcacagccagccgcgtgttcgtggcagtgacgctgtatggggctgtgcggctgacggttaccctcttcttcccctcagccattgagagggtgtcagaggcaatcgtcagcatccgaagaatccagacctttttgctacttgatgagatatcacagcgcaaccgtcagctgccgtcagatggtaaaaagatggtgcatgtgcaggattttactgctttttgggataaggcatcagagaccccaactctacaaggcctttcctttactgtcagacctggcgaattgttagctgtggtcggccccgtgggagcagggaagtcatcactgttaagtgccgtgctcggggaattggccccaagtcacgggctggtcagcgtgcatggaagaattgcctatgtgtctcagcagccctgggtgttctcgggaactctgaggagtaatattttatttgggaagaaatacgaaaaggaacgatatgaaaaagtcataaaggcttgtgctctgaaaaaggatttacagctgttggaggatggtgatctgactgtgataggagatcggggaaccacgctgagtggagggcagaaagcacgggtaaaccttgcaagagcagtgtatcaagatgctgacatctatctcctggacgatcctctcagtgcagtagatgcggaagttagcagacacttgttcgaactgtgtatttgtcaaattttgcatgagaagatcacaattttagtgactcatcagttgcagtacctcaaagctgcaagtcagattctgatattgaaagatggtaaaatggtgcagaaggggacttacactgagttcctaaaatctggtatagattttggctcccttttaaagaaggataatgaggaaagtgaacaacctccagttccaggaactcccacactaaggaatcgtaccttctcagagtcttcggtttggtctcaacaatcttctagaccctccttgaaagatggtgctctggagagccaagatacagagaatgtcccagttacactatcagaggagaaccgttctgaaggaaaagttggttttcaggcctataagaattacttcagagctggtgctcactggattgtcttcattttccttattctcctaaacactgcagctcaggttgcctatgtgcttcaagattggtggctttcatactgggcaaacaaacaaagtatgctaaatgtcactgtaaatggaggaggaaatgtaaccgagaagctagatcttaactggtacttaggaatttattcaggtttaactgtagctaccgttctttttggcatagcaagatctctattggtattctacgtccttgttaactcttcacaaactttgcacaacaaaatgtttgagtcaattctgaaagctccggtattattctttgatagaaatccaataggaagaattttaaatcgtttctccaaagacattggacacttggatgatttgctgccgctgacgtttttagatttcatccagacattgctacaagtggttggtgtggtctctgtggctgtggccgtgattccttggatcgcaatacccttggttccccttggaatcattttcatttttcttcggcgatattttttggaaacgtcaagagatgtgaagcgcctggaatctacaactcggagtccagtgttttcccacttatcatcttctctccaggggctctggaccatccgggcatacaaagcagaagagaggtgtcaggaactgtttgatgcacaccaggatttacattcagaggcttggttcttgtttttgacaacgtcccgctggtttgccgtccgtctggatgccatctgtgccatgtttgtcatcatcgttgcctttgggtccctgattctggcaaaaactctggatgccgggcaggttggtttggcactgtcctatgccctcacgctcatggggatgtttcagtggtgtgttcgacaaagtgctgaagttgagaatatgatgatctcagtagaaagggtcattgaatacacagaccttgaaaaagaagcaccttgggaatatcagaaacgcccaccaccagcctggccccatgaaggagtgataatctttgacaatgtgaacttcatgtacagtccaggtgggcctctggtactgaagcatctgacagcactcattaaatcacaagaaaaggttggcattgtgggaagaaccggagctggaaaaagttccctcatctcagccctttttagattgtcagaacccgaaggtaaaatttggattgataagatcttgacaactgaaattggacttcacgatttaaggaagaagatgtcaatcatacctcaggaacctgttttgttcactggaacaatgaggaaaaacctggatccctttaatgagcacacggatgaggaactgtggaatgccttacaagaggtacaacttaaagaaaccattgaagatcttcctggtaaaatggatactgaattagcagaatcaggatccaattttagtgttggacaaagacaactggtgtgccttgccagggcaattctcaggaaaaatcagatattgattattgatgaagcgacggcaaatgtggatccaagaactgatgagttaatacaaaaaaaaatccgggagaaatttgcccactgcaccgtgctaaccattgcacacagattgaacaccattattgacagcgacaagataatggttttagattcaggaagactgaaagaatatgatgagccgtatgttttgctgcaaaataaagagagcctattttacaagatggtgcaacaactgggcaaggcagaagccgctgccctcactgaaacagcaaaacaggtatacttcaaaagaaattatccacatattggtcacactgaccacatggttacaaacacttccaatggacagccctcgaccttaactattttcgagacagcactgtgaatccaaccaaaatgtcaagtccgttccgaaggcattttccactagtttttggactatgtaaaccacattgtacttttttttactttggcaacaaatatttatacatacaagatgctagttcatttgaatatttctcccaacttatccaaggatctccagctctaacaaaatggtttatttttatttaaatgtcaatagttgttttttaaaatccaaatcagaggtgcaggccaccagttaaatgccgtctatcaggttttgtgccttaagagactacagagtcaaagctcatttttaaaggagtaggacaaagttgtcacaggtttttgttgttgtttttattgcccccaaaattacatgttaatttccatttatatcagggattctatttacttgaagactgtgaagttgccattttgtctcattgttttctttgacataactaggatccattatttcccctgaaggcttcttgttagaaaatagtacagttacaaccaataggaacaacaaaaagaaaaagtttgtgacattgtagtagggagtgtgtaccccttactccccatcaaaaaaaaaaatggatacatggttaaaggatagaagggcaatattttatcatatgttctaaaagagaaggaagagaaaatactactttctcaaaatggaagcccttaaaggtgctttgatactgaaggacacaaatgtgaccgtccatcctcctttagagttgcatgacttggacacggtaactgttgcagttttagactcagcattgtgacacttcccaagaaggccaaacctctaaccgacattcctgaaatacgtggcattattcttttttggatttctcatttatggaaggctaaccctctgttgactgtaagccttttggtttgggctgtattgaaatcctttctaaattgcatgaataggctctgctaacgtgatgagacaaactgaaaattattgcaagcattgactataattatgcagtacgttctcaggatgcatccaggggttcattttcatgagcctgtccaggttagtttactcctgaccactaatagcattgtcatttgggctttctgttgaatgaatcaacaaaccacaatacttcctgggaccttttgtactttatttgaactatgagtctttaatttttcctgatgatggtggctgtaatatgttgagttcagtttactaaaggttttactattatggtttgaagtggagtctcatgacctctcagaataaggtgtcacctccctgaaattgcatatatgtatatagacatgcacacgtgtgcatttgtttgtatacatatatttgtccttcgtatagcaagttttttgctcatcagcagagagcaacagatgttttattgagtgaagccttaaaaagcacacaccacacacagctaactgccaaaatacattgaccgtagtagctgttcaactcctagtacttagaaatacacgtatggttaatgttcagtccaacaaaccacacacagtaaatgtttattaatagtcatggttcgtattttaggtgactgaaattgcatcagtgatcataatgaggtttgttaaaacgatagctatattcaaaatgtctatatgtttatttggacttttgaggttaaagacagtcatataaacgtcctgtttctgttttaatgttatcatagaattttttaatgaaactaaattcaattgaaataaatgatagttttcatctccattcaga

SEQ ID NO: 2772 - DNA, 1570 bp, Homo Sapiens
  NM_005850
tgaggtcagaaggcggaaccgctgctgggagacggcgggatctctttcgccatggctgccgggccgatctccgagcggaatcaggatgccactgtgtacgtggggggcctggatgagaaggttagtgaaccgctgctgtgggaactgtttctccaggctggaccagtagtcaacacccacatgccaaaggatagagtcactggccagcaccaaggctatggctttgtggaattcttgagtgaggaagatgctgactatgccattaagatcatgaacatgatcaaactctatgggaagccaatacgggtgaacaaagcatcagctcacaacaaaaacctggatgtaggggccaacattttcattgggaacctggaccctgagattgatgagaagttgctttatgatactttcagcgcctttggggtcatcttacaaacccccaaaattatgcgggaccctgacacaggcaactccaaaggttatgcctttattaattttgcttcatttgatgcttcggatgcagcaattgaagccatgaatgggcagtacctctgtaaccgtcctatcaccgtatcttatgccttcaagaaggactccaagggtgagcgccatggctcagcagccgaacgacttctggcagctcagaacccgctctcccaggctgatcgccctcatcagctgtttgcagatgcacctcctccaccctctgctcccaatcctgtggtatcatcattggggtctgggcttcctccaccaggcatgcctcctcctggctccttcccacccccagtgccacctcctggagccctcccacctgggatacccccagccatgcccccaccacctatgcctcctggggctgcaggacatggccccccatcggcaggaaccccaggggcaggacatcctggtcatggacactcacatcctcacccattcccaccgggtgggatgccccatccagggatgtctcagatgcagcttgcacaccatggccctcatggcttaggacatccccacgctggacccccaggctctgggggccagccaccgccccgaccaccacctggaatgcctcatcctggacctcctccaatgggcatgcccccccgagggcctccattcggatctcccatgggtcacccaggtcctatgcctccgcatggtatgcgtggacctcctccactgatgcccccccatggatacactggccctccacgacccccaccctatggctaccagcgggggcctctccctccacccagacccactccccggccaccagttccccctcgaggcccacttcgaggccctctccctcagtaaattcacattttccttcctcctgttacattttcccaatatcttttctattccttggaccaatcagagatgctgtagctccttggggcaaaggtactaatccctttcagcacccccactccattcccctttttaatgtaactttttccacaggaggtatttcttttttatgttggtcctgagtattttgcaaatgcacagagaaaataaaactaaactccttgttaaaaaaaaaaaaaaaaaaaaa

SEQ ID NO: 2773 - DNA, 3154 bp, Homo Sapiens
  NM_005857
agaaactaggagggactagggagagtctgcaaggggaagagtgtgtctgtgacactgccagcagcgcgcagagggagggatgggggcgggtatcggcgtaggggccctcggaaagaacggatattgctgtgacaccgcggggacgctctgaagggacgagtgtcggtgtggcaccggtgcacgctgaaggagccggcggaaccgggtggccatggggatgtgggcatcgctggacgctttgtgggagatgccggccgagaagcgtatcttcggggccgtgctgctcttttcctggacagtgtatctttgggagaccttcctagcacagcggcagagaaggatatataaaacaacaactcatgtaccaccggagttaggacagatcatggattctgaaacatttgagaaatctcgactctatcaactggataaaagcactttcagcttctggtcaggactctattcagagactgaaggcactcttattcttctctttggaggaataccttatctctggagactttctggacggttctgtggttatgctggctttggaccagaatatgagatcactcagtccctggtgtttctgctgttggctacacttttcagtgcattgactggtttgccatggagtctttataatacttttgtgatagaagaaaaacatggcttcaatcaacagactttggggttcttcatgaaagatgcaatcaagaaatttgttgtgactcagtgtattttgttgcctgtgtcttcacttctactttacattattaaaattgggggtgactatttttttatttatgcctggctgttcacattagttgtgtctctggttcttgtcacaatctatgctgattatattgcccctttatttgacaaattcacacctctgcctgagggaaagcttaaagaagaaattgaagtaatggcaaagagtattgactttcctttgacgaaggtgtatgttgtggaaggatctaaacgctcttcccacagcaatgcttatttttatggcttcttcaagaacaagcgaatagttttgtttgacactctactagaagagtactctgtactaaacaaagacatccaggaggattctggcatggaaccccgcaatgaggaagaagggaacagtgaagaaataaaagctaaagttaaaaataagaaacaaggatgtaaaaatgaggaggtactcgctgtactaggccatgaactggggcactggaagttgggacatacagtcaaaaatatcattattagccagatgaattctttcctgtgtttttttttatttgctgtattaattggtcgaaaggagctttttgctgcatttggtttttatgatagccaacccactcttattggactattgatcatcttccagtttattttttcaccttacaatgaggttctttctttttgcctaacagtcctaagccgcagatttgagtttcaagctgatgcatttgccaagaaacttgggaaggctaaagacttatattctgctttaatcaaacttaacaaagataacttgggattccctgtttctgactggttgttctcaatgtggcattattctcatcctccactgctagagagacttcaagctttgaaaactatgaagcaacactgagatgtccaggatctgtgactgaagacatttctgattatttctgtcctggcagcatgttccagctcttgatgtttttaaacttttttttagaagaaaaattaagtacagaaaagcccagatttaaatacatttaatatgtcattttaaaaatgattttaataattcatttcttaaaacactgaatgaattttgaagcttaatgtttttaaaggcatagttttatctttgacatctaatttaccatcaagttgtaaaattatttggaaaaatacagaactcgttttatttgtatacttatatggaatctgcatgtgaggtgtttgagggcatatgtttgaaagagggagcatcaccacaggaatcctttctgtgaggtggaaacagtggtcctgaatcattgtgctcacacctaacttgaaatctggtcttactttcatgctgttatgatttcacctggtgaatcagtgttttaaataagaaaggtaatagttggtaaggccaatgttatttaaatgaaagtagttagaaaaatgctctcctattctaccaaatttttaatttctttcttccctttcttgctacacagtgatcaagagtttctcatagtgctttgaagttagaaattatgtataggatattttaaatcattgagttttgtggggtttttttgtttgtttgtttcttttgttttttggaaaatccgtgtctttatctttttttcccacgtggtagatatgatcccattggaggtaaattgtagcttcttctcattcatgcagtaaataatacatcctttcactcagcagagatggccatattaaacacgttttgctatgttaaaagtggcagaacaggaaagacgaattaaaaataacattttttaagcgacataaggatgaaatactgatgaatctctgtgacattacagggaaaaaaatatagttttctatctctttcaagggcagaagagttttcatttttatttttgtaattttatctgtaagtcataaatattacttaatcaggcctgattctacttttgaaaattacagttcttgaaatgcagataatgtttactttgaaaacaaatgtcatgaatgatttccagtttttaaagctatatgtttcactgcttcatatctctgtccactttctgaatgagaacttattttgtgcctagagctctcactcactgataatgcttattaccttctgggcatttattccaaagtgggatcaactgtacgcctttggtatctgaccataaagtcttttgctccgctgacatttgggtgatgtcttcacatggaaatataataaaaataaaaatctagtttaatactgcattatttattttcctaaggctaaagaggagcagtcctatgcttttattcagcatcctttatctgtgacttcatgctctgataactgcctttccttccttctgtgcctttgaatacaaatttcagttctgcaaaagtgaaacattaaacattgccaacgcaaatgtatgta

SEQ ID NO: 2774 - DNA, 3545 bp, Homo Sapiens
  NM_005858
tgaacgcatgcgtgctgtggtcgcctagtaaacggggctgctggtgggccgcgtcgaagacatggaccagggctacggaggctacggggcgtggagtgctggacctgccaacacccagggtgcatatggaactggtgtggccagctggcaaggttatgaaaactacaattactatggcgcccagaacaccagtgtcaccacaggcgcaacctacagctacggcccagcctcgtgggaggccgccaaggccaatgatggcggcctggcggccggggcccctgccatgcacatggcctcttacggcccagagccatgcaccgacaattccgactccctcattgccaagatcaaccagcgtttggacatgatgtccaaggaaggaggcaggggcgggagcggcggcggtggggagggcatacaggaccgggagagctccttccgcttccagccgttcgagtcctatgactccaggccctgcctgccggagcacaacccctaccgccccagctacagctacgactatgagttcgacctggggtccgaccgcaatggcagctttggggggcagtacagtgaatgccgagacccagcccgggagcggggctcccttgatggcttcatgcggggccggggccagggccgcttccaggaccggagcaaccctggcaccttcatgcgcagcgaccccttcgtgccccccgctgcgtcctctgagcccctgtccacgccctggaacgagctgaactacgtgggtggacggggcctgggagggccctcccccagccggccacctccgtccctcttctcccagtccatggctcccgactacggcgtgatgggcatgcagggggcgggcggctatgacagcaccatgccctacggatgtggccgctcgcagcctcggatgcgggatcgggatcggcccaagaggagagggtttgaccgcttcggaccagatggcacgggcaggaaacggaagcagttccaactttacgaggagccagacaccaaactggcccgggttgacagtgaaggagatttctccgaaaatgatgacgcagctggtgacttccgctcaggagatgaagaattcaagggtgaggatgaactctgcgactctgggaggcaaagaggagagaaggaggacgaggacgaggatgtgaagaagagaagggaaaagcaaaggagaagagacaggacgcgggaccgtgcagccgacagaattcagtttgcctgttctgtatgcaagttccgtagctttgatgacgaagagatccagaagcatctgcaaagcaaatttcacaaagagaccctgcggttcataagcaccaagctgcccgacaagaccgtggagttcctccaggaatacattgtaaacagaaataagaaaattgagaagcggcgtcaggaattgatggagaaagaaaccgcaaaaccaaaaccagatcctttcaaagggattggccaggagcacttcttcaagaagatcgaggctgctcactgcctggcctgcgacatgctaattcctgcacagccgcagctcctccagcggcacctgcactccgtggaccacaatcacaaccgcaggttggctgctgaacagttcaagaaaaccagtctccatgtggctaagagtgttttgaacaacagacatatagtgaagatgctggaaaaatacctcaagggtgaggaccctttcaccagtgaaactgttgatccagaaatggaaggagatgacaatttaggaggtgaggataagaaagagacacctgaggaggtggccgcggacgtcttagcagaggtgattacagcagcagtgagggccgtagatggggaaggagcgcccgctccagagagcagcggggagccggctgaggacgaaggccccacggacacagcggaggccggtagtgatcctcaagccgaacagctgctggaagagcaggtgccctgtggaacggcacatgagaagggcgtccccaaggccagaagtgaggctgcagaggctggaaatggcgccgagacaatggcagcagaggcagaaagtgcccaaaccagagttgctcctgccccagctgccgcggatgctgaagtggaacaaactgatgcagagtctaaagacgctgttcccacagaatgatgctcatttccctgttccagggaaggcgttgggatgatggatgcgttggtctttctcccttggtttgtaagcagtacaagggcgtgtgctcccagaatatgctgtaatctaattttggtgaagagacccagcgtttcctcctgagcagtgcctctcacggcttgtctcatgcagtcgtgtggcttcttgcccaggtttcaaagctgaagtacattgtccttagcggctgtaacatgtctcttgacagtagtgcacttggaataataaaggttgggtgattatatcttgatgatacattacttgttcaatacagccactgatggaatgcttccttttttatttttttccttaatttttttttttatttggttgggaacagctgaatactaggaatatatcttgctctatagaggatttttttttgtatgtttcaagcttcagcctttaacctatacctttgtagtgcaccatatggtgtgtgactttcacaggacttcgcagcacctggttcacatgtggcactgaccgcgtcacatccacgcactcccaaaggccagaagtatctgaccgacctacgccactggaaacacacccaccgcaacctcaagaaccagactgtgcagagggcattgcgtcccaatctttagtccttgctgaatcagttctctaatattttacctcatttgtgttccacctctagattacttcaggtttttttcctttaaaattagttactaccactcaaatgtatttacaaagagaatttggccaggcacggtgatgcatacctataatcccagcacttggggaggccgtggtgagaggatagcttaagcccaggagttcaagaccaacctggacaacatagcaagaccccatctcttaaaaaaaaaggaaagaaaacttgatgtgattgccataggtggaataatccaacataaattgccatagatagaaggtatctgtaatatatatatatatataaaatgaaatatatgtttcattttagagaaataactattactttagatctttccaaatctgagaaagggaggctagcatgtgttcaaggttagcacgcaacagaatttcctaaaatcagaagaattggaagatcctccccttttgaaatggccctgctgtgtcagtttccctgtggccttttgaactgtacatctcacatgttgggaaacgctggccactgggaaatcattagaaaggaggctgtagaatatttgccgagcctctactgtataccaggggctaactcaccaagcacattctaggaattgggccctgctcatgaggagccttagtggagattccaggtgaatatttatgaaaaagtcaacattagaactgaaaatggaaataaactgcttgaaaagaaaaaaaaaaaaaaaaa

SEQ ID NO: 2775 - DNA, 5304 bp, Homo Sapiens
  NM_005859
cgactgaggcggcgggcggagcggcaggcggcggcggcgcggcagcggagcgcagcatcatggcggaccgagacagcggcagcgagcagggtggtgcggcgctgggttcgggcggctccctggggcaccccggctcgggctcaggctccggcgggggcggtggtggcggcgggggcggcggcggcagtggcggcggcggcggcggggccccaggggggctgcagcacgagacgcaggagctggcctccaagcgggtggacatccagaacaagcgcttctacctggacgtgaagcagaacgccaagggccgcttcctgaagatcgccgaggtgggcgcgggcggcaacaagagccgccttactctctccatgtcagtggccgtggagttccgcgactacctgggcgacttcatcgagcactacgcgcagctgggccccagccagccgccggacctggcccaggcgcaggacgagccgcgccgggcgctcaaaagcgagttcctggtgcgcgagaaccgcaagtactacatggatctcaaggagaaccagcgcggccgcttcctgcgcatccgccagacggtcaaccgggggcctggcctgggctccacgcagggccagaccattgcgctgcccgcgcaggggctcatcgagttccgtgacgctctggccaagctcatcgacgactacggagtggaggaggagccggccgagctgcccgagggcacctccttgactgtggacaacaagcgcttcttcttcgatgtgggctccaacaagtacggcgtgtttatgcgagtgagcgaggtgaagcccacctatcgcaactccatcaccgtgccctacaaggtgtgggccaagttcggacacaccttctgcaagtactcggaggagatgaagaagattcaagagaagcagagggagaagcgggctgcctgtgagcagcttcaccagcagcaacagcagcagcaggaggagaccgccgctgccaccctgctactgcagggtgaggaagaaggggaagaagattgatcaaactgaatgaaacccccacacacacacacatgcatacacacacacacacagccacacacacagaaaatatactgtaaagaaagagagaaaataaaaagttaaaaagttaaaaaaaaaaaaaaacctgttaactccaagggagcaccacccacagaacctccaccaactgacagtttctcttcttgacttgccacccatcgctggatgttgtccactttatccaccatataaaacagtaagcagctgctaaaaacaaaaaaaatacaaaaagtaataacattatatgaactgtgtttcctacttgattaaaaaatataaagaactgagtgtttatttccctaattaaccaagaacttttgtacacgtttaagctattattattaaaaagtgtttgcaaaatggtcaagattataatattgctgaattatataaaagtccttttcatgttgagctaacatttgactttagcacaaaaaagagatattttagaacacgtaaaataatatttttagtttttctcattttgttaccaaatttcaaaccttacatggaggttattatagtatatttgacaccctatatacctgtgattagagatgtgtatatatatgagggctaggcatgctgtgtgtctgagctttgtctaaatgttatgcagaagtttgtagagttaaaggtacgtaggtttaattcatgcaaggtaaacaataagtgctctcttttatacaatatgcattgcatctggaccttaaacttataaaaatggtcagtgaaacttctgtgaacatgaagaaattattaaaaaaggcatttaaatgaaatttgctaagttgtgatttttatggttggaaccaaagttattcaaatagtaaaaggaaaaagaaagaaaaaggagatctcccataatatttttctgcatctgtttgctttgactgagtaggcgttttgtcattattgtgtatatgagatgtacttgtatcgttcataatatattttttttattatgtgtagaaagattttaaaaaactaacgtgcagcaatttccagtgaacctgtacttggacatcaggtagtgagtctatttgtggtcactagcactgtctcctaaacttgtaagaggtctgaagctattctttgatttttgctagtgctattaacttatgtagacctgttaaaaagcagagcaacacaattatagttatcctactgagccatggattctgagttttgttttaaaagtgaaagccaagttggtgtatgtaaaggatttccatgtagctgtggtgctagttattactggctacattatatgctaagtgtatttgtgttccccaagtgtacaagccttctatcaaaagtatgttctataactcatatattcaaggtgtagggtatgaaaatgcaaagtttaggagagcactttaccaagctggtgtcctccaaactgaaattgtttgtaacgatagtcttttacaggttttcctttaaagatgtttgtgtgcttttaattgacaactaacttcttgctgctgtatagtaaaatattaatatatttttatcattaaactgctgcatgactatcatctttgagtgaagagaaaatgttataaaaaagatgccttaaacagtacattttggtttggaattctgtagaaagtattttggtaaaaaaaaaaaaaaaaaaaaagggtcttgtctgacagagagttctggggatggaattgtttcttggcaaatccagccatatagatctaactgctgtatgtataagacaccacctgtaggagcgggaaggtatcagtgcttcttatattgtaaagcattggcctaggaaggcaaacagttgtctttttgaaggatttttttctgctggtcctttgggttttgatttgatatttttatgctccctggttgagtgtgttgtcttcgtttttgagatctactgtatgtgttgaataacaagctattttcattgtactgtgcattttcccattaaattgtttgcttttaatattcaatgttaaatatgaggtgaccgtacagtagttaggagtttctttacttacaaaatcactggaaatgattaaattgcttttccccctccccagaggtgcatttttcttatttccatatagtaaagttgagcttttacagtgcataatgtgacatttggaatgcttatcaactgcatgtaaacattaataacctgcacttttttgtcttaaggtttgttgagctgttttgttcactgtactttaactgtgatatggaaaagactgcattctctgtgctgttactaattaggaaagagaattgctttgattttgtctcttgtttactatagcttcttaaagttaagccttgtactacaggttgttggagtactcctagatcactgtttcatagtagccagcaataagtagtgcaagtcaacaaaaacacagcaaacttaggcaaagtgtcctttctttgagatgcgagttctttcatgaggttttctttagggccagagttacctaaagtgaagcctttcttatctatagacttcagattctgcttggaatcccaccggctcaagaagcacatgtattgtgcaattaattgtctttacactaaaacagtttaatacaatctaactacgattttgaaaccagtgtctgatttatggtcagtgggtttaaaaagaaatccacatgcagatcttttaagacttaaaaagtgatcatagaaaagactaagtgactgtaaagatgctctttttttaagcatctcactttacctccccaagcaccctcccaaaccttgtcttccctcttctgttgcatcctttccctacccttccctcccaggtgctcggtactttacctagtttctatatatcagtgttttatgttggaatttttccttgtttttattttactagttggtaaaccctgtttatgctgaaacaaataaggaaatggtatatttgaccatatgtgttattcatagaagacagtatgatcaaatgtgccaaaaacaagcaaacaaaacttaattcctgagaagtatgccttatttttattgatctgctttgtcttacaattaaggtccaagagcttggttaaactgtattatttgcctaagtataaaagaaaacttgaactgcattgcaatattgacgttctttaaaatgagagacactgtcaagtaatttaatccagagatcagccaccagatttgaaatgcttatgtatgtgtgtgtgtttggagttgtttttttcttttaaatcaccaaattttttttaagctactttttatttgtgcctcctatttatcatgctgatgttagaagcagcagtcatccagccacagagggagctaaagttaactaaccagaactgtagaaatcattatacatgcctttgacaacaaaggaagttcataagaaaagccatgtcggcttttcctctactagatacagattggaggtagatgaatatttgccaaatggaaaaaaagacaatgctagtcagaaaagacaaactgttttccagcttctcaaaaagccatggagagtagaaaccaaaaccaacagggaaataaaaaaccttgaaagtctcactttctagttgtcccatgcaggggttgaaatttgattccaagcggaaagtatattatgttttttcaggccttcacatctagagagatggataacttccaatttgatttttcaggtaatagagaaagctgctagtaattttaacccctgcctaaagaagacatatacttcatttgggagcaaatacttattgccttgaaaagtagcactgtaatagcctatgataattagttgtagaataacctttatccctttcaaactatgcaaattattaaataagtgtaaattaggattcaattaaagatagttgattatattgcaatcagatggcattcacaaacttaactggagcatatacaaatatattagtctaagttttgtatgctaacagaaagatataatttagctacctattctaaaaatggtgaatattattaatattgtataataggagtgggaagactgcctccttttttgaagagagagattaaggatttttataattgtttttcatcaaattttaatatttttgtcaaatttttaggtatttaatttgtaaaacagtttgctttgtactggcatacagaaaatagggtattgattttaaactttttgaagccaagtgatcaagtacatttgtaataaaagtcaatggatctataaaaaaaaaaa

SEQ ID NO: 2776 - DNA, 5166 bp, Homo Sapiens
  NM_005862
ccggacccaagtctgcagcggcgccattggcgtgtggaaaatgccaccagatggcgggttaggattgcagctccgttgaaggcgcggcccccgctcccgaacccccggcgaccaccccgtaacaacccccccacatcgggaataacacaccggagacttttggggggaaactaggtcgatggtcggcggcgcccggatgggcagctgaggattgcctttgaggttattttaaaagttttgagttgtacagcacttgattattttgctgcattgtgaaaggacctctccagcaatgattacttcagaattaccagtgttacaggattcaactaatgaaactactgcccattccgatgctggcagcgagcttgaagaaacagaggtcaaaggaaaaagaaaaaggggtcgtcctggccggcctccatctacaaataagaaacctcgaaaatctccaggtgagaagagcagaattgaagctggaattagaggagcaggccgtggaagagctaatggacaccctcaacagaatggggaaggggagcctgtcacattatttgaggtggtgaaactggggaaaagtgcaatgcagtccgtggtggatgactggattgaatcatataaacaagacagggacatcgcacttctggatttaatcaacttttttatccagtgttcaggatgtcgaggtactgtgagaatagagatgtttcgaaatatgcagaatgcagaaatcatcagaaaaatgactgaagaatttgatgaggacagtggtgattatcctcttaccatgcctggacctcagtggaaaaaatttcgttcaaacttttgtgaatttattggagtcctgattcgacagtgtcagtatagcataatttatgatgagtatatgatggacacagtaatctcccttttgacgggtttgtcagactcccaggtcagagcttttaggcatacaagtaccctggctgccatgaagctcatgactgctctggtgaatgttgccttaaacctcagtattcatcaggataatacccagagacaatatgaagccgagagaaataaaatgattgggaagagagccaatgaaaggttggagttactacttcagaaacgcaaagagctgcaagaaaatcaggatgaaatcgaaaatatgatgaactctatttttaagggtatatttgttcatagataccgtgatgctattgctgagattagagccatttgtattgaagaaattggagtatggatgaaaatgtatagtgatgccttcctaaatgacagttacctaaaatatgttggctggactcttcatgacaggcaaggggaagtcaggctgaagtgtttgaaagctctgcagagtctatataccaatagagaattattccccaaattggaactattcactaaccgattcaaggatcgcattgtatcaatgacacttgataaagaatatgatgttgctgtggaagctattcgattggttactctgatacttcatggaagtgaagaagctctttccaatgaagactgtgaaaatgtttaccacttggtgtactcggcacatcgccctgttgctgtggcagctggagagttccttcacaaaaagctatttagcagacatgacccacaagcagaagaagcattagcaaagaggaggggaagaaacagcccgaatggaaacctcattaggatgctggttcttttctttcttgaaagtgagttacatgaacatgcagcctacttggtggacagtttatgggagagctctcaagaactgttgaaagactgggaatgtatgacagagttgctattagaagaacctgttcaaggagaggaagcaatgtctgatcgtcaagagagtgctcttatagagctaatggtttgtacaattcgtcaagctgctgaggcacatcctccagtgggaaggggtaccggcaagagagtgctaactgccaaagaaaggaaaactcaaattgatgatagaaacaaattgactgaacattttattattacacttcctatgttactgtcaaagtattctgcagatgcagagaaggtagcaaacttgctacaaatcccacagtattttgatttagaaatctacagcacaggtagaatggaaaagcatctggatgctttattaaaacagattaagtttgttgtggagaaacacgtagaatcagatgttctagaagcctgcagtaaaacctatagtatcttatgcagtgaagaatataccatccagaacagagttgacatagctcgaagccagctgattgatgagtttgtagatcgattcaatcattctgtggaagacctattgcaagagggagaagaagctgatgatgatgacatttacaatgttctttctacattaaagcggttaacttcttttcacaatgcacatgatctcacaaaatgggatctctttggtaattgctacagattattgaagactggaattgaacatggagccatgccagaacagatagtcgtgcaagcactgcagtgttcccattattcgattctttggcagttggtgaaaattactgatggctctccttccaaagaggatttgttggtattgaggaaaacggtgaaatcctttttggctgtttgccagcagtgcctgtctaatgttaatactccagtgaaagaacaggctttcatgttactctgtgatcttctgatgattttcagccaccaattaatgacaggtggcagagagggccttcagcctttggtgttcaatccagatactggactccaatctgaactcctcagttttgtgatggatcacgtttttattgaccaagacgaggagaaccagagcatggagggtgatgaagaagatgaagctaataaaattgaggccttacataaaagaaggaatctacttgctgctttcagcaaacttatcatttatgacattgttgacatgcatgcagctgcagacatcttcaaacactacatgaagtattacaatgactatggtgatattattaaggaaacactgagtaaaaccaggcagattgataaaattcagtgtgccaagactctcattctcagtttgcaacagttatttaatgaacttgttcaagagcaaggtcccaacctagataggacatctgcccatgtcagtggcattaaagaactggcacgtcgctttgcccttacatttggattggaccagattaagacacgagaagcagttgccacacttcacaaggatggcatagagtttgcatttaaataccaaaatcagaaaggacaagagtatccacctcctaatctggcttttcttgaagtactaagtgaattttcttctaaacttcttcgacaggacaaaaagacagttcattcatacctagagaaattccttaccgagcagatgatggaaaggagggaggatgtatggcttccactcatctcctatagaaattcattagtcactgggggtgaagatgatagaatgtctgtgaacagtggaagtagcagcagcaaaacctcatcagtaaggaataagaaaggacgacctccacttcataaaaaacgagtagaagatgagagtctggataacacatggctaaacaggactgacaccatgattcagactcctggccccctgccagcaccacaactcacatccactgtactgcgggagaacagtcggcccatgggagaccagattcaagaacctgagtctgaacatggttctgaaccagactttttacacaatcctcagatgcagatctcttggttaggccagccgaagttagaagacttaaatcggaaggacagaacaggaatgaactacatgaaagtgagaactggagtgaggcatgctgttcggggtctaatggaggaagatgctgagcccatctttgaagatgtgatgatgtcatcccgaagccagttagaagatatgaatgaagaatttgaggacaccatggttattgatctgcctccatcaagaaatcggcgagagagagctgagctaaggccagacttctttgactctgcagctatcatagaagatgattcaggatttggaatgcctatgttctgaagtctgaagaaaatttacaaatctggaactctattatttagagctagaggcctatatactgtgatagcttgtatggggaaaaacacttttgatgtgatctgatttgttttttaatcaaatgattaaggtcaatccctttttgcagtgacagaagaggagcatgtaaattacccaagggaatgttggtgaatgtcaactcagaaagactgacctgaaaatcatttgtgtcctactattggacttatcccaatacagatgtgtgtgtttttctggagggaggaagaaattttaaatttttaaaacagctgtcaagataaacactgttatacacctgttttatgaaaactcaacattgagtaaaaaaaaacatatttttaactttattttcctgttgtacaatttaaaaaccgttttaacattttgcctttttatgttttaaaagctaaccatttttattaaacctatgagtaagcagctcatcctaattgcgaagagtgttttggagttcactggatttggttgacctttgtggaacacaaataatgaaggagcagaacattgacaagctaagatgaaattctgacatagtacatctctgccaaaaaccacacaccctctgtggatatggatatgaattcccagattttatatactcttgaataaaaggtttatttttatttataagtgggcataaaataagaaatgtccatgcagccatttttccaacagatgctgtacaccgttcattttatatagactagggagattcaaatacagtgcattttctattggtatttgttctgtgcatttttagcaacttctaccagcaaataaagtattctcagtaaaacgaaaatgattctcaagttatcagtttgctgtttttaccacttatttcatgccctgccaaattcaagttacacagacttccattttcttaagataatcaatcatgaagaaatcctttatcaatcattcaaaagtaattttaagtgtaacataactgtgtttacttcccatgcacttaatacccttatgcgctaattttgtgaattaagtttactgattatagaagtatgtgctgcatagaagtctgt

SEQ ID NO: 2777 - DNA, 1655 bp, Homo Sapiens
  NM_005866
ctccgaggccgtgagcgcaaagcctcaggccccggctccctcctgagctgcgccgtgccaggccgcccgccgggatgcagtgggccgtgggccggcggtgggcgtgggccgcgctgctcctggctgtcgcagcggtgctgacccaggtcgtctggctctggctgggtacgcagagcttcgtcttccagcgcgaagagatagcgcagttggcgcggcagtacgctgggctggaccacgagctggccttctctcgtctgatcgtggagctgcggcggctgcacccaggccacgtgctgcccgacgaggagctgcagtgggtgttcgtgaatgcgggtggctggatgggcgccatgtgccttctgcacgcctcgctgtccgagtatgtgctgctcttcggcaccgccttgggctcccgcggccactcggggcgctactgggctgagatctcggataccatcatctctggcaccttccaccagtggagagagggcaccaccaaaagtgaggtcttctacccaggggagacggtagtacacgggcctggtgaggcaacagctgtggagtgggggccaaacacatggatggtggagtacggccggggcgtcatcccatccaccctggccttcgcgctggccgacactgtcttcagcacccaggacttcctcaccctcttctatactcttcgctcctatgctcggggcctccggcttgagctcaccacctacctctttggccaggacccttgaccagccaggcctgaaggaagacctgcggatggacaggagcgggcaggcccgcacatatccacttgctggagcccatgtttacagacagggacatacaccatgcagatcctgagttcctgctgtatgagcagggatatccatgcttatgtatccaaacacagagacccatgggaacaaatgagacacatatagatactgagacctgtgtgtacagtaggaccatgcactcacacccatctggagagggagcccccggtataccaagggagccagttgtgttcagacacacacatcacagcttgactcactaactgaggcctttccatagctccacagcttcccacctcctccccaccaaaccggggttctagagttaaggatgggggagggtattatactgcctcagtctgactcctcaacccagcagcaatttgaggggatgagggggaagaggagctgccttttggaggcccccttcacctgcagctatgatgcccttccccttctcccctgtcctcaccatatgccttatccccattctactcccctgctatgcaagtgcccctgtggcttgtccccaaccccctcagcaacaaagctcagctggggaacgagagtaatttgaagaatgcttgaagtcagcgtcttccattccagaaagacccccattcttcctttgggggtatgatgtggaagctggtttcagcccaggacccaccactgaggagaggatctagacaggtgggcctaattccaaggggcccttcctggcctggagaaggccttttacacacacacaacacatacacacacacacacacacacacatatcacagttttcacacagcccctgctgcattctctgtccatctgtctgtttctattaataaagatttgttgatctgttcc

SEQ ID NO: 2778 - DNA, 1593 bp, Homo Sapiens
  NM_005873
agctgtaggggaggcgctgcgcccccggccccagccgatcgggggctcctggcgctagcctccctccagagcgccgcaggagtccctcctgccgtctgacttgagtccctgctgctgcagtgcacgccccttcggcagccagggtggggcccagacccaacctggcccctcctgcccccaccccgcctttgggtcgctgacccccaggctgtggtgagggtctgagagctggtaccacggagcctgggcaacctcctccgcccacccatgcccaccccgcatgaggctgagaagcagatcacagggccagaggaggcggaccggcccccttcaatgtccagtcatgatacagcctctccagcggcccccagccgcaacccctgctgcctgtgctggtgctgctgctgtagctgctcctggaaccaagagcggcggcgcgcgtggcaggcctcccgggagagcaagctgcagcccctccccagctgtgaagtatgtgccacgccaagtcctgaggaggtgcagagctgggcgcagtcttttgacaagctgatgcacagcccagcgggacgcagcgtgttccgggcgttcctgcggacagagtacagcgaggagaacatgctcttctggttggcctgcgaggagctgaaggccgaggccaaccagcatgtggtagacgagaaggcgaggctcatctacgaggactacgtatccatcctgtcccccaaggaggtgagcctggactcccgtgtgcgggagggcatcaacaagaagatgcaggagccgtccgcacacacgttcgacgacgcgcagctgcagatctacacgctcatgcaccgggactcctacccccgcttcctcagctctcccacctaccgtgccctgctgctgcaggggccatcacagtcctcctccgaggcctaggccgcccccagcagcacagaccccgccgcctcctacggccgactctgggttcccttcaggtgttgttgtcggcagggctgtcagggcacatgcctggccggctggggtccccacccgcggagacggtcctagacccagtggggagtgctgtgtctcctgggtctgcccacccgtggccaagcaggaactccaggtgcagggcgggcctccaggtgcagggcgggccagaagccccctcatcggcccgcagctggctggcccagtgctcctggctgggggctcttgcgtggtgagagtaggggtccccccaggagccatgctggacccatgagcctcgctggggcctcctccccaggcagccaatgggccccagacaagcctttggtggggaacagaacctccgcatcgtgtagttttgtgacataaggagacctcctacttgagctgtctgtaccccagaatcaaacacagaacctcagaaccagatttaggacctcagaatcctgcactcaaggtggcaggacccaatttctgttttatatgttcatgaactttaaacctggaaacatgtccttactaggtgttttatcaaaaaaaagttttcatatttatctctatccctaaccccccaaaaataggatgtcttattattgaagatatttttaaagcaaa

SEQ ID NO: 2779 - DNA, 1014 bp, Homo Sapiens
  NM_005875
atagtctccatcggccattttgtgcgagaagccgcagcgccgcctcttctctcgcgccctcgcctcttcctccgcctcctccttcgcctcttcctgcctcctcccggcttccgccgccgccactccagcctaatcccaaccccagggcgaagcgttttcttatttatttccgttttctcgccactacagcctcctgacaaggtgatccgggcgggccccgcaggaattttatcccctcaccggcctcacactagtatcgcatgtccactatccagaacctccaatctttcgacccctttgctgatgcaactaagggtgacgacttactcccggcagggactgaggattacattcatataagaatccagcaacggaacggcagaaagacactgactactgttcagggcattgcagatgattatgacaaaaagaaacttgtgaaagctttcaaaaagaaatttgcctgtaatggtactgtgattgaacatcctgaatacggagaggttattcagcttcaaggtgaccaaagaaaaaacatctgccagtttctcttggaggttggcattgtaaaggaggaacagcttaaggttcatggattctaaaatgaacctaaatacgtggagaatttcttgaatagttttgttctctaaacccggtttggctgccttgtgaaatgattccctgcagtaaacggacttttcatttatttaatcattcaaacttccattcacatctgcatgattacagaaaacatggggtatgtagactagtaacacataagaaaattgcagtaagatggtaacaaaacctcatattgtctttacatgtttccaatggaaaatgttttgagtgtttattgttcagtttattacgtttcacttgattaaatttttttgttgttgtattaaaccatgtacgttgcagcttaacaataaaaaaaaatctatgaatctttgtgagcaattatgctcccaaatctaagcaagtaaaatacacattttgtctttcttaaaa

SEQ ID NO: 2780 - DNA, 3066 bp, Homo Sapiens
  NM_005880
gcgctgggtcaaagttcagccccgcccccgcttccccctcgctgtctccctcggcctgtgccgccgccgacgccgcttgtgggcccgactccgctctgtctgcttcgccaccttctccccgagcactgcccggccggccgccatggctaacgtggctgacacgaagctgtacgacatcctgggcgtcccgcccggcgccagcgagaacgagctgaagaaggcatacagaaagttagccaaggaatatcatcctgataagaatccaaatgcaggagacaaatttaaagaaataagttttgcatatgaagtactatcaaatcctgagaagcgtgagttatatgacagatacggagagcaaggtcttcgggaaggcagcggcggaggtggtggcatggatgatattttctctcacatttttggtgggggattgttcggcttcatgggcaatcagagtagaagtcgaaatggcagaagaagaggagaggacatgatgcatccactcaaagtatctttagaagatctgtataatggcaagacaaccaaactacaacttagcaagaatgtgctctgtagtgcatgcagtggccaaggcggaaagtctggagctgtccaaaagtgtagtgcttgtcgaggtcgaggtgtgcgcatcatgatcagacagctggctccagggatggtacaacagatgcagtctgtgtgctctgattgtaatggagaaggagaggtaattaatgaaaaagaccgctgtaaaaaatgtgaagggaagaaggtgattaaagaagtcaagattcttgaagtccacgtagacaaaggcatgaaacatggacagagaattacattcactggggaagcagaccaggccccaggagtggaacccggagacattgttcttttgctacaggagaaagaacatgaggtatttcagagagatgggaatgatttgcacatgacatataaaataggacttgttgaagctctatgtggatttcagttcacatttaagcaccttgatggacgtcagattgtggtgaaatacccccctggcaaagtaattgaaccagggtgtgttcgtgtagttcgaggtgaagggatgccgcagtatcgtaatccctttgaaaaaggtgatctttacataaagtttgatgtgcagtttcctgaaaacaactggatcaacccagacaagctttctgaactagaagatcttctgccatctagaccggaagttcctaacataattggagaaacagaggaggtagagcttcaggaatttgatagcactcgaggctcaggaggtggtcagaggcgtgaagcctataatgatagctctgatgaagaaagcagcagccatcatggacctggagtgcagtgtgcccatcagtaaactctgcaaacaaattgcacaggtggattttctttccacatttgcctgatttgttctcagcaatccagctggagtgtcttatcaatccagatgaactgagggacatctgttggtctatgtataacttttaaaattggtatagtatctacagagtgtataatttaaactaaccacaaagctttacatcttcattttgactgttccatagcagaataaagcacttgaaaggaaacaagactccctttcacacatggattattataagtttcaatcctggtatctgtgcttgatttttatcagttttgtgtagatttttatgtttcatattttaaatttaaatcccacattgtaaagtttgtacaatttgtcctgaagctttgtgtttggctgcacctgcataagctgctacaaatagaataaagaatttcatagcctgtatctatcatttagatgcatggaaaaaaatgggctttgcacacaatgggtttggagctgactgggaacaatggaaaaaattacattagctgtggttgtaaagtttttttgtttttggttttgttttttttttcttttttctttttttttttttttaccatcttgtgaaaggtttctgaaactcgataataaaaagcggttggtgtaaattattcttttgtgtcacatttttagaaggaaaaacataaaagaatgtatccttagtactggttcttaaacagcccataaaaacccattggcctgaagcttatatctcaggcctatgcccatcttatagtcttggaagacaaaaggctggtagagacagtcttcagtggcttcagtgatgctctgtagaggccagggtgtcttgagtgctgtaactcccaagcactgggctagcctgacttctgtatctccctaccaccacccccttaaaaaaataaggtaacagcaaatctatagtaaaaccatgtctgcatagaacgtgttcaaatcctctgttttcattaaatgtaaaagatgctgtctccattaagttgaatatttggaattggagaagccattgattattattttgagtttctgtaatgttttatagaaaagtaagatgcttattcagaatttaagaatgaaggcaactgaaatatgcattgttgtagttatttatatttcaaactaaaaataagcaaaaaaaaaaggctggtttgagaaaaatcaggtaaaattgatgaaacggatgttgtgtttctctttccatcatctggtttttaccatttcactcagtaggtatttttagaacacacttatttgaggaaagagacatcagatgcacaattttacatttataaaggaacaaatggggaaaactgaaaactaaaaattttaaatgtattaaatgccatccctgagcctaaatctagtatttgtagtttatttctaggtctgctagaacctgaaaacctgaatgaaaaaaggtgtgctgacactaatcaagtcctgtgaggtttaaattattgacctatccactctacctccattgtacaaaaaatattttacaacaagcctgggtaagattcaacagcatagtagttttgtatccaaggttacttccccacaaccactttaaacataagaaatgtggtggcaatataaagtttgtagcctttccaataaaggtttataaaacagttaaaaaaaaaaaaaaaaaa

SEQ ID NO: 2781 - DNA, 2084 bp, Homo Sapiens
  NM_005882
cccgcccgctaatgttttggccgcttcaagatggcggtgcaggagtcggcggctcagttgtccatgaccctgaaggtccaggagtacccgaccctcaaggtgccctacgagacgctgaacaaacgctttcgcgccgctcagaagaacattgaccgggagaccagccacgtcaccatggtggtggccgagctggagaagacgttgagcggctgccccgccgtggactccgtggtcagcctgctggacggcgtggtggagaagctcagcgtcctcaagaggaaggcggtggaatccatccaggccgaggacgagagcgccaagctgtgcaagcgccggatcgagcacctcaaagagcatagcagcgaccagcccgcggcggccagcgtgtggaagaggaagcgcatggatcgcatgatggtggagcacctgctgcgttgcggctactacaacacggctgtcaagctggcgcgccagagcggcatcgagagctgcctggagttcagcctcagaatccaggagttcattgaactcatccggcagaataagagactggacgctgtgagacatgcaagaaagcacttcagccaagcagaagggagccagctggacgaggtgcgccaggccatgggcatgctggccttcccgcccgacacgcacatctccccgtacaaggaccttctggaccctgcacggtggcggatgctgatccagcagttccggtacgacaactaccgactacaccagctgggaaacaattctgtgttcaccctcaccctgcaggctggcctctcagccatcaagacaccacagtgctacaaggaggacggcagctccaagagccctgactgccctgtgtgcagccgctccctgaacaagctggcgcagcccctgcccatggcccactgtgccaactcccgcctggtctgcaagatttctggcgacgtgatgaacgagaacaatccgcccatgatgctgcccaacggctacgtctacggctacaattctctgctttctatccgtcaagatgataaagtcgtgtgcccgagaaccaaagaagtcttccacttctcacaagccgagaaggtgtacatcatgtaggccccacgtcgtgaagcgcacgcctcggggacgggctgcagtgggcggggaggccacgccttcctcctgtcccacgctccagcctgccgcggcgtttctgtttcttgcgaccaaagatccgtgagcaacgataaatactcttaggaagagagaaaataaggtttcataagtttgtacttgaaaacatttggattggtaggattttgtaacacgtcaaccatttgatgcttctgaaaagtactttcaacttgcgaaggaaactcttctttaaagactgacctaaacaccgagggaaacttaagaacgtttaaaatataggagtccgtgatttccctgtgttttcagtttctttccttctgtgaacgatgagacttggagaacgggctggtccttcaccacttcctgttggccctggcctggccggggaaggtggcagcggcaccggactgacctgcagtgacccgcgatgccgcgccacgagggacacttatggcttcattcgagagctgctgccaaaacgcctggcgccgccaccgtcgggggctggcttcgaggacgcccgcctgcctcgcgggtcgtgtccgcgggactgtgttcgtacgtgcatagtttcgatatcacatcgcggggctgtgttcgtagctgcgtcgtttcgatatcacaccctctgtgtgccgccttacttcctgcttcgagaatgtataacgtggaaatccacgggaccaaatttctgcagaggccttgccggatggttccataactgtagagtctaattgctatccattacagaaattaatcgttcagttgaaagaagtactgatgacttttcaaaacaaatgaaccaccgtagctgacagagaaccgtatcgtagaggtttgtagttagtgcttatttttgcatgttgatgttgactagctaataaactgtaaatgtaaaccatgcgaataaaatggttttctatttctcaaaaaaaaaaaaaaaaaaa

SEQ ID NO: 2782 - DNA, 1567 bp, Homo Sapiens
  NM_005891
ggtgcgcggggaggtggagggcgaggggcggggctacctcaggtcccgcccgcggcaggcctgtgggctgcgaggaggagctttgcctagcttgcaggcagcgcagggcagacggcggcaggagaagcaagatgaatgcaggctcagatcctgtggtcatcgtctcggcggcgcggaccatcataggttccttcaatggtgccttagctgctgttcctgtccaggacctgggctccactgtcatcaaagaagtcttgaagagggccactgtggctccggaagatgtgtctgaggtcatctttggacatgtcttggcagcaggctgtgggcagaatcctgttagacaagccagtgtgggtgcaggaattccctactctgttccagcatggagctgccagatgatctgtgggtcaggcctaaaagctgtgtgccttgcagtccagtcaatagggataggagactccagcattgtggttgcaggaggcatggaaaatatgagcaaggctcctcacttggcttacttgagaacaggagtaaagataggtgagatgccactgactgacagtatactctgtgatggtcttacagatgcatttcacaactgtcatatgggtattacagctgaaaatgtagccaaaaaatggcaagtgagtagagaagatcaggacaaggttgcagttctgtcccagaacaggacagagaatgcacagaaagctggccattttgacaaagagattgtaccagttttggtgtcaactagaaaaggtcttattgaagttaaaacagatgagtttcctcgccatgggagcaacatagaagccatgtccaagctaaagccttactttcttactgatggaacgggaacagtcaccccagccaatgcttcaggaataaatgatggtgctgcagctgtcgttcttatgaagaagtcagaagctgataaacgtgggcttacacctttagcacggatagtttcctggtcccaagtgggtgtggagccttccattatgggaataggaccaattccagccataaagcaagctgttacaaaagcaggttggtcactggaagatgttgacatatttgaaatcaatgaagcctttgcagctgtctctgctgcaatagttaaagaacttggattaaacccagagaaggtcaatattgaaggaggggctatagccttgggccaccctcttggagcatctggctgtcgaattcttgtgaccctgttacacacactggagagaatgggcagaagtcgtggtgttgcagccctgtgcattgggggtgggatgggaatagcaatgtgtgttcagagagaatgaattgcttaaactttgaacaacctcaatttctttttaaactaataaagtactaggttgcaatatgtgaaatcagaggaccaaagtacagatggaaaccatttcctacatcacaaaaacccaagtttacagcttgtactttactttaatgtgtaatactcaactcaaggtacaagacaattgcatttaacattgttataaataaaaggaacatcagatcaatcattaaaaaaaaaaaaaaaaaa

SEQ ID NO: 2783 - DNA, 9252 bp, Homo Sapiens
  NM_005895
ggcctgggcgcgtccctgcagcgtggcgggacggccccgttccagtcacccccgcctcgctgcggtggcctcgggcctgggcgcccgccttcagctgcggcggagctggctctgtaaatgccggtgcccgcgagccctcctgaatgcttgtctgcgcccgacgagcgcggcctgtcccgaagctgtccactgccaccactcgggcagtgcttgctttagcctggccctttgcagctgaaaggcgtgacatggtgtcgggtggttcgtgggaagtcggggtttcaggagtccgtgtacttccttgtttgtctttgtcgctggccgacttgtcttcattccaggtggccagagcgagtggggccgggcgttgtcacgggtatcatgatattagctggtttgacatcaagtcatttgtgagtcatcagatcttctcctgaaaatgggagacacagtagggcccctcccaggagctcttggctgttgctgatggcagaagccaagcttgtccaaggttcacttgtagcccctcagcgtcagctcagctggtgtcgtcctgaccatggacggcgcgtcggccgagcaagatggcctccaggaggacagatcccacagtggcccctcgtctctccccgaggccccactgaagcccccgggcccactggtgccacctgaccagcaggacaaagtccagtgtgccgaggtaaacagagcatccacggaaggggaaagcccggatggacctggccagggaggcctctgtcagaacgggccaacgccacccttcccagaccctccgtcgtctctcgatcccaccacaagcccagtgggccctgatgcctctccaggtgtggctggtttccatgacaacctaaggaagtctcagggaactagtgctgagggcagtgttagaaaagaagctttgcagtctctcagactcagtcttcctatgcaagaaacgcaactgtgctctacagattctcccctgcccctggagaaggaggagcaggtccgacttcaggctcggaagtggctggaagagcagctcaaacagtacagggtgaagcgccagcaggagaggtccagtcaacctgcaaccaaaacgagactttttagcacgcttgatcctgagctcatgttaaacccagaaaacttaccaagggccagtaccctggctatgacaaaagaatattccttcctgcgcaccagtgtccctcgggggcctaaggtgggcagcctggggcttccggcacatcctagggagaaaaaaacttccaaatcaagcaaaatccggtctctggccgattacagaactgaagattcaaatgcggggaattctgggggaaatgtcccggctcccgattctaccaagggttccctgaagcagaacagaagcagtgcggcgtccgttgtgtctgagatcagcctgtcccccgacactgacgaccgtctggagaacacctccctggctggagacagcgtgtctgaggtggatggaaatgacagcgacagctcatcgtacagcagcgcctccacccgagggacctatggcattctgtcgaagacagtgggcacgcaggacaccccctatatggtcaacggccaggagattcctgcggataccctgggccagttcccctccattaaggacgtcctccaggccgcagccgctgagcaccaagaccaggggcaggaggtcaacggggaggtgcggagtcggagagacagcatctgcagcagcgtgtccttggagagctctgcagcagaaacacaggaggagatgctgcaggtgctcaaagagaaaatgcgactcgaaggacagctggaagccttgtcactggaggcgagtcaggcacttaaagagaaggctgagctgcaggcccagctggccgccctcagcacgaagctgcaggcgcaggtggagtgcagccacagcagccagcagcggcaggattcgctgagctcggaggtggacaccctgaagcagtcgtgctgggacctggagcgagccatgactgacctgcagaacatgctggaggcaaaaaatgccagcctggcgtcgtccaacaacgacttgcaggtggccgaggagcagtaccagaggcttatggccaaggtagaggacatgcagaggagcatgctcagcaaggacaacacagtgcacgacctgcgacagcagatgacagccttgcagagccagcttcagcaggtgcagctggagcggacgacgctgaccagcaagctgaaggcgtcgcaggcggagatctcgtccctgcagagtgtccggcagtggtaccagcagcagctcgccctggcacaggaggcccgcgtcaggctgcagggtgagatggcccacatccaggttggacagatgacccaggcaggtctcctggagcacctgaaactcgagaatgtgtccctgtcccagcagctgacggaaactcagcacaggtccatgaaggagaaggggcgcatcgcggcacagctgcagggcattgaggctgacatgttggatcaggaagcagccttcatgcagattcaggaggcaaagacgatggtggaggaggaccttcagaggaggctggaagagtttgaaggtgagagggagcggctgcagaggatggcggactcggcggcatccctggagcagcagctggagcaggtgaagttgactttactccagcgagaccagcagcttgaggctttgcagcaggagcacctggacctgatgaaacagctcaccttgactcaggaggctctgcagagcagggagcagtccctcgatgccctgcagacacactacgatgagctgcaggccaggctgggggagctgcagggcgaggccgcctccagggaggacacgatctgcctcctgcagaacgagaagatcatcttggaggcggctttgcaggcggccaagagtggcaaggaggagcttgacagaggagcaagacgcttggaagaaggtaccgaggaaacgtcggaaactttagagaagttaagagaagaattagctatcaaatccggccaggtggaacacctgcagcaggagactgctgctctgaaaaagcaaatgcaaaaaataaaggaacagtttctccaacaaaaggtgatggtggaggcctaccggcgcgacgccacctccaaagaccagctcatcagtgagctgaaagccaccaggaagaggctggactcggagctgaaggagctgcggcaggagctgatgcaagtgcacggggagaagcggactgccgaggcggagctctcgcgcctgcacagagaggtggcccaggtccgtcagcacatggcggaccttgaagggcatctccagtcggcgcagaaggagcgagacgagatggaaacacacttgcagtcgttgcagttcgataaggagcagatggtcgcggtcacagaggccaatgaggcgctgaagaaacaaatcgaagagttgcagcaagaggcccggaaggccatcacggaacagaagcagaagatgaggcggctgggctcagacttgaccagcgcccagaaggagatgaagaccaaacataaggcctacgagaacgccgtgggcatcctcagccgccgcctgcaggaggccctcgcggccaaggaggctgcggacgcggagctgggccagctccgagcccagggtggcagcagtgacagcagcctggctctacatgaaaggatccaggccctggaggcggagctgcaggctgtcagtcatagcaagacgctgctggaaaaggaactgcaggaggtcatagcgctgaccagccaggagctggaggagtcccgggagaaggtgctggagctggaggacgagcttcaagaatccagaggctttaggaagaagataaaacgccttgaggagtcaaacaagaagttggctcttgaattagagcacgagaaagggaagcttacgggcctcggtcagtccaacgcagctctgcgggaacacaacagcatcctagaaacagctttggccaagagggaggcagacctagtccagttgaaccttcaggtgcaggcagttttgcagcgcaaagaagaggaggatcgccagatgaagcatcttgtccaggccctgcaggcctcactagagaaggagaaggagaaggtgaacagcctcaaggagcaggtggctgctgccaaggtggaagccgggcataaccgccgccacttcaaggcggcctccttggagctgagtgaggtgaagaaggagctgcaggccaaggaacacctggtgcagaagctgcaggccgaggccgacgaccttcagattcgggaggggaaacattcccaggagatagcacagttccaagcagagctggccgaggcccgggcacagctccagctcctgcagaagcagctggacgagcagctcagcaaacagcccgtgggaaaccaagagatggaaaatctcaaatgggaggtggatcagaaagaaagagaaatccagtccttgaagcagcagctggacttgacggagcagcagggcaggaaggaactggaagggctacagcagctgctgcagaacgtcaagtctgagttggagatggcccaggaagacctgtccatgacccagaaggataaatttatgctccaggcaaaagtgtcggagctgaagaacaacatgaagaccctgctccagcagaaccagcagctcaagctggacctacgccgcggcgcggccaagacgagaaaggagccgaaaggcgaggccagctcttccaaccctgccacgcccatcaagatcccggactgcccagttcccgcctcgctgctggaggagctgctgagaccaccgcccgccgtgagcaaggagcccctcaagaacctgaacagctgcctccagcagctcaagcaggagatggacagcctgcagcgccagatggaggagcacgccctgacggtgcacgagtctctgtcctcgtggacgccgctggagccagccactgccagccctgtgcccccggggggtcacgccggcccacgcggcgacccacagagacacagtcagagcagggcttccaaagaagggccgggagagtgactgctgtggactcgcctccgtgcgccgctgccccagaaggctcttatcaatgttatttatttgattgtgtggtcgatgtttttctaagacatgaaatttaagttttgttttgcctttaacaagaagtaaaatatatagcagaatgagagccaaggactagaaaaacattcgaagatcacaattagcttttcacatggaatgaccaactcttaaaagcctgataggctctcggcgaggagctttgaacgtgtctgaagggttacttgtaggtcgtggcttctgagcggccaccgatgctgctctctgcgggtgacagggagaggctgcgtaactgggagcagctgtgtgacagggtctgcggcaccgcgcctggccaggccggctgcagtttctcacttccctgttccattcagtaagagctttacttttccgcagaaatgaaattttatctgtacctttggctttttacttgtttttttggatagccatcccaccataggatgtgtacatagatactgaatatcataatccaatctttgttttttttttttttttttttttgagacagagtctcgctttgttgcccaggctggagtgcagtggcacactctccgctcactgcaagctccgcctcccaggttcatgcgattctcctgcctcagcctctcgagtagctgggattacaggcgtgcgccactatgccaggctaatgtttgtatttttagtagcaatggggtttcaccatgttggccaggatggtctcgatctcctgacctcaagtgatctgcccatctcagcctcccaaagtgctgggattacaggcgtgagcccctgcgcccggcctgtcacccagtctttaagaagcatatgctcatgttattgaagaagaacctacttattattgattgccttttgaaaatttgttgggaataatttacctgcaggatttagggatagtcagaaaattctaagaaatataattattttatttaccttctaaagccaaatattcttacacagaaaggtcctctgttgttctggttttactttgttgctgaggatctttccttcctgctggtctcttcctctcaggccactggccctgtgtgattccaccgtggctggccactgggaaggggcagcttggacccttggtcaggcctgacggccatcaggaggcacaaggacactgaggccccatatctgatctgacctttgggggggcacagggagaggccggtggaggaggaggaggagagcagaccaggggctccctgcagcgactcccgcggtttcccctggagtcagccaggtgtaggtcgcaggcggtaacaaacctcacactcctgttccccaagtgaaaatctttaccattgtctgtgggagcgcctgtactcgtgtgtaggagcacctgtacttctgcagtcatcgagaagtcctggatcttttgtggttacaccagcatcatgtggcaagcagaggcgacttccggaagagacaggcaggcaccgtgaggaaggtggctgtgctctcccaggtgtctcagagacagatgccttatttaaaatcagcacgacatgtgtgagatcttctgtttcctaccccaaatcctgaaaccctgcagacactggctgactgggagaggtggggtctgtaagttgtcccctagtttgctaagaaaatctaaaataatatttattatatgagttaggagagagagaatgggtccgcgtggcctcctctgcagatgtactggtctgaaatgaggttctgagtcactggccaggccagatgtgctcatgtcggtgtctggtgtctgttttgtggagaaaacagtatggtgtgttttaagctatttgtgttctgttgtaatatacttttagaaggttaattggtaaggttaaggtagcattaaccacaaagatgtttggtatttaaaaaatattctctagcaaatattggaatttccaaaatatatcatttgtacagggttaattttgaaataatacttgaaaatttcattataaatatatcctactttttatcttaagttgaagatgttatttactaaattgttcttgtaccattagaaaaaaaaatacggcaatttacgttcttatttattttggctgtactacccctttgttttaattttaaaatcaagaaatcgggccgggcgcggtggctcatgcctgtaatcccagcactttgggaggccgaggcgggtggatcacctgaggtcaagaggtccagaccatcctggccaacatggcaaaaccccgtctttactaaacatacaaaaattagccgggtgtcgtagtgcgcacctataatcccagctacttgggaggctgaggcaggagaatcacttgaacccaggaggcggagcttgcagtgagccgagatcgcgccactgccctccagcctgggcaacagagcgagactccgtctcaaaaataaataaatgattttaaaaaatctaaaatcgagaaatcacacattcagtggggagcgacttctccttgcttatgggaagtcctcaagtgagtgatgttcaccatgtatttttttttctcttaggacagactaattctgaaaataccgaaggaaaagtagctctatgttctcaccccggttttcctgcgtgtgtgcccttgggtgcgatgcctcccccagcgctctgtggtcgccggtgccagggccccctctggtttggcagggcctggctgcctttgctccctgcagtgagtcttttggtgttttcatgcacggcttgtgcttctggatctgaggcctctcgtgttcacgcggacacttccttccttaagaagacgcctaaaagaggaagttggaattttttttttttttttttgagacagagtctcgctctgtcgcccaggctggagtgcagtggcgtgatctctgctcactgcaagctccgccatctgggttcaagcgattctcctgcctcattctccccagtagctgggattacaggtgcccgccaccacaccagcctaatttttgtatttttagaggggtggagttccaccatgttggccaggctggtcttgaactcttgacctcaggtgatcctgagcctcagcctcccaaagtgctggaattataggcgtgaaccaccgcccccggctgcagttggatttttaaattgcttttttttattgttgaggtttttttatctccaagggactctcccggcacttctaccttccagagttacttcagtgcataaagtttgaattattttgttcttgtgggcagaagtgggaatgatggaatatcctcacggaaaaggcagtgaagttgggagtactgcttacaaaacagggtcaccagtgcattatgtggcgtgttcatccccacgccgtgtgtcacgggctagggcggcgtgttcatccccacaccgtgtgtcacaacaggctagggcacttcacgatgtcactacttgtttttctgatgttccaaaaacaacgtaacttggttttcatgtgtttttccgtggtatatgtgagattgatgctacgggtcttacggactcacacccgttcccactctctgcaatatggatcaggcagtgtttctgataggatgtgaaatggactctcctcgggtgggtccagcaggggccctgcccaccagaacacagtccgtgctgtgctgcgctaaggagctggccctcaactctccttggtgcagggttcccacaaccgagttctagttccctgaggtctttaaaaacaaaaacagaatgttgtacgtgaagattctaggaggggagggaccagcaaatctgagagaaccgtcctggggcctcccttcgaggagccctctgatgtgaggagggacttgagttgagtgacgctgtggtgtgaggtgttctgagctcactgaccggaaggtccaggtgaatctcgtcataagtgatctcaggctctcacaggatccggagggaaatgtgttagagggtctggaaaattcagtgcttttgagttacttgtttttattaaaaatttcctcacaaaagagagtcctcaagttgtggctgttcttgggaaaggggtcaccgtgtctgacaaagtgtaactttaaaaagcacgttgattttttacaaatgtaagtgtgcttgggaattccttaaattttgtgcaataaactattttttggtaaagattttc

SEQ ID NO: 2784 - DNA, 5562 bp, Homo Sapiens
  NM_005898
cagagggctgctggctggctaagtccctcccgctcccggctctcgcctcactaggagcggctctcggtgcagcgggacagggcgaagcggcctgcgcccacggagcgcgcgacactgcccggaagggaccgccacccttgccccctcagctgcccactcgtgatttccagcggcctccgcgcgcgcacgatgccctcggccaccagccacagcgggagcggcagcaagtcgtccggaccgccaccgccgtcgggttcctccgggagtgaggcggccgcgggagccggggccgccgcgccggcttctcagcaccccgcaaccggcaccggcgctgtccagaccgaggccatgaagcagattctcggggtgatcgacaagaaacttcggaacctggagaagaaaaagggtaagcttgatgattaccaggaacgaatgaacaaaggggaaaggcttaatcaagatcagctggatgccgtttctaagtaccaggaagtcacaaataatttggagtttgcaaaagaattacagaggagtttcatggcactaagtcaagatattcagaaaacaataaagaagacagcacgtcgggagcagcttatgagagaagaagctgaacagaaacgtttaaaaactgtacttgagctacagtatgttttggacaaattgggagatgatgaagtgcggactgacctgaaacaaggtttgaatggagtgccaatattgtccgaagaggagttgtcattgttggatgaattctataagctagtagaccctgaacgggacatgagcttgaggttgaatgaacagtatgaacatgcctccattcacctgtgggacctgctggaagggaaggaaaaacctgtatgtggaaccacctataaagttctaaaggaaattgttgagcgtgtttttcagtcaaactactttgacagcacccacaaccaccagaatgggctgtgtgaggaagaagaggcagcctcagcacctgcagttgaagaccaggtacctgaagctgaacctgagccagcagaagagtacactgagcaaagtgaagttgaatcaacagagtatgtaaatagacagttcatggcagaaacacagttcaccagtggtgaaaaggagcaggtagatgagtggacagttgaaacggttgaggtggtaaattcactccagcagcaacctcaggctgcatccccttcagtaccagagccccactctttgactccagtggctcaggcagatccccttgtgagaagacagcgagtacaagaccttatggcacaaatgcagggtccctataatttcatacaggattcaatgctggattttgaaaatcagacacttgatcctgccattgtatctgcacagcctatgaatccaacacaaaacatggacatgccccagctggtttgccctccagttcattctgaatctagacttgctcagcctaatcaagttcctgtacaaccagaagcgacacaggttcctttggtatcatccacaagtgaggggtacacagcatctcaacccttgtaccagccttctcatgctacagagcaacgaccacagaaggaaccaattgatcagattcaggcaacaatctctttaaatacagaccagactacagcatcatcatcccttcctgctgcgtctcagcctcaagtatttcaggctgggacaagcaaacctttacatagcagtggaatcaatgtaaatgcagctccattccaatccatgcaaacggtgttcaatatgaatgccccagttcctcctgttaatgaaccagaaactttaaaacagcaaaatcagtaccaggccagttataaccagagcttttctagtcagcctcaccaagtagaacaaacagagcttcagcaagaacagcttcaaacagtggttggcacttaccatggttccccagaccagtcccatcaagtgactggtaaccaccagcagcctcctcagcagaacactggatttccacgtagcaatcagccctattacaatagtcgtggtgtgtctcgtggaggctcccgtggtgctagaggcttgatgaatggataccggggccctgccaatggattcagaggaggatatgatggttaccgcccttcattctctaacactccaaacagtggttatacacagtctcagttcagtgctccccgggattactctggctatcaacgggatggatatcagcagaatttcaagcgaggctctgggcagagtggaccacggggagccccacgaggtcgtggagggcccccaagacccaacagagggatgccgcaaatgaacactcagcaagtgaattaatctgattcacaggattatgtttaatcgccaaaaacacactggccagtgtaccataatatgttaccagaagagttattatctatttgttctccctttcaggaaacttattgtaaagggactgttttcatcccataaagacaggactacaattgtcagctttctattacctggatatggaaggaaactatttttactctgcatgttctgtcctaagcgtcatcttgagccttgcacatgatactcagattcctcacccttgcttaggagtaaaacaatatactttacagggtgataataatctccatagttatttgaagtggcttgaaaaaggcaagattgacttttatgacattggataaaatctacaaatcagccctcgagttattcaatgataactgacaaactaaattatttccctagaaaggaagatgaaaggagtggagtgtggtttggcagaacaactgcatttcacagcttttccagttaaattggagcactgaacgttcagatgcataccaaattatgcatgggtcctaatcacacatataaggctggctaccagctttgacacagcactgttcatctggccaaacaactgtggttaaaaacacatgtaaaatgctttttaacagctgatactgtataagacaaagccaagatgcaaaattaggctttgattggcactttttgaaaaatatgcaacaaatatgggatgtaatccggatggccgcttctgtacttaatgtgaaatatttagatacctttttgaacacttaacagtttctttgagacaatgacttttgtaaggattggtactatctatcattccttatgacatgtacattgtctgtcactaatccttggattttgctgtattgtcacctaaattggtacaggtactgatgaaaatctctagtggataatcataacactctcggtcacatgtttttccttcagcttgaaagcttttttttaaaaggaaaagataccaaatgcctgctgctaccacccttttcaattgctatcttttgaaaggcaccagtatgtgttttagattgatttccctgtttcagggaaatcacggacagtagtttcagttctgatggtataagcaaaacaaataaaacgtttataaaagttgtatcttgaaacactggtgttcaacagctagcagcttatgtgattcaccccatgccacgttagtgtcacaaattttatggtttatctccagcaacatttctctagtacttgcacttattatcttttgtctaatttaaccttaactgaattctccgtttctcctggaggcatttatattcagtgataattccttcccttagatgcatagggagagtctctaaatttgatggaaatggacacttgagtagtgacttagccttatgtactctgttggaatttgtgctagcagtttgagcactagttctgtgtgcctaggaagttaatgctgcttattgtctcattctgacttcatggagaattaatcccacctttaagcaaaggctactaagttaatggtattttctgtgcagaaattaaattttattttcagcatttagcccaggaattcttccagtaggtgctcagctatttaaaaacaaaactattctcaaacattcatcattagacaactggagtttttgctggttttgtaacctaccaaaatggataggctgttgaacattccacattcaaaagttttgtagggtggtgggaaatgggggatcttcaatgtttattttaaaataaaataaaataagttcttgacttttctcatgtgtggttgtggtacatcatattggaagggttaacctgttactttggcaaatgagtatttttttgctagcacctccccttgcgtgctttaaatgacatctgcctgggatgtaccacaaccatatgttacctgtatcttaggggaatggataaaatatttgtggtttactgggtaatccctagatgatgtatgcttgcagtcctatataaaactaaatttgctatctgtgtagaaaataatttcatgacatttacaatcaggactgaagtaagttcttcacacagtgacctctgaatcagtttcagagaagggatgggggagaaaatgccttctaggttttgaacttctatgcattagtgcagatgttgtgaatgtgtaaaggtgttcatagtttgactgtttctatgtatgttttttcaaagaattgttcctttttttgaactataatttttctttttttggttattttaccatcacagtttaaatgtatatcttttatgtctctactcagaccatatttttaaaggggtgcctcattatggggcagagaacttttcaataagtctcattaagatctgaatcttggttctaagcattctgtataatatgtgattgcttgtcctagctgcagaaggccttttgtttggtcaaatgcatattttagcagagtttcaaggaaatgattgtcacacatgtcactgtagcctcttggtgtagcaagctcacatacaaaatacttttgtatatgcataatataaatcatctcatgtggatatgaaacttcttttttaaaacttaaaaaggtagaatgttattgattaccttgattagggcagttttatttccagatcctaataattcctaaaaaatatggaaaagttttttttcaatcattgtaccttgatattaaaacaaatatcctttaagtatttctaatcagttagcttctacagttcttttgtctccttttatatgcagctcttacgtgggagacttttccacttaaaggagacatagaatgtgtgcttattctcagaaggttcattaactgaggtgatgagttaacaactagttgagcagtcagcttcctaagtgttttaggacatttgttcattatattttccgtcatataactagaggaagtggaatgcagataagtgccgaattcaaacccttcattttatgtttaagctcctgaatctgcattccacttgggttgtttttaagcattctaaattttagttgattataagttagatttcacagaatcagtattgcccttgatcttgtcctttttatggagttaacggggaggaagacccctcaggaaaacgaaagtaaattgttaaggctcatcttcatacctttttccattttgaatcctacaaaaatactgcaaaagactagtgaatgtttaaaattacactagattaaataatatgaaagtc

SEQ ID NO: 2785 - DNA, 6256 bp, Homo Sapiens
  NM_005902
gcggccgccgcctccgccccgcgttcggggccttcccgaccctgcactgctgccgtccgcccgcccggccgctcttctcttcgccgtgggagccgctccgggcgcagggccgcgcgccgagccccgcaggctgcagcgccgcggcccggcccggcgccccggcaacttcgccgagagttgaggcgaagtttgggcgaccgcggcaggccccggccgagctcccctctgcgcccccggcgtcccgtcgagcccagccccgccgggggcgctcctcgccgcccgcgcgccctccccagccatgtcgtccatcctgcctttcactcccccgatcgtgaagcgcctgctgggctggaagaagggcgagcagaacgggcaggaggagaaatggtgcgagaaggcggtcaagagcctggtcaagaaactcaagaagacggggcagctggacgagctggagaaggccatcaccacgcagaacgtcaacaccaagtgcatcaccatccccaggtccctggatggccggttgcaggtgtcccatcggaaggggctccctcatgtcatctactgccgcctgtggcgatggccagacctgcacagccaccacgagctacgggccatggagctgtgtgagttcgccttcaatatgaagaaggacgaggtctgcgtgaatccctaccactaccagagagtagagacaccagttctacctcctgtgttggtgccacgccacacagagatcccggccgagttccccccactggacgactacagccattccatccccgaaaacactaacttccccgcaggcatcgagccccagagcaatattccagagaccccaccccctggctacctgagtgaagatggagaaaccagtgaccaccagatgaaccacagcatggacgcaggttctccaaacctatccccgaatccgatgtccccagcacataataacttggacctgcagccagttacctactgcgagccggccttctggtgctccatctcctactacgagctgaaccagcgcgtcggggagacattccacgcctcgcagccatccatgactgtggatggcttcaccgacccctccaattcggagcgcttctgcctagggctgctctccaatgtcaacaggaatgcagcagtggagctgacacggagacacatcggaagaggcgtgcggctctactacatcggaggggaggtcttcgcagagtgcctcagtgacagcgctatttttgtccagtctcccaactgtaaccagcgctatggctggcacccggccaccgtctgcaagatcccaccaggatgcaacctgaagatcttcaacaaccaggagttcgctgccctcctggcccagtcggtcaaccagggctttgaggctgtctaccagttgacccgaatgtgcaccatccgcatgagcttcgtcaaaggctggggagcggagtacaggagacagactgtgaccagtaccccctgctggattgagctgcacctgaatgggcctttgcagtggcttgacaaggtcctcacccagatgggctccccaagcatccgctgttccagtgtgtcttagagacatcaagtatggtaggggagggcaggcttggggaaaatggccatgcaggaggtggagaaaattggaactctactcaacccattgttgtcaaggaagaagaaatctttctccctcaactgaaggggtgcacccacctgttttctgaaacacacgagcaaacccagaggtggatgttatgaacagctgtgtctgccaaacacatttaccctttggccccactttgaagggcaagaaatggcgtctgctctggtggcttaagtgagcagaacaggtagtattacaccaccggccccctccccccagactctttttttgagtgacagctttctgggatgtcacagtccaaccagaaacacccctctgtctaggactgcagtgtggagttcaccttggaagggcgttctaggtaggaagagcccgcagggccatgcagacctcatgcccagctctctgacgcttgtgacagtgcctcttccagtgaacattcccagcccagccccgccccgccccgccccaccactccagcagaccttgccccttgtgagctggatagacttgggatggggagggagggagttttgtctgtctccctcccctctcagaacatactgattgggaggtgcgtgttcagcagaacctgcacacaggacagcgggaaaaatcgatgagcgccacctctttaaaaactcacttacgtttgtcctttttcactttgaaaagttggaaggatctgctgaggcccagtgcatatgcaatgtatagtgtctattatcacattaatctcaaagagattcgaatgacggtaagtgttctcatgaagcaggaggcccttgtcgtgggatggcatttggtctcaggcagcaccacactgggtgcgtctccagtcatctgtaagagcttgctccagattctgatgcatacggctatattggtttatgtagtcagttgcattcattaaatcaactttatcatatgctcttttaaatgtttggtttatatattttctttaaaaatcctgggctggcacattgactgggaaacctgagtgagacccagcaactgcttctctcccttctctctcctgaggtgaagcttttccaggttttgttgaagagatacctgccagcacttctgcaagctgaaatttacagaagcaaattcaccagaagggaaacatctcaggccaacataggcaaatgaaaagggctattaaaatatttttacacctttgaaaattgcaggcttggtacaaagaggtctgtcatcttccccctgggatataagatgatctagctcccggtagaggatcaccggtgacaactatagcagttgtattgtgtaacaagtactgctcccagcagcaattagggagaaaactagtctaaattatttcaactggaaaaaagaaaaaagagtcctcttcttttcccagccttttgcagaacacagtagacagaactgccaccttcaattggtactttattctttgctgctgtttttgtataaaatgacctatcccacgtttttgcatgaatttatagcaggaaaaatcaagggatttcctatggaagtcctgctttattccaggtgaagggaaggaagtgtatatacttttggcaagtcatacagctcaaatgtgatgagatttctgatgttagagggagatggagaggcttcctgatgcctcatctgcagggtcctgtgcctctgaagttctagccatgaggtttccaggtaggacagctgctccccaagcctcctgaggacacaggaagagacggaaggagcaccttgacagacttgtgtgagtcttctcgaaggagggttgactcagaacccagagacaatacaaaacccctcacttcctctgagagggccaaatgctgtgagtctgaagtatgtgcctggtgtgaaatgatctatggcctgtttcttacacaggaagccccctgaacctcctgtacatgtgttcatgttcccagccagctctgagacccaggaaccaaatattccattttggcttctgctagagcagtcatggttcctctcctaaaagccatgggcagcagtttccgagggcctgcatgatccacctgctgcacgatcctatgagggcttcctgtggcacacagccctctgggtgcttgggaactagcttcaggcacagcctgattctggtgatccagtgatctatggaagtcgtgtcttactccaggtgaagggggaaaaaaaaagcctatactttggcaggttatgaactttgaatgtgatgaaatgacacgtttggctgcatttggatggtgtcttagaaccctcattgctcagacctgaaggctacttctaggagcatgaagtttgagttttgtgtttttccaaaggatacttccttggccctttttctttattgactagaccaccagaggaggatgtgtgggattgtaggcaaacccacctgtggcatcactgaaaataaatttgatcatacctaagaggttaggaaatggtgccattcccaccttagagtgctacataggtgctttgggcgtatgtaacattagtgtccttccttgaagccacaagctagttttcttagttttaaaatcctgttgtatgaatggcatttgtatattaaaacacttttttaaaggacagttgaaaagggcaagaggaaaccagggcagttctagaggagtgctggtgactggatagcagttttaagtggcgttcacctagtcaacacgaccgcgtgtgttgcccctgccctgggctccccgccatgacatcttcaccttgcagcttgtgctgagactgacccaagtgcagctagcactgggacacagatccttgtcttcagcaccttccaaggagccaacttttattccctttcctctctcccctccccacctcgcttcttcccaatttagtaacttagatgcttccagcacatacgtaggtagctaccccagccggtttggattacaggcctgtgctggaacatcatctcagttggccaccttcctggcaggctgtagacctgacattttgagacaagcctagagtcaggagcagggactttgactcttaggaagagcacacatgagggcaaggctgctggcagacgtctccattgtccttatgttgtctgtgttgtatttttttttttttattgaccatggtgattatttttttaaaccatcgttaatatactgaagtgagctatagcacatatcatgtgcttagtttgtttatttttctccatctccccttggcttcctagagtttggacatattccaggctaaatgcttttactcaagactacagaaaggtttgaagtagtgtgtgcatggcatgcacgtatgtaagtaatctggggaagaagcaaagatctgtttcattcttagcctcaggcctcatgagggtctccacagggccggagctcaggttacaccactccttcgtccttacaggagatgtagggagaagaatctgcaggctgcttgtaggactgttcaccaagggggataccagcagcaagagagtgcacccgtttagccctggaccctgtttcttactgtgtgacttggctagagttgggagttcccccaaaataaacgtgtccccattttaccagaaccaaacctcaacacagcgaagctgtactgtctttgtgtggcaaagatgttcccttgtaggcccctttcaggtaaccgtcttcacaatgtattttcatcacagtttaaggagcatcagccgcttctcaagtgggtagggaaagcagaaaaacgtacgcaagaggacatggatccaaaatgatgatgaagcatctcccatggggaggtgatggtggggagatgatgggctaaacaggcaacttttcaaaaacacagctatcatagaaaagaaacttgcctcatgtaaactggattgagaaattctcagtgattctgcaatggatttttttttaatgcagaagtaatgtatactctagtattctggtgtttttatatttatgtaataatttcttaaaaccattcagacagataactatttaattttttttaagaaagttggaaaggtctctcctcccaaggacagtggctggaagagttggggcacagccagttctgaatgttggtggagggtgtagtggctttttggctcagcatccagaaacaccaaaccaggctggctaaacaagtggccgcgtgtaaaaacagacagctctgagtcaaatctgggcccttccacaagggtcctctgaaccaagccccactcccttgctaggggtgaaagcattacagagagatggagccatctatccaagaagccttcactcaccttcactgctgctgttgcaactcggctgttctggactctgatgtgtgtggagggatggggaatagaacattgactgtgttgattaccttcactattcggccagcctgaccttttaataactttgtaaaaagcatgtatgtatttatagtgttttagatttttctaacttttatatcttaaaagcagagcacctgtttaagcattgtacccctattgttaaagatttgtgtcctctcattccctctcttcctcttgtaagtgcccttctaataaacttttcatggaaaagctcctgtgccaggagctcagtctgaaaaaaaaaaaaaaaaaaaaaaaaa

SEQ ID NO: 2786 - DNA, 7012 bp, Homo Sapiens
  NM_005903
ccgggtcctgggcgagcgggcgccgtgcgcgtgtcccgcggccgagctgctaataaagttgcagcgaggagaagcgcagcgacggcgtcgggagagcgcgcctagccggctcgcgaaaaggaagctgttgaagttattgaagtacctgttgctatattctaagaaattaaaatgtccagaaatctgcctctgacttgacccaatgaaagaagcatatggcacttgtgaagataaatgttactcctccctttttaattggaacttctgcttaggacctgtgtatgacgtttcacctgtgatctgttctttcggtagccactgactttgagttacaggaaggtctccgaagatttgtgtcaaatgacgtcaatggccagcttgttttcttttactagtccagcagtaaagcgattgttgggctggaaacaaggtgatgaggaggagaaatgggcagaaaaggcagttgatgctttggtgaagaaactaaaaaagaaaaagggtgccatggaggaactggagaaagccttgagcagtccaggacagccgagtaaatgtgtcactattcccagatctttagatggacgcctgcaggtttctcacagaaaaggcttaccccatgttatatattgtcgtgtttggcgctggccggatttgcagagtcatcatgagctaaagccgttggatatttgtgaatttccttttggatctaagcaaaaagaagtttgtatcaacccataccactataagagagtggagagtccagtcttacctccagtattagtgcctcgtcataatgaattcaatccacaacacagccttctggttcagtttaggaacctgagccacaatgaaccacacatgccacaaaatgccacgtttccagattctttccaccagcccaacaacactccttttcccttatctccaaacagcccttatcccccttctcctgctagcagcacatatcccaactccccagcaagttctggaccaggaagtccatttcagctcccagctgatacgcctcctcctgcctatatgccacctgatgatcagatgggtcaagataattcccagcctatggatacaagcaataatatgattcctcagattatgcccagtatatccagcagggatgttcagcctgttgcctatgaagagcctaaacattggtgttcaatagtctactatgaattaaacaatcgtgttggagaagcttttcatgcatcttctactagtgtgttagtagatggattcacagatccttcaaataacaaaagtagattctgcttgggtttgttgtcaaatgttaatcgtaattcgacaattgaaaacactaggcgacatattggaaaaggtgttcatctgtactatgttggtggagaggtgtatgcggaatgcctcagtgacagcagcatatttgtacagagtaggaactgcaactttcatcatggctttcatcccaccactgtctgtaagattcccagcagctgcagcctcaaaatttttaacaatcaggagtttgctcagcttctggctcaatctgtcaaccatgggtttgaggcagtatatgagctcaccaaaatgtgtaccattcggatgagttttgtcaagggttggggagcagaatatcaccggcaggatgtaaccagcaccccatgttggattgagattcatcttcatgggcctcttcagtggctggataaagtccttactcagatgggctcccctctgaaccccatatcttctgtttcataatgcagaagtattcttttcaattatattgttagtggacttgttttaattttagagaaactttgagtacagatactgtgagcttacattgaaaacagatattacagcttatttttttctacataattgtgaccaatacatttgtattttgtgatgaatctacatttgtttgtattcatgttcatgtgattaactcttagaagtgttgtaaaagatgcagagtaagtattatgccccagttcagaaatttggcattgatcttaaactggaacatgcttttactttattgccctaacaattttttattaaatttatttgaaaatgcatcacatgatgaaaaattatagtagcttataagagggcatatacagtgaagagtaagttttccctcctactctcgatcttccagaagctgtacttttaccagtttctttgtcccaccaacttaaaaaaaaaaagtacaattcattgttttgcaaaagtgtatggtaggggcttaaaagaaactataaagttttatttgaatgaacactatgcactgctgtaactggtagtgttcagtaaaagcaaaatgatagttttctagatgacataaaatttacatttaatacagataagtgttcttcagtgtaatgtgacttcatgctatatatcttttgtaagacatttccttttttaaaaaaatttttgcaaataactgatctcaagtatatgtcatttactcaaaatctgtcataagcattactttatagctagtgacagtgcatgcacagccttgttcaactatgtttgctgcttttggacaatgttgcaagaactctatttttgacatgcattaatcttttattttgcacttttatgggtgacagtttttagcataacctttgataaaatacactcaagtgacttggacttagatgcttatccttacgtccttggtaccttttttgtattaacaaacactgcaatttatagattacatttgtaggaagttatgcttttttctggtttttgttttactttcaacctaggttataagactgttattctatagctccaacttaaggtgcctttttaattccctacagttttatgggtgttatcagtgctggagaatcatgtagttaatcccattgctcttacaagtgtcagcttacttgtatcagcctccctacgcaaggacctatgcactggagccgtaggaggctcttcagttgggccccaaggataaggctactgatttgatactaaatgaatcagcagtggatgtagggatagctgattttaaaacactcggctgggcacagtggctcacacctgtaatcccagcactttgggaggctgaggcaggcagatcatgatgtcaggagtttgagaccagcctggccaatatggtgaaaccctgtctctacaaaaaatacaaaaattagctgggcatggtggtgcgtgcctgaagtcccagctactcgggaagctgaggcagaagaatcacttgaacctgggaggcggaggttgtggtgagccgagatcgcaccactgcactccagcctgggcgacagagcgagactctgcctcaaaaaacaaaacaaaacaaaacactcacccatcaacgaatatagactcttctctcatttatcgatgatcctctttttccattttttaagtacttatgtggaagctagtctcccaaaacacaatctttagagagaaaagacatgaacgaactccaaaatatccatttaatcaatcatgtttttggctttggataaagaactttgaaccagtttttttctcaggagctgtcaaatggacacttaattatgacatgagaatgaagaaattattttggaaaaaaaaaatgacctaatttacctatcagtgaaagctttattttctggtgccttttgaaagtatatggagtcatatcattcttctgtttaaaatgttagtttggtttgactttccactttgtcctttctgctcttgtgaagaaaaaaaaaagcattttcgaggaaagaattatgcaatttcttttgttttctgtgtcattatttattgctttttcaatgtgcagccagtggatggttttagttctttcagatgaactgccatttgtgtttcagctcacagttctttgctgggtaaaagaaatactttctgacagtcacctgagccttaaatgtaagtattacatgacatgcattctgtttcttccagagttctgtctgccacacgaaagagaatatttgcttacttgatagaactttggcattttcatcattcttttacttaaccaggcttatggcatgatctctggaacaaatttgtaggaaaaaattactccaattgaatgactgatgtatgtaatcaacttcattgggctgcagtaaactagtggaaattagagagttgttttattggtgttttctactgtgagttaattaaaaattgtttttatttggggtcattatgtcacagtcttgagttaacaagatcttacgtgattggccttttctttgttttctcttaggagttgtgtctcatgaatgacagtactaaagctattaacaactaagagtttgacagagaactataagcctgttgtatctcctaaaagttgtcaactccccacccttggactttaaatgaaaattttattcagtccagctattcttacagtccctaaggattttcatatatctatgtataggagataaaatttgctagtaagatttttaaaaactggctagtgaaaggaaagtacctctgaaagaaaccattttagcaaattatggttatatgttttaatttaatctacagaatgttttatagtaaaattctagcaccactagaataatcacatagcatgtacaatatatttatgctggctgaaaagacagaatctgggaataataaaattgcaaccagtttggtaatgcaaacagcagaatagaatgaaatctcagtaatgaattaaagcaacaaaaagatattgattggcaaaaagcaagatataagagattcatttgcttaacatttctacataatatttatggtctggtcagtattggtctggtcagtattgcctggctgacgtgaaatgtaaactagtaggcgtgttattgatctgctaaaactaaccctctttttaagaggagatttaaggaagacgtcaatcaaaatgtcaaatatgtgtgtcagaatataaataatttttcacattgtattgttgctatataaaaaaaataatagaattggttgggtttctgaggtgaaatccagagtaagagtactagacagttcaacaagccacatctaatggcacagatagaggatgtagctattttatacctttcataacatttgagagtaagatatccttcaggatgtgaagtgattattaagtactcatacctgaaatctgttgtcaagattagaactggggttcatgttaaaaaccttccatattacctgagggtacctgtggggaacagttccttcccctgtgtggtagtattttgttggaagagaatgtttatacaaaaaatgaaattcttccaacagcagagaaactctaaaaagtttgatagtacctatcaaagtgctgtacttctgtgatagagaacatctgatgtaccaatttagatctatttctttatactttttctaatcaattgcttaatagtactttggatgattatcacctttgccacttaaaatatataaatatcctttttacttcatgaggaaggaagaattttttgataattactgagttcagccttttgtgatgacttatattttggacttacattttaactttaaagaatgtcagatcccttctttgtcttactagttaaatcctcacctaatctcttgggtatgaatataaatgtgtgtcatcgttatattgttcagctagatgagcaagtatcttagggtagtaggtagcctggtggttttagaagtgtttggtgatttttatggagagagttttcctaagtggtggtttataggtggtatcagatattattagggcagctttttggggagtaatctcaggtctcccagagcagcagcatttttctcattgatataagtaagattcttaggagcttttcttatcacacaagatgcctgaatcgaatgtgagaattgaaggcatttcttctgcataaacaaagaattctacctgctggacagaaacctggaaagttctttggaattcgctgaattacagtttagtatgtcctgattacagagtgacaatatttatcaagcctttgttatattggattatcttctctcttaaaatacaactgtattataattgaaatgacagcccaaaattggatggtttaccaaaaccaatgaaagggatttcacacatcaatttttatttctgttttgaagagcacatgctatataataattgctagtagcaactgcagtaaaacaggtgataagttattttctctgaaaagatccagtcctagagcaggattcttcgatcattcatggcagagtgaaaaaggtttgtatggttcttgtccaaataactcagttcttaaaattcttaaaatgatcgtaaaccattatcctttaaaggtttatttgaagatgctgttaaagtacagaattttgtgtacaggtagatttttccgtccctcattaatagtgccttcttaattaatacagactggtgttagctataacaaaactccagtaaggccaaagaatcccaagttctttgtggaaaaaaaaaaaaaatcttttagggtcagattttcccttctaatatcattgaagatgatgttgcattgatttattcataaagtattttaactataggaactctagaagataatggttaggcaagtgattttttttttaaatatggttggcgtaagttgtattttgaaattcacttattttaaaatcgaagaggattgtaatcatggaaatagaatgtttgtatctacctgcccacattttcttaaaaagatatttcatatacagataatgaagaccaagctagtggctgcactgtaggtctgctgcttatttgtatttgttgtgcttctgtttatgttgtagaagctgaaattctagcaacatgcttcaattctgttattttgatacttatgaaaatgtattaggttttactatattgtgcttttgaaagccataactcttaagaactttgtttttgcatattgtttgctaattctttactttaataaacctcaaaacctgc

SEQ ID NO: 2787 - DNA, 3088 bp, Homo Sapiens
  NM_005904
cggagagccgcgcagggcgcgggccgcgcggggtggggcagccggagcgcaggcccccgatccccggcgggcgcccccgggcccccgcgcgcgccccggcctccgggagactggcgcatgccacggagcgcccctcgggccgccgccgctcctgcccgggcccctgctgctgctgctgtcgcctgcgcctgctgccccaactcggcgcccgacttcttcatggtgtgcggaggtcatgttcgctccttagcaggcaaacgacttttctcctcgcctcctcgccccgcatgttcaggaccaaacgatctgcgctcgtccggcgtctctggaggagccgtgcgcccggcggcgaggacgaggaggagggcgcagggggaggtggaggaggaggcgagctgcggggagaaggggcgacggacagccgagcgcatggggccggtggcggcggcccgggcagggctggatgctgcctgggcaaggcggtgcgaggtgccaaaggtcaccaccatccccacccgccagccgcgggcgccggcgcggccgggggcgccgaggcggatctgaaggcgctcacgcactcggtgctcaagaaactgaaggagcggcagctggagctgctgctccaggccgtggagtcccgcggcgggacgcgcaccgcgtgcctcctgctgcccggccgcctggactgcaggctgggcccgggggcgcccgccggcgcgcagcctgcgcagccgccctcgtcctactcgctccccctcctgctgtgcaaagtgttcaggtggccggatctcaggcattcctcggaagtcaagaggctgtgttgctgtgaatcttacgggaagatcaaccccgagctggtgtgctgcaacccccatcaccttagccgactctgcgaactagagtctcccccccctccttactccagatacccgatggattttctcaaaccaactgcagactgtccagatgctgtgccttcctccgctgaaacagggggaacgaattatctggcccctggggggctttcagattcccaacttcttctggagcctggggatcggtcacactggtgcgtggtggcatactgggaggagaagacgagagtggggaggctctactgtgtccaggagccctctctggatatcttctatgatctacctcaggggaatggcttttgcctcggacagctcaattcggacaacaagagtcagctggtgcagaaggtgcggagcaaaatcggctgcggcatccagctgacgcgggaggtggatggtgtgtgggtgtacaaccgcagcagttaccccatcttcatcaagtccgccacactggacaacccggactccaggacgctgttggtacacaaggtgttccccggtttctccatcaaggctttcgactacgagaaggcgtacagcctgcagcggcccaatgaccacgagtttatgcagcagccgtggacgggctttaccgtgcagatcagctttgtgaagggctggggccagtgctacacccgccagttcatcagcagctgcccgtgctggctagaggtcatcttcaacagccggtagccgcgtgcggaggggacagagcgtgagctgagcaggccacacttcaaactactttgctgctaatattttcctcctgagtgcttgcttttcatgcaaactctttggtcgttttttttttgtttgttggttggttttcttcttctcgtcctcgtttgtgttctgttttgtttcgctctttgagaaatagcttatgaaaagaattgttgggggtttttttggaagaaggggcaggtatgatcggcaggacaccctgataggaagaggggaagcagaaatccaagcaccaccaaacacagtgtatgaaggggggcggtcatcatttcacttgtcaggagtgtgtgtgagtgtgagtgtgcggctgtgtgtgcacgcgtgtgcaggagcggcagatggggagacaacgtgctctttgttttgtgtctcttatggatgtccccagcagagaggtttgcagtcccaagcggtgtctctcctgccccttggacacgctcagtggggcagaggcagtacctgggcaagctggcggctggggtcccagcagctgccaggagcacggctctgtccccagcctgggaaagcccctgcccctcctctccctcatcaaggacacgggcctgtccacaggcttctgagcagcgagcctgctagtggccgaaccagaaccaattattttcatccttgtcttattcccttcctgccagcccctgccattgtagcgtctttcttttttggccatctgctcctggatctccctgagatgggcttcccaagggctgccggggcagccccctcacagtattgctcacccagtgccctctcccctcagcctctcccctgcctgccctggtgacatcaggtttttcccggacttagaaaaccagctcagcactgcctgctcccatcctgtgtgttaagctctgctattaggccagcaagcggggatgtccctgggagggacatgcttagcagtccccttccctccaagaaggatttggtccgtcataacccaaggtaccatcctaggctgacacctaactcttctttcatttcttctacaactcatacactcgtatgatacttcgacactgttcttagctcaatgagcatgtttagactttaacataagctatttttctaactacaaaggtttaaatgaacaagagaagcattctcattggaaatttagcattgtagtgctttgagagagaaaggactcctgaaaaaaaacctgagatttattaaagaaaaaaatgtattttatgttatatataaatatattattacttgtaaatataaagacgttttataagcatcattatttatgtattgtgcaatgtgtataaacaagaaaaataaagaaaagatgcactttgctttaatataaatgcaaataacaaatgccaaattaaaaaagataaacacaagattggtgtttttttctatgggtgttatcacctagctgaatgtttttctaaaggagtttatgttccattaaacgatttttaaaatgtacacttgaa

SEQ ID NO: 2788 - DNA, 4139 bp, Homo Sapiens
  NM_005907
agtgctcgcggggccgcggcggagtgtaccgtgctgctctactcgctgccattcgcccgcaggtcggcgcgctcgcccacctgagccgcgccggggctgcgggaccgtgggacagcgcgctcagcccagcctaggaaagaggcagcagtctcagcgcggagatggggagcgggcgaagttgacgagtctcccgcccacgctgcgcccctcctgcccagaggggctgcagccagcggtctgtcgcgcgtgcctgtgtgcccgaggagccgccccggggagaagacccggcgcggagttgttcccccagggaggatccgcagcccagccgagggggtcgggcggcctggctacgcaggacccagccccgcagccgcggactcccagcggcggcgaagtttggctgctgagcggcgcggcgccggaccactggacagcgggagcgatgcccgtggggggcctgttgccgctcttcagcagccccgcgggcggcgtcctgggcggggggctcggcggcggcggtggcaggaaggggtcgggccccgccgccctccgcctgacggagaagttcgtgctgctgctggtattcagcgccttcatcacgctctgcttcggggcgatcttcttcctgccagactcctccaagctgctcagcggggtcctgttccactccagccccgccttgcagccggccgccgaccacaagcccgggcccggggcgcgcgccgaggacgcggccgaggggcgagcccggcgccgcgaggagggggcacccggggacccggaggccgccctggaggacaacttggccaggatccgcgaaaaccacgagcgggctctcagggaagccaaggagaccctgcagaagctgcccgaggagatccaaagagacatcctactggagaagaagaaggtggcccaggaccagctgcgtgacaaggcgccgttcagaggcctgcccccggtggacttcgtgcccccaatcggggtggagagccgggagcccgccgacgccgccatccgcgagaaaagggcaaagatcaaagagatgatgaaacatgcttggaataattataaaggttatgcctggggattaaatgaactcaaacctatatcaaaaggaggccattcaagcagtttgtttggtaacatcaaaggagcaactatagtagatgccctggatacactttttattatggaaatgaaacatgaatttgaagaagcaaaatcatgggttgaagaaaatttagattttaatgtgaatgctgaaatttctgtctttgaagtaaatatacgctttgttggtggactactctcagcctactatctgtctggagaagagatttttcgaaagaaagcagtggaacttggggtaaaattgctacctgcatttcatactccctctggaataccttgggcattgctgaatatgaaaagtggtattggaaggaactggccctgggcctctggaggcagcagtattctggcagaatttggaaccctgcatttggagtttatgcacttgagccacttatcaggaaaccccatctttgctgaaaaggtaatgaatattcgaacagtactgaacaaactggaaaaaccacaaggcctttatcctaactatctgaatcccagtagtggacagtggggtcaacatcatgtatcagttggaggacttggagacagcttctatgagtatttgctgaaggcctggttaatgtctgacaagacagatctggaagctaagaagatgtattttgatgctgttcaggctatcgagactcatttgatccgcaagtctagcagcggactaacttatatcgcagagtggaaagggggcctcctggagcacaagatgggccacctgacctgcttcgcggggggcatgttcgcactcggggctgatgcagctcccgaaggcatggcccaacactaccttgaactcggggctgaaattgcccgtacttgtcatgaatcatataatcgaacatttatgaaactgggaccagaagctttcagatttgatggtggtgttgaagccatcgctacaagacaaaatgaaaaatactacatcttacggccagaagttatggagacttacatgtatatgtggagactgactcatgatccaaagtacaggaaatgggcctgggaagccgtagaggccttggaaaaccattgcagagtgaatggaggctattcaggcctaagggatgtttaccttcttcatgagagttatgatgatgtgcagcagagtttcttcctggcagagacattgaaatatttgtacctaatattttctgacgacgatcttcttccactggagcattggatcttcaatagcgaggcacatcttctccctatcctccctaaagataaaaaggaagttgaaatcagagaggaataaaaagacattttatattttattctgctccattcccttcactgtataccttaataattccttttctggtaatcaggcacatgatgaactttgattagtaggtctgtgattaagttcttaaattgttttgcagtcttttatgtttattatcataggtataggtggacctaaattccttatcatatcctttattaattcagccagtgtatccaccagttttttgtttatgtttttaagtaacctattatctctggatttcatgaaggtgtaatatcgtttttgttaaactgaatagaattgtatagcgatgacctcttaattataatttgatttgactgcaaaactttttcctcctctaagaggagatgatgtctgctttaagctgtaatgttttgccatgttgcaaaaagccataataataagtataaaaaagctttttcctttacaatttcatgttaatctggtttgtctgtccaccagagacagatcttctgtgacagcctccttatgcaggtctatcattatttgatagaatgtcttctaaaatacttcactcacattgtaattcaaattagaaagtcattccaaaaggatcatgtcatgttgacctcatttcatcggaactgcagtatatttttgttggttaattatattagtgttttctattttgtaaatgtgtcctttaattttactttaaatgccctgtgtcatttctggattatatactagttaatttcttccattccctactacacagagaggtgagctttcaaattttgcagagctctgctatcactgaattacatttatctgaagaaaatagtacaacttaatggattagcttttgggtttaactgaatatatgaagaaattgggtctgtctaaagagagggtatttcatatggcttttagttcacttgtttgtatttcatcttgatttttttctttggaaaataaagcattctatttggttcagatttctcagatttgaaaaaggctctatctcagatgtagtaaattatttcctttcagtttgtgaaagcaggatttgactctgaaagaagctttgccaattttacttattcgtgatcaatcaaggaaaatctaataaattttaggccaaataagaatatagcatatttagtatggttatagtcaacacagagatcacaacttagaagaaatataaagaaatggccactccccatcccccacagtcctggagtaaatcaaaatcaatatatgattcttttaaacattaagtttgaaataggaatggttttctcaagaatagatttggtgtgataccttgtgtttgcttacattggcccactatatatacatatatatttatgtagatatacttccatgaaagggctaatacgatgcatatactgaagggcaaggactttgaccatgtcaattttcagccgagaatggtcagaaagatcagtacaaccccatggattaggctgaaacatatgaaattgctgcatttgtagtttaaaaactgtcagcagtttcatatggttccacctaatattattgaagacaattattttcttagctatcaataggcttaatagttttagttattttagcttttgaaagtgttttaaaagatttcctttatcggacaggaccatctttatgacctgctttctgtttttcaatatcatacattggtgtatgtcaaagaataaattagtaaaattagtaaaaaaaaaaaaaaaaaaaa

SEQ ID NO: 2789 - DNA, 2821 bp, Homo Sapiens
  NM_005916
cgccccttcccagccccaagggtctaggatacagtctttgtagatgagcgggtcccccttggaggacagaatgaagaattgggaaatcatggccgttctggagagtagacaagaagacggcgaaagtcgggcctgccccgccctgcggccccggaacaaaagaacgcgtgtgcgctggccctttaagagcgattctcctccgcccgcgccagctcggaccgcgggaaacccggcgcctgcactaccccgcccggagattcccttccgacgcccgcaccgcctccccgtcactcattctaggcccgcacggtgattggcttgcggctagcgggaggtgaagaaggccgccttgtccgattggcccgcacgcagtggcgccggtcacgtggggggcgacgtttcgcgccaatttcggttggccggccacagtccaccgcgcggagattctcagcttccccaggagcaagacctctgagcccgccaagcgcggccgcacggccctcggcagcgatggcactgaaggactacgcgctagagaaggaaaaggttaagaagttcttacaagagttctaccaggatgatgaactcgggaagaagcagttcaagtatgggaaccagttggttcggctggctcatcgggaacaggtggctctgtatgtggacctggacgacgtagccgaggatgaccccgagttggtggactcaatttgtgagaatgccaggcgctacgcgaagctctttgctgatgccgtacaagagctgctgcctcagtacaaggagagggaagtggtaaataaagatgtcctggacgtttacattgagcatcggctaatgatggagcagcggagtcgggaccctgggatggtccgaagcccccagaaccagtaccctgctgaactcatgcgcagatttgagctgtattttcaaggccctagcagcaacaagcctcgtgtgatccgggaagtgcgggctgactctgtggggaagttggtaactgtgcgtggaatcgtcactcgtgtctctgaagtcaaacccaagatggtggtggccacttacacttgtgaccagtgtggggcagagacctaccagccgatccagtctcccactttcatgcctctgatcatgtgcccaagccaggagtgccaaaccaaccgctcaggagggcggctgtatctgcagacacggggctccagattcatcaaattccaggagatgaagatgcaagaacatagtgatcaggtgcctgtgggaaatatccctcgtagtatcacggtgctggtagaaggagagaacacaaggattgcccagcctggagaccacgtcagcgtcactggtattttcttgccaatcctgcgcactgggttccgacaggtggtacagggtttactctcagaaacctacctggaagcccatcggattgtgaagatgaacaagagtgaggatgatgagtctggggctggagagctcaccagggaggagctgaggcaaattgcagaggaggatttctacgaaaagctggcagcttcaatcgccccagaaatatacgggcatgaagatgtgaagaaggcactgctgctcctgctagtcgggggtgtggaccagtctcctcgaggcatgaaaatccggggcaacatcaacatctgtctgatgggggatcctggtgtggccaagtctcagctcctgtcatacattgatcgactggcgcctcgcagccagtacacaacaggccggggctcctcaggagtggggcttacggcagctgtgctgagagactccgtgagtggagaactgaccttagagggtggggccctggtgctggctgaccagggtgtgtgctgcattgatgagttcgacaagatggctgaggccgaccgcacagccatccacgaggtcatggagcagcagaccatctccattgccaaggccggcattctcaccacactcaatgcccgctgctccatcctggctgccgccaaccctgcctacgggcgctacaaccctcgccgcagcctggagcagaacatacagctacctgctgcactgctctcccggtttgacctcctctggctgattcaggaccggcccgaccgagacaatgacctacggttggcccagcacatcacctatgtgcaccagcacagccggcagcccccctcccagtttgaacctctggacatgaagctcatgaggcgttacatagccatgtgccgcgagaagcagcccatggtgccagagtctctggctgactacatcacagcagcatacgtggagatgaggcgagaggcttgggctagtaaggatgccacctatacttctgcccggaccctgctggctatcctgcgcctttccactgctctggcacgtctgagaatggtggatgtggtggagaaagaagatgtgaatgaagccatcaggctaatggagatgtcaaaggactctcttctaggagacaaggggcagacagctaggactcagagaccagcagatgtgatatttgccaccgtccgtgaactggtctcagggggccgaagtgtccggttctctgaggcagagcagcgctgtgtatctcgtggcttcacacccgcccagttccaggcggctctggatgaatatgaggagctcaatgtctggcaggtcaatgcttcccggacacggatcacttttgtctgattccagcctgcttgcaaccctggggtcctcttgttccctgctggcctgccccttgggaaggggcagtgatgcctttgaggggaaggaggagcccctctttctcccatgctgcacttactccttttgctaataaaagtgtttgtagattgtc

SEQ ID NO: 2790 - DNA, 1665 bp, Homo Sapiens
  NM_005917
gcgcgtgggggtgatgtcgctaaggggtgattctcccctccctagagttacacacgctatctctcccgccaattgccgggctccatcaggcaggtcctttcctcctgagcccaaaccatccgtttgttgtcgtcctccaatcacaggggctcatcctcagggactactttgcaatcggcgcagagcgcagtgagaagagcttgaaaaaaacctctggtatcgggaagtgtagttcaacacttgaaggaaatgctttggagattgcgccacaaccagggcagcgtaaactacagttcccagagagcgccgcgtcgggagcggagccttttctcgctaacaccgctcgccctctccgagtcagttccgcggtagaggtgacctgactctctgaggctcattttgcagttgttgaaattgtccccgcagttttcaatcatgtctgaaccaatcagagtccttgtgactggagcagctggtcaaattgcatattcactgctgtacagtattggaaatggatctgtctttggtaaagatcagcctataattcttgtgctgttggatatcacccccatgatgggtgtcctggacggtgtcctaatggaactgcaagactgtgcccttcccctcctgaaagatgtcatcgcaacagataaagaagacgttgccttcaaagacctggatgtggccattcttgtgggctccatgccaagaagggaaggcatggagagaaaagatttactgaaagcaaatgtgaaaatcttcaaatcccagggtgcagccttagataaatacgccaagaagtcagttaaggttattgttgtgggtaatccagccaataccaactgcctgactgcttccaagtcagctccatccatccccaaggagaacttcagttgcttgactcgtttggatcacaaccgagctaaagctcaaattgctcttaaacttggtgtgactgctaatgatgtaaagaatgtcattatctggggaaaccattcctcgactcagtatccagatgtcaaccatgccaaggtgaaattgcaaggaaaggaagttggtgtttatgaagctctgaaagatgacagctggctcaagggagaatttgtcacgactgtgcagcagcgtggcgctgctgtcatcaaggctcgaaaactatccagtgccatgtctgctgcaaaagccatctgtgaccacgtcagggacatctggtttggaaccccagagggagagtttgtgtccatgggtgttatctctgatggcaactcctatggtgttcctgatgatctgctctactcattccctgttgtaatcaagaataagacctggaagtttgttgaaggtctccctattaatgatttctcacgtgagaagatggatcttactgcaaaggaactgacagaagaaaaagaaagtgcttttgaatttctttcctctgcctgactagacaatgatgttactaaatgcttcaaagctgaagaatctaaatgtcgtctttgactcaagtaccaaataataataatgctatacttaaattacttgtgaaaaacaacacattttaaagattacgtgcttcttggtacaggtttgtgaatgacagtttatcgtcatgctgttagtgtgcattctaaataaatatatattcaaatgaaaaaaaaaaaaaaaaaa

SEQ ID NO: 2791 - DNA, 1321 bp, Homo Sapiens
  NM_005918
ggcgctgggcagtgtggaggtcgttggagtcacttccgcgtcaccagctcctgtgcctgccagtcggtgcccctcccgctccagccatgctctccgccctcgcccggcctgccagcgctgctctccgccgcagcttcagcacctcggcccagaacaatgctaaagtagctgtgctaggggcctctggaggcatcgggcagccactttcacttctcctgaagaacagccccttggtgagccgcctgaccctctatgatatcgcgcacacacccggagtggccgcagatctgagccacatcgagaccaaagccgctgtgaaaggctacctcggacctgaacagctgcctgactgcctgaaaggttgtgatgtggtagttattccggctggagtccccagaaagccaggcatgacccgggacgacctgttcaacaccaatgccacgattgtggccaccctgaccgctgcctgtgcccagcactgcccggaagccatgatctgcgtcattgccaatccggttaattccaccatccccatcacagcagaagttttcaagaagcatggagtgtacaaccccaacaaaatcttcggcgtgacgaccctggacatcgtcagagccaacacctttgttgcagagctgaagggtttggatccagctcgagtcaacgtccctgtcattggtggccatgctgggaagaccatcatccccctgatctctcagtgcacccccaaggtggactttccccaggaccagctgacagcactcactgggcggatccaggaggccggcacggaggtggtcaaggctaaagccggagcaggctctgccaccctctccatggcgtatgccggcgcccgctttgtcttctcccttgtggatgcaatgaatggaaaggaaggtgttgtggaatgttccttcgttaagtcacaggaaacggaatgtacctacttctccacaccgctgctgcttgggaaaaagggcatcgagaagaacctgggcatcggcaaagtctcctcttttgaggagaagatgatctcggatgccatccccgagctgaaggcctccatcaagaagggggaagatttcgtgaagaccctgaagtgagccgctgtgacgggtggccagtttccttaatttatgaaggcatcatgtcactgcaaagccgttgcagataaactttgtattttaatttgctttggtgatgattactgtattgacatcatcatgccttccaaattgtgggtggctctgtgggcgcatcaataaaagccgtccttgattttatttttcaaggtcccttctgtaaaaaaaaaaaaaaaaaa

SEQ ID NO: 2792 - DNA, 5888 bp, Homo Sapiens
  NM_005920
atatcaacaacagccgaggcggctcaggcgctcggccccggttccccgcttgcctgccgcccgcctgctggcccccgcgcccacgacgggggcccaggcctcacggcgccgcccagggcccgcgcggacgccggcctcatttattattctccccgcccggagctgcggcttcccggtgttgaagatcccccggaccaggggcgagggctacccgctctttgccgtgacaacaccgttcccccagccgggctggaggctgtgcagaaggtatcctgcagaccatgaactgagcactgttcccagaccgttcatgagcacagtgtaaggtgtgccgagacccaccacccagcgagcccctcccctccgtagcactgaggacccccggagaagatggggaggaaaaagattcagatccagcgaatcaccgacgagcggaaccgacaggtgactttcaccaagcggaagtttggcctgatgaagaaggcgtatgagctgagcgtgctatgtgactgcgagatcgcactcatcatcttcaaccactccaacaagctgttccagtacgccagcaccgacatggacaaggtgctgctcaagtacacggagtacaatgagccacacgagagccgcaccaacgccgacatcatcgagaccctgaggaagaagggcttcaatggctgcgacagccccgagcccgacggggaggactcgctggaacagagccccctgctggaggacaagtaccgacgcgccagcgaggagctcgacgggctcttccggcgctatgggtcaactgtcccggcccccaactttgccatgcctgtcacggtgcccgtgtccaatcagagctcactgcagttcagcaatcccagcggctccctggtcaccccttccctggtgacatcatccctcacggacccgcggctcctgtccccccagcagccagcactacagaggaacagtgtgtctcctggcctgccccagcggccagctagtgcgggggccatgctggggggtgacctgaacagtgctaacggagcctgccccagccctgttgggaatggctacgtcagtgctcgggcttcccctggcctcctccctgtggccaatggcaacagcctaaacaaggtcatccctgccaagtctccgcccccacctacccacagcacccagcttggagcccccagccgcaagcccgacctgcgagtcatcacttcccaggcaggaaaggggttaatgcatcacttgactgaggaccatttagatctgaacaatgcccagcgccttggggtctcccagtctactcattcgctcaccaccccagtggtttctgtggcaacgccgagtttactcagccagggcctccccttctcttccatgcccactgcctacaacacagattaccagttgaccagtgcagagctctcctccttaccagcctttagttcacctggggggctgtcgctaggcaatgtcactgcctggcaacagccacagcagccccagcagccgcagcagccacagcctccacagcagcagccaccgcagccacagcagccacagccacagcagcctcagcagccgcaacagccacctcagcaacagtcccacctggtccctgtatctctcagcaacctcatcccgggcagccccctgccccacgtgggtgctgccctcacagtcaccacccacccccacatcagcatcaagtcagaaccggtgtccccaagccgtgagcgcagccctgcgcctccccctccagctgtgttcccagctgcccgccctgagcctggcgatggtctcagcagcccagccgggggatcctatgagacgggagaccgggatgacggacggggggacttcgggcccacactgggcctgctgcgcccagccccagagcctgaggctgagggctcagctgtgaagaggatgcggcttgatacctggacattaaagtgacgattcccactcccctcctctcagcctccctgatgaagagttgacaatctcaccgcccgcccttccctgccccgggctcctcccgctcgacccccacttcctttcttgtgcttcgtgtcctgttgacggttacatttgtgtataattattatattattattattattattatattttttttaatttggattctcgctttggagagggggatgctctcatcccctctttctgtaccccccaccattttcactggctggggggctctctttttcgcgggaaggggggacactttgcacgttgtacacatatgctgcaggaagggggtggggggcccaataaggcctttgggaaaggacaggtgccgagccctgcatgtggagccctcccaccccacccccagatagagggaaataaccaaaaaactaccaaacaacagaaacccacactctagactgaaaccccaaagtgggcttgatgggtgggtttgtgtttcaaggggaaagtgaggcagaggttctgaaaagggtctctgtttttgtgttcatgtagccataggcacatggagcagaatacttaagcctggcccccaaatgcccctgcacacacacgtgccacacctgcgctgattcttgtgtgtgctgcacccccaaggtgtgtgggtgctggctgagctttgggccgggaaggcagcctgggaatctgaggctggagacaggggtttgaggtgggggcctctctggaagcacatttggagggaaagacaagagagccatgaggagagggctgaggagggcagaagggctaggcagggggcaaattgagcccctcccttccccagtttttctctaagatatacagtgcaatagctccccacccctcagttgacgccagccctgtaaagctggccacagtgtgcagggagaatggggagagggtcttcagtgaggtggctggggcgagagtcggcctggacttccctggggtgctccaggccagagctctttcattggggcgagtgtggtgaggggacgtccttggtcttgcacgcacactacctgggggagtcaacactgggatggtctgtggggtgggagggcctacggatgggtccgtagaggtcccacctccctcattcctccttggcccctctccctagcttctcctgttagctccttctgctcctgaccccacctccttgctcttggcgcccctattgtctctggctacctccttgtcccaccacctccaggctgcatcccaccttccctcttggctactgtaattgtaaatagcgacctttggaaaacgttagcggtgtaacagtccaggaaactgtttttttttgttgttgttgtattgatatgaaatgagattctatttttgtcaaagtatattgtaataataatgactcaaacggcccgtactgtacagacgagattcttctgctgttgttcttgctcccctcccctcctctgagtccgcccctccctgctgcctcctcagtggggcagtgggcaaggggcccaggggcagccgaagcacggggtcctgagacctcaggcaggattggagatcaaaccagagggggcaggcccccagcctgctctctaggatcaccccccgccctaaggggcctggcctggggtgacgtggccaggcagactgtctgccccactccttcacacaagcccagctcctctgcccaaggggtgcggcgcccccttggggtttcctcccagttggagagtagagttaagacaaggcccagttttgtgttagtcgaccgtctttgcccacctctatgacccagcctcttgcagtattcccatacttgatgcagggaaggaaccagaagcagaggggcctctacgcaggtacacacgtgtacctgagtgtgttcatgagggcatctggtgtttatgtgtctgagtgtagctttgtatttatgtgtgtgtgtgtgtgtatgtctgattgcacgggtgtacttttgtatttatgtgtgtgtgtggttgcacgggtgtgcctctgtgtgtctctgaccctggctgggtgtgtgtgcaaatctgtgtgactggagctctaggggcatctctgtgtctgagtgtgcctggtgtgtgtttacaaagggagagttggctgctccagctccacagccctgggaccccaactcctgtcttccctgctcctttccctgtgttcaccctcagctctgacacattgaactgcagttggggggattggcagttagccctctgtgcttctccctgcagccctacctctgccaaggtctctccctccagggacctctgcttccacccacatatgtccacttagtcacccacacttgacacagttcctggagtaccctcttcccccaaccccagacctgctttcagagcaaaactcaagtccctcttcctccgtgaagcttctccctcagctgagcagtgatcacttactcactcttaaccccaatccgctgactgggtggggacagcacgtccagccttcccacctctcctgcaggcttctagacggagtttcaaaaactgatgagcctcgatccagggcttgaaagaagccagggtgtaatcttgttcatgcatgcgtccccagagcctcgcccagtgcctggcacatagtaggcactcaataaatgctgaatgggtgaatagttgaatgataggtgctcaataaatgaatgaatggccttcccttctcaggctattcccaacattagtctgcccacctttctaggctgggcttggccaccattaaacacggggtgggggtgagggcccctgcaattcacggtgcaatattcaccagttttgccctctgcctcataaaggcaaacctggcttttgattaccatgtgtggatgtttcagtgtcctttcttctctgtccctggggatggggtggtctgtgaatatgtgacatttctgcagttcagtatccgaaggtttctcttgggggtaggggctcctgggcggccagatgaatgggtccctgggaacccagacctcagatgaggacttaatgtcttcttcctctcaagccaaattcgcctccacccactccctctgaagaactgggcatttgccaaagtaaccactggagtcatctaatggccctccccctccccaggtttcccacagctttcagggacagtgggcaagaggacacccccccccaccacctcagtggaacacaccattctccccccctcaacagcacactcagtgcagcaagactgacccctgaccccctcccagccctccctaccttggacaggaaggaagtaatgcaccttctcttgctgattatttatttgtttggagagacagaaatgtaaaagtgtatctagaaatatctatatctctatatatttttaactgactctttggaatcccctggggtggggtgaggggtaagtttaggctttcgcggaggggaggagacatggagcctgggaactccttgttctcccctctgctgcctctccccaccccttaaagcagttggtagaaggaatggtatttgtatggggggagggaggctggaatggagaatctggattctctcctcttccccattctccagagggagggaggtggtgaggaagaggaagggaggggcaggatgggccatggaggtgccccacccccacacctgacaatcacccacactcctggggctcttcctgggtcctggggcagggcgagtccaagtgtgaggctgttgatttgttttcaatatttcttttcgtgctgtatggtgatgctttcttagtattctacacaataagaaaagacaaagtcctcgagattcttatgagttttgtttgaaaactctttcactatatttgttgtaaagaggtttactattaaaagaaaaagaatacacgtttctgataaaaaaaaaaaaaaa

SEQ ID NO: 2793 - DNA, 5501 bp, Homo Sapiens
  NM_005922
aagatggccgcggcgcgcacggctcctgcggcggggtagaggcggaggcggagtcgagtcactcccgcacttcggggctccggtgccccgcgccaggctgcagcttactgcccgccgcggccatgcggggctccgtgcacggatgagagaagccgctgccgcgctggtccctcctcccgcctttgccgtcacgcctgccgccgccatggaggagccgccgccaccgccgccgccgccaccaccgccaccggaacccgagaccgagtcagaacccgagtgctgcttggcggcgaggcaagagggcacattgggagattcagcttgcaagagtcctgaatctgatctagaagacttctccgatgaaacaaatacagagaatctttatggtacctctccccccagcacacctcgacagatgaaacgcatgtcaaccaaacatcagaggaataatgtggggaggccagccagtcggtctaatttgaaagaaaaaatgaatgcaccaaatcagcctccacataaagacactggaaaaacagtggagaatgtggaagaatacagctataagcaggagaaaaagatccgagcagctcttagaacaacagagcgtgatcataaaaaaaatgtacagtgctcattcatgttagactcagtgggtggatctttgccaaaaaaatcaattccagatgtggatctcaataagccttacctcagccttggctgtagcaatgctaagcttccagtatctgtgcccatgcctatagccagacctgcacgccagacttctaggactgactgtccagcagatcgtttaaagttttttgaaactttacgacttttgctaaagcttacctcagtctcaaagaaaaaagacagggagcaaagaggacaagaaaatacgtctggtttctggcttaaccgatctaacgaactgatctggttagagctacaagcctggcatgcaggacggacaattaacgaccaggacttctttttatatacagcccgtcaagccatcccagatattattaatgaaatccttactttcaaagtcgactatgggagcttcgcctttgttagagatagagctggttttaatggtacttcagtagaagggcagtgcaaagccactcctggaacaaagattgtaggttactcaacacatcatgagcatctccaacgccagagggtctcatttgagcaggtaaaacggataatggagctgctagagtacatagaagcactttatccatcattgcaggctcttcagaaggactatgaaaaatatgctgcaaaagacttccaggacagggtgcaggcactctgtttgtggttaaacatcacaaaagacttaaatcagaaattaaggattatgggcactgttttgggcatcaagaatttatcagacattggctggccagtgtttgaaatcccttcccctcgaccatccaaaggtaatgagccggagtatgagggtgatgacacagaaggagaattaaaggagttggaaagtagtacggatgagagtgaagaagaacaaatctctgatcctagggtaccggaaatcagacagcccatagataacagcttcgacatccagtcgcgggactgcatatccaagaagcttgagaggctcgaatctgaggatgattctcttggctggggagcaccagactggagcacagaagcaggctttagtagacattgtctgacttctatttatagaccatttgtagacaaagcactgaagcagatggggttaagaaagttaattttaagacttcacaagctaatggatggttccttgcaaagggcacgtatagcattggtaaagaacgatcgtccagtggagttttctgaatttccagatcccatgtggggttcagattatgtgcagttgtcaaggacaccaccttcatctgaggagaaatgcagtgctgtgtcgtgggaggagctgaaggccatggatttaccttcattcgaacctgccttcctagttctctgccgagtccttctgaatgtcatacatgagtgtctgaagttaagattggagcagagacctgctggagaaccatctctcttgagtattaagcagctggtgagagagtgtaaggaggtcctgaagggcggcctgctgatgaagcagtactaccagttcatgctgcaggaggttctggaggacttggagaagcccgactgcaacattgacgcttttgaagaggatctacataaaatgcttatggtgtattttgattacatgagaagctggatccaaatgctacagcaattacctcaagcatcgcatagtttaaaaaatctgttagaagaagaatggaatttcaccaaagaaataactcattacatacggggaggagaagcacaggccgggaagcttttctgtgacattgcaggaatgctgctgaaatctacaggaagttttttagaatttggcttacaggagagctgtgctgaattttggactagtgcggatgacagcagtgcttccgacgaaatcaggaggtctgttatagagatcagtcgagccctgaaggagctcttccatgaagccagagaaagggcttccaaagcacttggatttgctaaaatgttgagaaaggacctggaaatagcagcagaattcaggctttcagccccagttagagacctcctggatgttctgaaatcaaaacagtatgtcaaggtgcaaattcctgggttagaaaacttgcaaatgtttgttccagacactcttgctgaggagaagagtattattttgcagttactcaatgcagctgcaggaaaggactgttcaaaagattcagatgacgtactcatcgatgcctatctgcttctgaccaagcacggtgatcgagcccgtgattcagaggacagctggggcacctgggaggcacagcctgtcaaagtcgtgcctcaggtggagactgttgacaccctgagaagcatgcaggtggataatcttttactagttgtcatgcagtctgcgcatctcacaattcagagaaaagctttccagcagtccattgagggacttatgactctgtgccaggagcagacatccagtcagccggtcatcgccaaagctttgcagcagctgaagaatgatgcattggagctatgcaacaggataagcaatgccattgaccgcgtggaccacatgttcacatcagaatttgatgctgaggttgatgaatctgaatctgtcaccttgcaacagtactaccgagaagcaatgattcaggggtacaattttggatttgagtatcataaagaagttgttcgtttgatgtctggggagtttagacagaagataggagacaaatatataagctttgcccggaagtggatgaattatgtcctgactaaatgtgagagtggtagaggtacaagacccaggtgggcgactcaaggatttgattttctacaagcaattgaacctgcctttatttcagctttaccagaagatgacttcttgagtttacaagccttgatgaatgaatgcattggccatgtcataggaaaaccacacagtcctgttacaggtttgtaccttgccattcatcggaacagcccccgtcctatgaaggtacctcgatgccatagtgaccctcctaacccacacctcattatccccactccagagggattcagcactcggagcatgccttccgacgcgcggagccatggcagccctgctgctgctgctgctgctgctgctgctgctgttgctgccagtcggcccagcccctctggtggtgactctgtgctgcccaaatccatcagcagtgcccatgataccaggggttccagcgttcctgaaaatgatcgattggcttccatagctgctgaattgcagtttaggtccctgagtcgtcactcaagccccacggaggagcgagatgaaccagcatatccaagaggagattcaagtgggtccacaagaagaagttgggaacttcggacactaatcagccagagtaaagatactgcttctaaactaggacccatagaagctatccagaagtcagtccgattgtttgaagaaaagaggtaccgagaaatgaggagaaagaatatcattggtcaagtttgtgatacgcctaagtcctatgataatgttatgcacgttggcttgaggaaggtgaccttcaaatggcaaagaggaaacaaaattggagaaggccagtatgggaaggtgtacacctgcatcagcgtcgacaccggggagctgatggccatgaaagagattcgatttcaacctaatgaccataagactatcaaggaaactgcagacgaattgaaaatattcgaaggcatcaaacaccccaatctggttcggtattttggtgtggagctccatagagaagaaatgtacatcttcatggagtactgcgatgaggggactttagaagaggtgtcaaggctgggacttcaggaacatgtgattaggctgtattcaaagcagatcaccattgcgatcaacgtcctccatgagcatggcatagtccaccgtgacattaaaggtgccaatatcttccttacctcatctggattaatcaaactgggagattttggatgttcagtaaagctcaaaaacaatgcccagaccatgcctggtgaagtgaacagcaccctggggacagcagcatacatggcacctgaagtcatcactcgtgccaaaggagagggccatgggcgtgcggccgacatctggagtctggggtgtgttgtcatagagatggtgactggcaagaggccttggcatgagtatgagcacaactttcaaattatgtataaagtggggatgggacataagccaccaatccctgaaagattaagccctgaaggaaaggacttcctttctcactgccttgagagtgacccaaagatgagatggaccgccagccagctcctcgaccattcgtttgtcaaggtttgcacagatgaagaatgaagcctagtagaatatggacttggaaaattctcttaatcactactgtatgtaatatttacataaagactgtgctgagaagcagtataagcctttttaaccttccaagactgaagactgcacaggtgacaagcgtcacttctcctgctgctcctgtttgtctgatgtggcaaaaggccctctggagggctggtggccacgaggttaaagaagctgcatgttaagtgccattactactgtacacggaccatcgcctctgtctcctccgtgtctcgcgcgactgagaaccgtgacatcagcgtagtgttttgacctttctaggttcaaaagaagttgtagtgttatcaggcgtcccataccttgtttttaatctcctgtttgttgagtgcactgactgtgaaacctttaccttttttgttgttgttggcaagctgcaggtttgtaatgcaaaaggctgattactgaaatttaagaaaaaggttcttttttcaataaatggtttattttaggaaagctcaaaaaaaaaaaaaaaaaa

SEQ ID NO: 2794 - DNA, 5215 bp, Homo Sapiens
  NM_005923
cgagcgcggcgcccttgagctgcaccgcggcgcaggtttgcgagccgacttgtcagccggccaagaaaaggaagctccgtcccttcccgctcacccggcttccccaccccttgtactctaaactctgcagagggcgagcggcgcggccacggaggcgccgaggaggagcgagccgccgccgggcagcggcgtgccctcgggggagagggcgccggagaggaggcggcggcgcggcggcgagggcgcggcgcgcgatggcagctgcttagcccggcgggcgcggagcagccccgagctgtggctggccaggcggtgcggctgggcgggggacgccgccgccgttgctgcccggcccggagagatgagcacggaggcggacgagggcatcactttctctgtgccacccttcgccccctcgggcttctgcaccatccccgagggcggcatctgcaggaggggaggagcggcggcggtgggcgagggcgaggagcaccagctgccaccgccgccgccgggcagcttctggaacgtggagagcgccgctgcccctggcatcggttgtccggcggccacctcctcgagcagtgccacccgaggccggggcagctctgttggcgggggcagccgacggaccacggtggcatatgtgatcaacgaagcgagccaagggcaactggtggtggccgagagcgaggccctgcagagcttgcgggaggcgtgcgagacagtgggcgccaccctggaaaccctgcattttgggaaactcgactttggagaaaccaccgtgctggaccgcttttacaatgcagatattgcggtggtggagatgagcgatgccttccggcagccgtccttgttttaccaccttggggtgagagaaagtttcagcatggccaacaacatcatcctctactgtgatactaactcggactctctgcagtcactgaaggaaataatttgccagaagaatactatgtgcactgggaactacacctttgttccttacatgataactccacataacaaagtctactgctgtgacagcagcttcatgaaggggttgacagagctcatgcaaccgaacttcgagctgcttcttggacccatctgcttacctcttgtggatcgttttattcaacttttgaaggtggcacaagcaagttctagccagtacttccgggaatctatactcaatgacatcaggaaagctcgtaatttatacactggtaaagaattggcagctgagttggcaagaattcggcagcgagtagataatatcgaagtcttgacagcagatattgtcataaatctgttactttcctacagagatatccaggactatgattctattgtgaagctggtagagactttagaaaaactgccaacctttgatttggcctcccatcaccatgtgaagtttcattatgcatttgcactgaataggagaaatctccctggtgacagagcaaaagctcttgatattatgattcccatggtgcaaagcgaaggacaagttgcttcagatatgtattgcctagttggtcgaatctacaaagatatgtttttggactctaatttcacggacactgaaagcagagaccatggagcttcttggttcaaaaaggcatttgaatctgagccaacactacagtcaggaattaattatgcggtcctcctcctggcagctggacaccagtttgaatcttcctttgagctccggaaagttggggtgaagctaagtagtcttcttggtaaaaagggaaacttggaaaaactccagagctactgggaagttggattttttctgggggccagcgtcctagccaatgaccacatgagagtcattcaagcatctgaaaagctttttaaactgaagacaccagcatggtacctcaagtctattgtagagacaattttaatatataagcattttgtgaaactgaccacagaacagcctgtggccaagcaagaacttgtggacttttggatggatttcctggtcgaggccacaaagacagatgttactgtggttaggtttccagtattaatattagaaccaaccaaaatctatcaaccttcttatttgtctatcaacaatgaagttgaggaaaagacaatctctatttggcacgtgcttcctgatgacaagaaaggtatacatgagtggaattttagtgcctcttctgtcaggggagtgagtatttctaaatttgaagaaagatgctgctttctttatgtgcttcacaattctgatgatttccaaatctatttctgtacagaacttcattgtaaaaagttttttgagatggtgaacaccattaccgaagagaaggggagaagcacagaggaaggagactgtgaaagtgacttgctggagtatgactatgaatatgatgaaaatggtgacagagtcgttttaggaaaaggcacttatgggatagtctacgcaggtcgggacttgagcaaccaagtcagaattgctattaaggaaatcccagagagagacagcagatactctcagcccctgcatgaagaaatagcattgcataaacacctgaagcacaaaaatattgtccagtatctgggctctttcagtgagaatggtttcattaaaatcttcatggagcaggtccctggaggaagtctttctgctctccttcgttccaaatggggtccattaaaagacaatgagcaaacaattggcttttatacaaagcaaatactggaaggattaaaatatctccatgacaatcagatagttcaccgggacataaagggtgacaatgtgttgattaatacctacagtggtgttctcaagatctctgacttcggaacatcaaagaggcttgctggcataaacccctgtactgaaacttttactggtaccctccagtatatggcaccagaaataatagataaaggaccaagaggctacggaaaagcagcagacatctggtctctgggctgtacaatcattgaaatggccacaggaaaacccccattttatgaactgggagaaccacaagcagctatgttcaaggtgggaatgtttaaagtccaccctgagatcccagagtccatgtctgcagaggccaaggcattcatactgaaatgttttgaaccagatcctgacaagagagcctgtgctaacgacttgcttgttgatgagtttttaaaagtttcaagcaaaaagaaaaagacacaacctaagctttcagctctttcagctggatcaaatgaatatctcaggagtatatccttgccggtacctgtgctggtggaggacaccagcagcagcagtgagtacggctcagtttcacccgacacggagttgaaagtggaccccttctctttcaaaacaagagccaagtcctgcggagaaagagatgtcaagggaattcggacactctttttgggcattccagatgagaattttgaagatcacagtgctcctccttcccctgaagaaaaagattctggattcttcatgctgaggaaggacagtgagaggcgagctacccttcacaggatcctgacggaagaccaagacaaaattgtgagaaacctaatggaatctttagctcagggggctgaagaaccgaaactaaaatgggaacacatcacaaccctcattgcaagcctcagagaatttgtgagatccactgaccgaaaaatcatagccaccacactgtcaaagctgaaactggagctggacttcgacagccatggcattagccaagtccaggtggtactctttggttttcaagatgctgtcaataaagttcttcggaatcataacatcaagccgcactggatgtttgccttagacagtatcattcggaaggcggtacagacagccattaccatcctggttccagaactaaggccacatttcagccttgcatctgagagtgatactgctgatcaagaagacttggatgtagaagatgaccatgaggaacagccttcaaatcaaactgtccgaagacctcaggctgtcattgaagatgctgtggctacctcaggcgtgagcacgctcagttctactgtgtctcatgattcccagagtgctcaccggtcactgaatgtacagcttggaaggatgaaaatagaaaccaatagattactggaagaattggttcggaaagagaaagaattacaagcactccttcatcgagctattgaagaaaaagaccaagaaattaaacacctgaagcttaagtcccaacccatagaaattcctgaattgcctgtatttcatctaaattcttctggcacaaatactgaagattctgaacttaccgactggctgagagtgaatggagctgatgaagacactataagccggtttttggctgaagattatacactattggatgttctctactatgttacacgtgatgacttaaaatgcttgagactaaggggagggatgctgtgcacactgtggaaggctatcattgactttcgaaacaaacagacttgactgttgctcaatctaatcttcgatggaaattctaaaaattaatacagagctgatcttcttgggggtgggaaaatcgaagggagaggagaaaggcgctgcactttaaatccagtatttgtttactcatgttaaaaaaaaaaaaaacagacaaaacacactgaaatttcctaactacatctatttctataatttttaaggactcttcataaggactcttaaaataatcctgaacattagaaccctaatgttcaggaagattttaatctaagcatttttatggaaatatttttaatgcagcagctattgcacttcagccaaatgtttatttcacacaaaacggatgtaacatttcatgtgatcgtgcaccactggaacaaaaccaaaatgtgaccataactgtttaggcttctgtgtgtttgtaatatgctctaataatctgagtagaaatgcgtaatttcaattactgtataaagtttatgtttttttaagtgtgcagaatctgagagcaatggtttttacttctctgtgttaattgtaatattgactctattttgtaacttaagtttctgacctgtcgtacatttgtttgagtcgtttatgtactactgaactgtaccagttgcacatgcttgaactgtagtaatgttagcttgttctaaagctatccattgtgtcatatttactctaaaaattaaagagactctcaacaaaaaaaaaaaaaaaaaaaaa

SEQ ID NO: 2795 - DNA, 2327 bp, Homo Sapiens
  NM_005925
tcaaccctgaatgtcatagttagctactttcaactggaagctacaacatggatttatggaatctgtcttggtttctgttcttggatgctcttctcgtgatttctggcttggcaactccagaaaactttgatgtagatggcggaatggaccaggacatatttgatatcaatgaaggtttgggactggatctttttgagggtgacatcagacttgatagggcacaaattagaaattccatcattggagaaaagtatagatggcctcataccattccatatgttctagaagatagcttggaaatgaatgctaagggagttatcctcaatgcatttgaacgttatcgccttaaaacatgtattgactttaagccttgggctggagaaacaaactatatatcagtgttcaagggcagtggctgctggtcttcagtaggaaataggcgggttgggaagcaagaactttccatcggggcaaactgtgaccgaatagcaacagttcaacacgagttcctccacgctctgggattctggcatgagcagtcgcgttctgaccgggatgactatgtcaggataatgtgggacagaattctgtcaggcagagagcacaattttaacacctatagtgacgatatatcagattccctgaatgttccctatgattacacttcagtaatgcactacagtaaaactgcattccaaaatggaacagagccgacaattgtcacaagaatctcagactttgaggatgtgatcggccaacgaatggatttcagtgactctgatctcctaaagttgaatcaactgtataactgctcctcttccttgagttttatggactcgtgcagttttgaactggaaaatgtgtgtggcatgatccaaagttcaggagataatgctgactggcaacgggtttcacaggttcccagggggccagagagtgatcactccaacatgggccagtgccaaggttctggtttcttcatgcatttcgatagcagctctgtaaatgtgggggccacagcagtgctggaaagtagaacgctgtaccctaaaagaggatttcagtgcctgcaattttacttatataacagtggcagtgaaagtgatcaactgaacatctatatcagggagtattctgcagacaatgtggatggcaatttaacccttgtggaagaaataaaagaaatacccactgggagctggcaactttatcatgtaacattgaaagtgaccaagaagtttagagtggtgtttgaaggacgcaaaggctctggtgcatcactgggtggtctgtctattgatgacatcaatctttcggaaacacggtgccctcatcatatctggcatataaggaatttcacacagttcattggcagcccaaatggaactctgtatagccctccattttactcttctaaaggttatgcctttcagatttacttaaatctagcccatgtgactaatgcagggatatatttccacttgatctctggagccaatgatgatcaattacagtggccatgtccttggcaacaagccacaatgacacttttggatcaaaatcctgacattcgacagcgtatgtccaatcagcggagtataactacagacccatttatgaccaccgataatggaaactatttctgggacaggccttctaaagtgggaacagtggctttgttctctaatggaactcagtttagaagaggtgggggctatggaaccagtgcctttataacccacgaaaggctgaaaagcagagattttataaaaggagatgatgtttatatcctactgacagtggaagacatatctcacctcaactctacacaaatccagctaacaccagcccctagtgttcaagacctctgctcaaaaaccacctgtaaaaatgacggtgtctgcactgttcgagatggcaaagctgagtgcaggtgccagtcaggggaagactggtggtacatgggagaaaggtgtgaaaagagaggctccacccgagacaccatagtcattgctgtttcatctactgttgctgtgtttgccttgatgctgatcatcacccttgtcagtgtctattgcaccaggaagaaatatcgtgaaaggatgagctcaaatcgaccaaatttgactccgcaaaatcagcatgctttttgaagattaactcgacaatatggccagctaatgaaattaaaaaggattcttcatcatggatttcgcctaagtgatattacagccacctcattcttctaaaagtggatatttttctgtaaatagctggaaatattataaatcactattttggtcaaagtcaaaaaaaaaaaaaaaaaa

SEQ ID NO: 2796 - DNA, 5049 bp, Homo Sapiens
  NM_005927
aaacttccgagttaagccgccgctgaggccggaaggagctagacggcggtcgggttctctactcacatcttttaatcttgaagactagaaaatataactggatctaccacttgtttggaaaatttctctaccaagcaataaattacccgctgtgcttttgttgtagtgtagaagtttttgagttctccaaatctaaacaagattttgtcccattttcccatgaagctacattgttgcttattcactttagtggcaagtattattgtgccagctgcttttgttttggaagatgtggacttcgaccaaatggtttcactggaagcaaatcgtagttcttacaatgcatcctttccctcaagctttgaactctcagcaagttcccactcggatgatgatgtcatcatagccaaagagggaactagcgtttcaattgagtgtcttctcacagccagtcactatgaagatgtccattggcacaattcaaaaggacagcaactggatggcagaagcagaggtggaaagtggttggtttctgataacttcctaaacatcaccaatgtagcttttgatgaccgtgggctctatacctgtttcgtcacctctccaattcgtgcctcctactctgtcaccctacgtgttatcttcacctcgggagacatgagtgtctattacatgattgtttgcctgattgcctttacaatcacactcatcttgaatgtcacacggctgtgcatgatgagcagccatcttcgcaagactgagaaggctatcaatgagttctttagaactgaaggggctgagaaacttcagaaggcctttgagattgcaaaacgtatccccatcattacctcagccaaaactctggagctcgccaaagtcacacaatttaagaccatggagtttgctcgttatattgaagaactggcaagaagtgtccctcttccacctcttattctaaactgtcgagcctttgttgaggagatgtttgaggctgtgcgagtggacgaccctgatgacctgggtgaaagaattaaagagagacctgccttgaatgctcaaggtggcatctatgtcattaacccagagatgggacggagtaattcaccaggaggagattcagatgatggctctctgaatgaacaaggccaggaaatagcagttcaggtttctgtccaccttcagtcagaaaccaaaagtattgatacagagtctcaaggcagcagtcatttcagtccacctgatgatataggatctgcagaatctaactgtaactacaaagatggggcatatgaaaactgtcagctgtaacctacaatgctgtaacccagtacctacaaaatcagctcgctctcagaaaaggaacctgtttcttagaagaagtaacatttttgccaaaagatgactggggttttccgtttgttaatattaagcacatcagaacgtgaattgccaaagtcttcattagaaggcagcatttttcctctctgatacttttcagtcattttccttagagctttattaaattatgcatgctaagatttaaaggagccccagataaacatgatggggaaaagcactgaactaagagtcccatggtttctcttctggtcacagttcttccattggttggatctgatacttatcttgggacttcagtttttccgtcaataagatgagggattaggtgagatctgaagttgtttctagctctatagcttcttaacccatcacctttaaattaccagaatcttcactcatctctaagtaaacctttcccgggacttttactcgcttcttttggaaaggattaagctgagatctaaatttccacaccaatgtcataatgcacagaggtttttgaaaaacatctgagtgtttttcagatgttttgccatgtggagcatataatgatatgtgcaagattgaatcttttcaatgtagcacatgtctgtagggttatacagatgtcagagagctaactgctctgtaaactactttccatgagtaaattggtccttggtgggggtgtatcatatttttaacttactgagatatcattttagttcattgaggttggcagggattgcctaactgatcttccaaagtgagcagtttatttctaaggtataacgtctttgatgcttttagaataagaacagtgtcaaatcatctgtcttctggaaaatcatggattttcatatttctgttaacagaatttctcaggctttccctttttaaaagtattggactctacaaataggttctatatttgggatctcatcctaggagaaaacccaaaactggattcctcttaagacctctgtcaaccctcctgccctttgtggtcttaggtatggtgctataggttgcatgcgtctttatcttgtttgtttggttaatattttgttgttgaggtttttatttttgtttacttcagatacataattctgagctatggctgcttttgtagcctttccaagaagcactaacctgaaataagattagataattgtgagggtgtgttactatattaaaatacacacacaactgatctagacatcaagaggaagaaaaatgatggatgatgccacctgcttcaactgtatataataaacacttatgatgacatttcttgcctggctgagatctgatataatggaattgtaaatactcttcagaacaatttcttcagctacaggaagcgtggtgccatataattttaagaacttggcagtggagctccatttggggcttcacgtttcttcatatgacttctgattattgaagcattacttcagctagaggctcctgagggaaatgttcagaggaggttttatcaggattttaatttaaggtttcaaacaggggaagacaggaaattcaaagcgtgacgggataaaactcatgcctccctttgtccaggcttatcagaagtaatacatctgctctgaatagcatgaatgaatcaatgtgcagttttatcagatggcatcatggataaagatgataatgctgccttttctgtctctcaggctgtttccatggaaacctctagagccaaataaaagctaaccaatcatttagccaaagcttgccttggctcatagactggtatttctttaaggaaaattgtttttatatatttgactataagagcaaaggctcttgaacatatcctagattatggaacactttttcccttcccttttctctggaaaaattaaattttttttctgtccactgagactggagtgcagtggcaagatcatagctcactgcagcctccaactcctggggtcaagcgatcgtcctgcttcagcctcccaagcagctaggactacaggtgtgcaccacctttcctggctaatttttttttattttttgtagagatgggggtctcactttgttgcccaggctgaccttgtacttgtggcttcaaatgatcctcctgccttacctcccaaagtgttgagattacaggcatgagccactgtgcctggccaaaaaacattttaaatcccttgtctgggggtcagtcctctaaacatccctcagatttcagatagtactttcaaccctgtcctaacatagcaggtttgcagtaatcttttagaatatagcttgtcaaattagagaatggttttaccccacatgttctcataggagacattattatttagaaccctaaggtagacatgtttaaaatcaaagtcctaagaaacagaactttggaaaaatggaggaaatgtttttaaagtctgtaagtttgcacgatactgtatagtaactaaatgcatgctactccgttgtatcctagttattttagaaacagaggtggcctaatttggtggccaaagtaactggtttactttgagtgtaccagcttatggtgccattgatgaggaattaaagtaggtcaaaatttaattggagttggtattacttcgtaaagctagttttcaagaggaagaaaaccacacttactaatgttttctgtatctaatcaaatactcttcatatataattaagcctcatgttatcttttttttaaatcaaccttttgaacttcaactacagtctaaaagtcttgatggtaactatagtgtaattatctttttgtctcactggattttatagttagtggaaaatgcctttacaaaatgtatttaaaatagctgtcatctcatttgtaaattttgtcgtgtattgtgatatagtgaaccttattgtccttatgaaatggtagctttgtgaaatacattcaccaaaaatcaaaatttgaacatctttatgattccttaccagctgaagccagatagacaggtattaattgagctgatgccccacttgagtttatagactgtttgataactgcctgtcctccaaattgtgtatgtatatgttacgatggtttaattcttgagtcagggccagcacgcatttatattttctaccaattaccttgatagaaatatcttagaaattgctgacctggaacggttgtgagaagactcctggcttctttcttgcctcacttaacaaatattttaaggtcaaagcaatatctgtgcacggctttccttttgctcctccagacaagtgaggctgttggtatagtcctcttcaccctctgcatgtagcttcaccctagatcagacttttgtctcttgggtcccagatggcacaggagcactgcatgcttgttttctagagcccagccagtcatgggtgctagcctagtctccacacaccagcaagtagaacccaagtgtattgtataaatatttcctgagtaccagtaagagaatgcattcttttctcatctaggccaggaatgttgaaaatgctcagccttacatagaaactcctagattttcactaacgcatttcacaaaagtaaataagtatttcatataattcagaggatgtttaaattgtcagcattttaataaatacttgcattataattttgtctcttttttaaagaaagtcatacttgaatataatttattaaacgttcaatggagtatatagtctatttgaaatttt

SEQ ID NO: 2797 - DNA, 2446 bp, Homo Sapiens
  NM_005932
agacccggaagcggggccgtcacgtggggcggcgtgggctgctgccttggaaacgcggagcgcgcgctcccagcgaaagcagcagggcagggatctgcgttggaggaagggactgctctggtgctagaatgctgtgcgtcggaaggctgggcggcttgggagccagagcagcagctctgccgccccgccgggcgggccggggaagcctcgaagccgggatccgggcccgaagggtcagcaccagctggtctcccgtgggcgccgccttcaatgtcaagccccagggcagccgcttggacctgttcggcgagcgccggggtctttttggagttcctgagctgagtgccccagaaggatttcatattgcacaagaaaaagccttgagaaagacagaattgcttgtggaccgtgcatgttccaccccacctgggccccagaccgtgctgatcttcgatgagctctcggattccttatgcagagtggccgacttggctgattttgtgaaaatcgctcaccctgagccagcattcagagaagctgcggaagaagcttgtagaagtattggcaccatggtagagaagttgaacacaaatgtggatttatatcaaagtttgcaaaaattactagctgataaaaaacttgtggattcccttgatccagaaacaaggcgagtggctgaactgtttatgtttgattttgaaattagtggaatccatctagacaaagaaaagcgtaaaagagcagtggacctcaatgttaaaatcttggatttgagtagtacatttcttatgggaaccaattttcccaacaagattgagaagcatctcttaccagaacacattcgtcgtaactttacatctgctggggatcatatcataattgatggtctccacgcagaatcaccagatgacttggtgcgagaagctgcttataaaatttttctttatcccaatgctggtcaattgaaatgtttagaagaattgctcagcagcagagatcttctggcaaagttggtggggtattccacgttttctcacagggctctccaaggaacgatagctaaaaatccagagactgtcatgcagttccttgaaaaactatctgacaaactttctgaaagaactctgaaagattttgagatgatacgagggatgaaaatgaaactgaatcctcaaaattccgaagtaatgccctgggaccccccttactacagtggtgtgattcgtgcagaaaggtataatattgagcccagcctatattgcccgtttttctctcttggagcatgcatggaaggcctgaatattttgcttaacagactgttggggatttcattatatgcagagcagcctgcaaaaggagaggtgtggagcgaagatgtccgaaaactggctgttgttcatgaatctgaaggattgttggggtacatttactgtgatttttttcagcgagcagacaaaccacatcaggattgccatttcactatccgtggaggcagactaaaggaagatggagactatcaactcccagttgtagttcttatgctgaatcttccccgttcctcaaggagttctccaactttgctaactcctggcatgatggaaaatcttttccatgaaatgggacatgccatgcattcaatgctaggacgtactcgttaccaacacgtcactgggaccaggtgccctactgattttgctgaggttccttctattctgatggagtactttgcaaatgattatcgagtagttaaccaatttgccagacattatcagactggacagccactgccaaaaaatatggtgtctcgtctttgtgaatctaaaaaggtttgtgctgcagctgatatgcaacttcaggtcttttatgccactctggatcaaatctaccatgggaagcatcccctgaggaattcaaccacagacattctcaaggaaacacaagagaaattctatggcctaccatatgttccaaatactgcctggcagctgcgattcagccacctcgtggggtatggtgctagatattactcttacctcatgtccagagcggtcgcctccatggtttggaaggagtgttttctacaggatcctttcaacagggctgccggggagcgctatcgcagggagatgctggcccacggtggaggcagggagcccatgctcatggttgaaggtatgcttcagaagtgtccttctgttgatgacttcgtaagtgccctcgtttccgacttggatctggacttcgaaactttcctcatggattctgaataaaagaaacactctacacctcttaaatcaaggtcatgtagataatgactttgttataaatgctacagctgtgagagcttgtttctgatttcattgttcgcttctgtaattctgaaaaactttaaactggtagaacttggaataaataatttgttttaattaaaaaaaaaaaaaaaaaa

SEQ ID NO: 2798 - DNA, 16599 bp, Homo Sapiens
  NM_005933
ctgcttcacttcacggggcgaacatggcgcacagctgtcggtggcgcttccccgcccgacccgggaccaccgggggcggcggcggcggggggcgccggggcctagggggcgccccgcggcaacgcgtcccggccctgctgcttccccccgggcccccggtcggcggtggcggccccggggcgcccccctcccccccggctgtggcggccgcggcggcggcggcgggaagcagcggggctggggttccagggggagcggccgccgcctcagcagcctcctcgtcgtccgcctcgtcttcgtcttcgtcatcgtcctcagcctcttcagggccggccctgctccgggtgggcccgggcttcgacgcggcgctgcaggtctcggccgccatcggcaccaacctgcgccggttccgggccgtgtttggggagagcggcgggggaggcggcagcggagaggatgagcaattcttaggttttggctcagatgaagaagtcagagtgcgaagtcccacaaggtctccttcagttaaaactagtcctcgaaaacctcgtgggagacctagaagtggctctgaccgaaattcagctatcctctcagatccatctgtgttttcccctctaaataaatcagagaccaaatctggagataagatcaagaagaaagattctaaaagtatagaaaagaagagaggaagacctcccaccttccctggagtaaaaatcaaaataacacatggaaaggacatttcagagttaccaaagggaaacaaagaagatagcctgaaaaaaattaaaaggacaccttctgctacgtttcagcaagccacaaagattaaaaaattaagagcaggtaaactctctcctctcaagtctaagtttaagacagggaagcttcaaataggaaggaagggggtacaaattgtacgacggagaggaaggcctccatcaacagaaaggataaagaccccttcgggtctcctcattaattctgaactggaaaagccccagaaagtccggaaagacaaggaaggaacacctccacttacaaaagaagataagacagttgtcagacaaagccctcgaaggattaagccagttaggattattccttcttcaaaaaggacagatgcaaccattgctaagcaactcttacagagggcaaaaaagggggctcaaaagaaaattgaaaaagaagcagctcagctgcagggaagaaaggtgaagacacaggtcaaaaatattcgacagttcatcatgcctgttgtcagtgctatctcctcgcggatcattaagacccctcggcggtttatagaggatgaggattatgaccctccaattaaaattgcccgattagagtctacaccgaatagtagattcagtgccccgtcctgtggatcttctgaaaaatcaagtgcagcttctcagcactcctctcaaatgtcttcagactcctctcgatctagtagccccagtgttgatacctccacagactctcaggcttctgaggagattcaggtacttcctgaggagcggagcgatacccctgaagttcatcctccactgcccatttcccagtccccagaaaatgagagtaatgataggagaagcagaaggtattcagtgtcggagagaagttttggatctagaacgacgaaaaaattatcaactctacaaagtgccccccagcagcagacctcctcgtctccacctccacctctgctgactccaccgccaccactgcagccagcctccagtatctctgaccacacaccttggcttatgcctccaacaatccccttagcatcaccatttttgcctgcttccactgctcctatgcaagggaagcgaaaatctattttgcgagaaccgacatttaggtggacttctttaaagcattctaggtcagagccacaatacttttcctcagcaaagtatgccaaagaaggtcttattcgcaaaccaatatttgataatttccgaccccctccactaactcccgaggacgttggctttgcatctggtttttctgcatctggtaccgctgcttcagcccgattgttttcgccactccattctggaacaaggtttgatatgcacaaaaggagccctcttctgagagctccaagatttactccaagtgaggctcactctagaatatttgagtctgtaaccttgcctagtaatcgaacttctgctggaacatcttcttcaggagtatccaatagaaaaaggaaaagaaaagtgtttagtcctattcgatctgaaccaagatctccttctcactccatgaggacaagaagtggaaggcttagtagttctgagctctcacctctcacccccccgtcttctgtctcttcctcgttaagcatttctgttagtcctcttgccactagtgccttaaacccaacttttacttttccttctcattccctgactcagtctggggaatctgcagagaaaaatcagagaccaaggaagcagactagtgctccggcagagccattttcatcaagtagtcctactcctctcttcccttggtttaccccaggctctcagactgaaagagggagaaataaagacaaggcccccgaggagctgtccaaagatcgagatgctgacaagagcgtggagaaggacaagagtagagagagagaccgggagagagaaaaggagaataagcgggagtcaaggaaagagaaaaggaaaaagggatcagaaattcagagtagttctgctttgtatcctgtgggtagggtttccaaagagaaggttgttggtgaagatgttgccacttcatcttctgccaaaaaagcaacagggcggaagaagtcttcatcacatgattctgggactgatattacttctgtgactcttggggatacaacagctgtcaaaaccaaaatacttataaagaaagggagaggaaatctggaaaaaaccaacttggacctcggcccaactgccccatccctggagaaggagaaaaccctctgcctttccactccttcatctagcactgttaaacattccacttcctccataggctccatgttggctcaggcagacaagcttccaatgactgacaagagggttgccagcctcctaaaaaaggccaaagctcagctctgcaagattgagaagagtaagagtcttaaacaaaccgaccagcccaaagcacagggtcaagaaagtgactcatcagagacctctgtgcgaggaccccggattaaacatgtctgcagaagagcagctgttgcccttggccgaaaacgagctgtgtttcctgatgacatgcccaccctgagtgccttaccatgggaagaacgagaaaagattttgtcttccatggggaatgatgacaagtcatcaattgctggctcagaagatgctgaacctcttgctccacccatcaaaccaattaaacctgtcactagaaacaaggcaccccaggaacctccagtaaagaaaggacgtcgatcgaggcggtgtgggcagtgtcccggctgccaggtgcctgaggactgtggtgtttgtactaattgcttagataagcccaagtttggtggtcgcaatataaagaagcagtgctgcaagatgagaaaatgtcagaatctacaatggatgccttccaaagcctacctgcagaagcaagctaaagctgtgaaaaagaaagagaaaaagtctaagaccagtgaaaagaaagacagcaaagagagcagtgttgtgaagaacgtggtggactctagtcagaaacctaccccatcagcaagagaggatcctgccccaaagaaaagcagtagtgagcctcctccacgaaagcccgtcgaggaaaagagtgaagaagggaatgtctcggcccctgggcctgaatccaaacaggccaccactccagcttccaggaagtcaagcaagcaggtctcccagccagcactggtcatcccgcctcagccacctactacaggaccgccaagaaaagaagttcccaaaaccactcctagtgagcccaagaaaaagcagcctccaccaccagaatcaggtccagagcagagcaaacagaaaaaagtggctccccgcccaagtatccctgtaaaacaaaaaccaaaagaaaaggaaaaaccacctccggtcaataagcaggagaatgcaggcactttgaacatcctcagcactctctccaatggcaatagttctaagcaaaaaattccagcagatggagtccacaggatcagagtggactttaaggaggattgtgaagcagaaaatgtgtgggagatgggaggcttaggaatcttgacttctgttcctataacacccagggtggtttgctttctctgtgccagtagtgggcatgtagagtttgtgtattgccaagtctgttgtgagcccttccacaagttttgtttagaggagaacgagcgccctctggaggaccagctggaaaattggtgttgtcgtcgttgcaaattctgtcacgtttgtggaaggcaacatcaggctacaaagcagctgctggagtgtaataagtgccgaaacagctatcaccctgagtgcctgggaccaaactaccccaccaaacccacaaagaagaagaaagtctggatctgtaccaagtgtgttcgctgtaagagctgtggatccacaactccaggcaaagggtgggatgcacagtggtctcatgatttctcactgtgtcatgattgcgccaagctctttgctaaaggaaacttctgccctctctgtgacaaatgttatgatgatgatgactatgagagtaagatgatgcaatgtggaaagtgtgatcgctgggtccattccaaatgtgagaatctttcagatgagatgtatgagattctatctaatctgccagaaagtgtggcctacacttgtgtgaactgtactgagcggcaccctgcagagtggcgactggcccttgaaaaagagctgcagatttctctgaagcaagttctgacagctttgttgaattctcggactaccagccatttgctacgctaccggcaggctgccaagcctccagacttaaatcccgagacagaggagagtataccttcccgcagctcccccgaaggacctgatccaccagttcttactgaggtcagcaaacaggatgatcagcagcctttagatctagaaggagtcaagaggaagatggaccaagggaattacacatctgtgttggagttcagtgatgatattgtgaagatcattcaagcagccattaattcagatggaggacagccagaaattaaaaaagccaacagcatggtcaagtccttcttcattcggcaaatggaacgtgtttttccatggttcagtgtcaaaaagtccaggttttgggagccaaataaagtatcaagcaacagtgggatgttaccaaacgcagtgcttccaccttcacttgaccataattatgctcagtggcaggagcgagaggaaaacagccacactgagcagcctcctttaatgaagaaaatcattccagctcccaaacccaaaggtcctggagaaccagactcaccaactcctctgcatcctcctacaccaccaattttgagtactgataggagtcgagaagacagtccagagctgaacccacccccaggcatagaagacaatagacagtgtgcgttatgtttgacttatggtgatgacagtgctaatgatgctggtcgtttactatatattggccaaaatgagtggacacatgtaaattgtgctttgtggtcagcggaagtgtttgaagatgatgacggatcactaaagaatgtgcatatggctgtgatcaggggcaagcagctgagatgtgaattctgccaaaagccaggagccaccgtgggttgctgtctcacatcctgcaccagcaactatcacttcatgtgttcccgagccaagaactgtgtctttctggatgataaaaaagtatattgccaacgacatcgggatttgatcaaaggcgaagtggttcctgagaatggatttgaagttttcagaagagtgtttgtggactttgaaggaatcagcttgagaaggaagtttctcaatggcttggaaccagaaaatatccacatgatgattgggtctatgacaatcgactgcttaggaattctaaatgatctctccgactgtgaagataagctctttcctattggatatcagtgttccagggtatactggagcaccacagatgctcgcaagcgctgtgtatatacatgcaagatagtggagtgccgtcctccagtcgtagagccggatatcaacagcactgttgaacatgatgaaaacaggaccattgcccatagtccaacatcttttacagaaagttcatcaaaagagagtcaaaacacagctgaaattataagtcctccatcaccagaccgacctcctcattcacaaacctctggctcctgttattatcatgtcatctcaaaggtccccaggattcgaacacccagttattctccaacacagagatcccctggctgtcgaccgttgccttctgcaggaagtcctaccccaaccactcatgaaatagtcacagtaggtgatcctttactctcctctggacttcgaagcattggctccaggcgtcacagtacctcttccttatcaccccagcggtccaaactccggataatgtctccaatgagaactgggaatacttactctaggaataatgtttcctcagtctccaccaccgggaccgctactgatcttgaatcaagtgccaaagtagttgatcatgtcttagggccactgaattcaagtactagtttagggcaaaacacttccacctcttcaaatttgcaaaggacagtggttactgtaggcaataaaaacagtcacttggatggatcttcatcttcagaaatgaagcagtccagtgcttcagacttggtgtccaagagctcctctttaaagggagagaagaccaaagtgctgagttccaagagctcagagggatctgcacataatgtggcttaccctggaattcctaaactggccccacaggttcataacacaacatctagagaactgaatgttagtaaaatcggctcctttgctgaaccctcttcagtgtcgttttcttctaaagaggccctctccttcccacacctccatttgagagggcaaaggaatgatcgagaccaacacacagattctacccaatcagcaaactcctctccagatgaagatactgaagtcaaaaccttgaagctatctggaatgagcaacagatcatccattatcaacgaacatatgggatctagttccagagataggagacagaaagggaaaaaatcctgtaaagaaactttcaaagaaaagcattccagtaaatcttttttggaacctggtcaggtgacaactggtgaggaaggaaacttgaagccagagtttatggatgaggttttgactcctgagtatatgggccaacgaccatgtaacaatgtttcttctgataagattggtgataaaggcctttctatgccaggagtccccaaagctccacccatgcaagtagaaggatctgccaaggaattacaggcaccacggaaacgcacagtcaaagtgacactgacacctctaaaaatggaaaatgagagtcaatccaaaaatgccctgaaagaaagtagtcctgcttcccctttgcaaatagagtcaacatctcccacagaaccaatttcagcctctgaaaatccaggagatggtccagtggcccaaccaagccccaataatacctcatgccaggattctcaaagtaacaactatcagaatcttccagtacaggacagaaacctaatgcttccagatggccccaaacctcaggaggatggctcttttaaaaggaggtatccccgtcgcagtgcccgtgcacgttctaacatgttttttgggcttaccccactctatggagtaagatcctatggtgaagaagacattccattctacagcagctcaactgggaagaagcgaggcaagagatcagctgaaggacaggtggatggggccgatgacttaagcacttcagatgaagacgacttatactattacaacttcactagaacagtgatttcttcaggtggagaggaacgactggcatcccataatttatttcgggaggaggaacagtgtgatcttccaaaaatctcacagttggatggtgttgatgatgggacagagagtgatactagtgtcacagccacaacaaggaaaagcagccagattccaaaaagaaatggtaaagaaaatggaacagagaacttaaagattgatagacctgaagatgctggggagaaagaacatgtcactaagagttctgttggccacaaaaatgagccaaagatggataactgccattctgtaagcagagttaaaacacagggacaagattccttggaagctcagctcagctcattggagtcaagccgcagagtccacacaagtaccccctccgacaaaaatttactggacacctataatactgagctcctgaaatcagattcagacaataacaacagtgatgactgtgggaatatcctgccttcagacattatggactttgtactaaagaatactccatccatgcaggctttgggtgagagcccagagtcatcttcatcagaactcctgaatcttggtgaaggattgggtcttgacagtaatcgtgaaaaagacatgggtctttttgaagtattttctcagcagctgcctacaacagaacctgtggatagtagtgtctcttcctctatctcagcagaggaacagtttgagttgcctctagagctaccatctgatctgtctgtcttgaccacccggagtcccactgtccccagccagaatcccagtagactagctgttatctcagactcaggggagaagagagtaaccatcacagaaaaatctgtagcctcctctgaaagtgacccagcactgctgagcccaggagtagatccaactcctgaaggccacatgactcctgatcattttatccaaggacacatggatgcagaccacatctctagccctccttgtggttcagtagagcaaggtcatggcaacaatcaggatttaactaggaacagtagcacccctggccttcaggtacctgtttccccaactgttcccatccagaaccagaagtatgtgcccaattctactgatagtcctggcccgtctcagatttccaatgcagctgtccagaccactccaccccacctgaagccagccactgagaaactcatagttgttaaccagaacatgcagccactttatgttctccaaactcttccaaatggagtgacccaaaaaatccaattgacctcttctgttagttctacacccagtgtgatggagacaaatacttcagtattgggacccatgggaggtggtctcacccttaccacaggactaaatccaagcttgccaacttctcaatctttgttcccttctgctagcaaaggattgctacccatgtctcatcaccagcacttacattccttccctgcagctactcaaagtagtttcccaccaaacatcagcaatcctccttcaggcctgcttattggggttcagcctcctccggatccccaacttttggtttcagaatccagccagaggacagacctcagtaccacagtagccactccatcctctggactcaagaaaagacccatatctcgtctacagacccgaaagaataaaaaacttgctccctctagtaccccttcaaacattgccccttctgatgtggtttctaatatgacattgattaacttcacaccctcccagcttcctaatcatccaagtctgttagatttggggtcacttaatacttcatctcaccgaactgtccccaacatcataaaaagatctaaatctagcatcatgtattttgaaccggcacccctgttaccacagagtgtgggaggaactgctgccacagcggcaggcacatcaacaataagccaggatactagccacctcacatcagggtctgtgtctggcttggcatccagttcctctgtcttgaatgttgtatccatgcaaactaccacaacccctacaagtagtgcgtcagttccaggacacgtcaccttaaccaacccaaggttgcttggtaccccagatattggctcaataagcaatcttttaatcaaagctagccagcagagcctggggattcaggaccagcctgtggctttaccgccaagttcaggaatgtttccacaactggggacatcacagaccccctctactgctgcaataacagcggcatctagcatctgtgtgctcccctccactcagactacgggcataacagccgcttcaccttctggggaagcagacgaacactatcagcttcagcatgtgaaccagctccttgccagcaaaactgggattcattcttcccagcgtgatcttgattctgcttcagggccccaggtatccaactttacccagacggtagacgctcctaatagcatgggactggagcagaacaaggctttatcctcagctgtgcaagccagccccacctctcctgggggttctccatcctctccatcttctggacagcggtcagcaagcccttcagtgccgggtcccactaaacccaaaccaaaaaccaaacggtttcagctgcctctagacaaagggaatggcaagaagcacaaagtttcccatttgcggaccagttcttctgaagcacacattccagaccaagaaacgacatccctgacctcaggcacagggactccaggagcagaggctgagcagcaggatacagctagcgtggagcagtcctcccagaaggagtgtgggcaacctgcagggcaagtcgctgttcttccggaagttcaggtgacccaaaatccagcaaatgaacaagaaagtgcagaacctaaaacagtggaagaagaggaaagtaatttcagctccccactgatgctttggcttcagcaagaacaaaagcggaaggaaagcattactgagaaaaaacccaagaaaggacttgtttttgaaatttccagtgatgatggctttcagatctgtgcagaaagtattgaagatgcctggaagtcattgacagataaagtccaggaagctcgatcaaatgcccgcctaaagcagctctcatttgcaggtgttaacggtttgaggatgctggggattctccatgatgcagttgtgttcctcattgagcagctgtctggtgccaagcactgtcgaaattacaaattccgtttccacaagccagaggaggccaatgaaccccccttgaaccctcacggctcagccagggctgaagtccacctcaggaagtcagcatttgacatgtttaacttcctggcttctaaacatcgtcagcctcctgaatacaaccccaatgatgaagaagaggaggaggtacagctgaagtcagctcggagggcaactagcatggatctgccaatgcccatgcgcttccggcacttaaaaaagacttctaaggaggcagttggtgtctacaggtctcccatccatggccggggtcttttctgtaagagaaacattgatgcaggtgagatggtgattgagtatgccggcaacgtcatccgctccatccagactgacaagcgggaaaagtattacgacagcaagggcattggttgctatatgttccgaattgatgactcagaggtagtggatgccaccatgcatggaaatgctgcacgcttcatcaatcactcgtgtgagcctaactgctattctcgggtcatcaatattgatgggcagaagcacattgtcatctttgccatgcgtaagatctaccgaggagaggaactcacttacgactataagttccccattgaggatgccagcaacaagctgccctgcaactgtggcgccaagaaatgccggaagttcctaaactaaagctgctcttctcccccagtgttggagtgcaaggaggcggggccatccaaagcaacgctgaaggccttttccagcagctgggagctcccggattgcgtggcacagctgaggggcctctgtgatggctgagctctcttatgtcctatactcacatcagacatgtgatcatagtcccagagacagagttgaggtctcgaagaaaagatccatgatcggctttctcctggggcccctccaattgtttactgttagaaagtgggaatggggtccctagcagacttgcctggaaggagcctattatagagggttggttatgttgggagattgggcctgaatttctccacagaaataagttgccatcctcaggttggccctttcccaagcactgtaagtgagtgggtcaggcaaagccccaaatggagggttggttagattcctgacagtttgccagccaggccccacctacagcgtctgtcgaacaaacagaggtctggtggttttccctactatcctcccactcgagagttcacttctggttgggagacaggattcctagcacctccggtgtcaaaaggctgtcatggggttgtgccaattaattaccaaacattgagcctgcaggctttgagtgggagtgttgcccccaggagccttatctcagccaattacctttcttgacagtaggagcggcttccctctcccattccctcttcactcccttttcttcctttcccctgtcttcatgccactgctttcccatgcttctttcgggttgtaggggagactgactgcctgctcaaggacactccctgctgggcataggatgtgcctgcaaaaagttccctgagcctgtaagcactccaggtggggaagtggacaggagccattggtcataaccagacagaatttggaaacattttcataaagctccatggagagttttaaagaaacatatgtagcatgattttgtaggagaggaaaaagattatttaaataggatttaaatcatgcaacaacgagagtatcacagccaggatgacccttgggtcccattcctaagacatggttactttattttccccttgttaagacataggaagacttaatttttaaacggtcagtgtccagttgaaggcagaacactaatcagatttcaaggcccacaacttggggactagaccaccttatgttgagggaactctgccacctgcgtgcaacccacagctaaagtaaattcaatgacactactgccctgattactccttaggatgtggtcaaaacagcatcaaatgtttcttctcttcctttccccaagacagagtcctgaacctgttaaattaagtcattggattttactctgttctgtttacagtttactatttaaggttttataaatgtaaatatattttgtatatttttctatgagaagcacttcatagggagaagcacttatgacaaggctattttttaaaccgcggtattatcctaatttaaaagaagatcggtttttaataattttttattttcataggatgaagttagagaaaatattcagctgtacacacaaagtctggtttttcctgcccaacttccccctggaaggtgtactttttgttgtttaatgtgtagcttgtttgtgccctgttgacataaatgtttcctgggtttgctctttgacaataaatggagaaggaaggtcacccaactccattgggccactcccctccttcccctattgaagctcctcaaaaggctacagtaatatcttgatacaacagattctcttctttcccgcctctctcctttccggcgcaacttccagagtggtgggagacggcaatctttacatttccctcatctttcttacttcagagttagcaaacaacaagttgaatggcaacttgacatttttgcatcaccatctgcctcataggccactctttcctttccctctgcccaccaagtcctcatatctgcagagaacccattgatcaccttgtgccctcttttggggcagcctgttgaaactgaagcacagtctgaccactcacgataaagcagatttttctctgcctctgccacaaggtttcagagtagtgtagtccaagtagagggtggggcacccttttctcgccgcaagaagcccattcctatggaagtctagcaaagcaatacgactcagcccagcactctctgccccaggactcatggctctgctgtgccttccatcctgggctcccttctctcctgtgaccttaagaactttgtctggtggctttgctggaacattgtcactgttttcactgtcatgcagggagcccagcactgtggccaggatggcagagacttccttgtcatcatggagaagtgccagcaggggactgggaaaagcactctacccagacctcacctcccttcctccttttgcccatgaacaagatgcagtggccctaggggttccactagtgtctgctttcctttattattgcactgtgtgaggtttttttgtaaatccttgtattcctattttttttaaagaaaaaaaaaaaaccttaagctgcatttgttactgaaatgattaatgcactgatgggtcctgaattcaccttgagaaagacccaaaggccagtcagggggtggggggaactcagctaaatagacctagttactgccctgctaggccatgctgtactgtgagcccctcctcactctctaccaaccctaaaccctgaggacaggggaggaacccacagcttccttctcctgccagctgcagatggtttgccttgcctttccaccccctaattgtcaaccacaaaaatgagaaattcctcttctagctcagccttgagtccattgccaaattttcagcacacctgccagcaacttgggggaataagcgaaggtttccctacaagagggaaagaaggcaaaaacggcacagctatctccaaacacatctgagttcatttcaaaagtgaccaagggaatctccgcacaaaagtgcagattgaggaattgtgatgggtcattcccaagaatcccccaaggggcatcccaaatccctgaggagtaacagctgcaaacctggtcagttctcagtgagagccagctcacttatagctttgctgctagaacctgttgtggctgcatttcctggtggccagtgacaactgtgtaaccagaatagctgcatggcgctgaccctttggccggaacttggtctcttggctccctccttggccacccaccacctctcgcacagcccctctgtttttacaccaataacaagaattaagggggaagccctggcagctatacgttttcaaccagactcctttgccgggacccagcccgccaccctgctcgcctccgtcaaacccccggccaatgcagtgagcaccatgtagctcccttgatttaaaaaaaataaaaaataaaaaaaaaaggaaaaaaaaatacaacacacacacaaaaataaaaaaaatattctaatgaatgtatctttctaaaggactgacgttcaatcaaatatctgaaaatactaaaggtcaaaaccttgtcagatgttaacttctaagttcggtttgggattttttttttttaatagaaatcaagttgtttttgtttttaaggaaaagcgggtcattgcaaagggctgggtgtaattttatgtttcatttccttcattttaaagcaatacaaggttatggagcagatggttttgtgccgaatcatgaatactagtcaagtcacacactctggaaacttgcaactttttgtttgttttggttttcaaataaatataaatatgatatatataggaactaatatagtaatgcaccatgtaacaaagcctagttcagtccatggcttttaattctcttaacactatagataaggattgtgttacagttgctagtagcggcaggaagatgtcaggctcactttcctctgattcccgaaatggggggaacctctaaccataaaggaatggtagaacagtccattcctcggatcagagaaaaatgcagacatggtgtcacctggatttttttctgcccatgaatgttgccagtcagtacctgtcctccttgtttctctatttttggttatgaatgttggggttaccacctgcatttaggggaaaattgtgttctgtgctttcctggtatcttgttccgaggtactctagttctgtctttcaaccaagaaaatagaattgtggtgtttcttttattgaacttttaacagtctctttagtaaatacaggtagttgaataattgtttcaagagctcaacagatgacaagcttcttttctagaaataagacattttttgacaactttatcatgtataacagatctgttttttttccttgtgttcttccaagcttctggttagagaaaaagagaaaaaaaaaaaaggaaaatgtgtctaaagtccatcagtgttaactccctgtgacagggatgaaggaaaatactttaatagttcaaaaaataataatgctgaaagctctctacgaaagactgaatgtaaaagtaaaaagtgtacatagttgtaaaaaaaaggagtttttaaacatgtttattttctatgcacttttttttatttaagtgatagtttaattaataaacatgtcaagtttaaaaaaaaaaaaaaa

SEQ ID NO: 2799 - DNA, 7500 bp, Homo Sapiens
  NM_005937
agctcatgggagtatgaaggagatggtaggaggctgctgcgtatgttcggacgagaggggctgggccgagaacccgctggtctactgcgatgggcacgcgtgcagcgtggccgtccaccaagcttgctatggcatcgttcaggtgccaacgggaccctggttctgccggaaatgtgaatctcaggagcgagcagccagggtgaggtgtgagctgtgcccacacaaagacggggcattgaagaggactgataatggaggctgggcacacgtggtgtgtgccctctacatccccgaggtgcaatttgccaacgtgctcaccatggagcccatcgtgctgcagtacgtgcctcatgatcgcttcaacaagacctgttacatctgcgaggagcagggccgggagagcaaggcggcctcgggagcctgcatgacctgtaaccgccatggatgtcgacaagctttccacgtcacctgtgcccaaatggcaggcttgctgtgtgaggaagaagtgctggaggtggacaacgtcaagtactgcggctactgcaaataccacttcagcaagatgaagacatcccggcacagcagcgggggaggcggaggaggcgctggaggaggaggtggcagcatggggggaggtggcagtggtttcatctctgggaggagaagccggtcagcctcaccatccacgcagcaggagaagcaccccacccaccacgagaggggccagaagaagagtcgaaaggacaaagaacgccttaagcagaagcacaagaagcggcctgagtcgccccccagcatcctcaccccgcccgtggtccccactgctgacaaggtctcctcctcggcttcctcttcctcccaccacgaggccagcacgcaggagacctctgagagcagcagggagtcaaaggggaaaaagtcttccagccatagcctgagtcataaagggaagaaactgagcagtgggaaaggtgtgagcagttttacctccgcctcctcttcttcctcctcctcttcctcctcctctggggggcccttccagcctgcagtctcgtccctgcagagctcccctgacttctctgcattccccaagctggagcagccagaggaggacaagtactccaagcccacagcccccgccccttcagcccctccttctccctcagctcccgagccccccaaggctgacctttttgagcagaaggtggtcttctctggctttgggcccatcatgcgcttctccaccaccacctccagctcaggccgggcccgggcgccctcccctggggactataagtctccccacgtcacggggtctggggcctcggcaggcacccacaaacggatgcccgcactgagtgccacccctgtgcctgctgatgagacccctgagacaggcctgaaggagaagaagcacaaagccagcaagaggagccgccatgggccaggccgtcccaagggcagccggaacaaggagggcactgggggcccagctgccccatccttgcccagtgcccagctggctggctttaccgccactgctgcctcacccttctctggaggttccctggtcagctccggcctgggaggtctgtcctcccgaacctttgggccttctgggagcttgcccagcttgagcctggagtcccccttactaggggcaggcatctacaccagtaataaggaccccatctcccacagtggcgggatgctgcgggctgtctgcagcacccctctctcctccagcctcctggggcccccagggacctcggccctgccccgcctcagccgctccccgttcaccagcaccctcccctcctcttctgcttctatctccaccactcaggtgttttctctggctggctctacctttagcctcccttctacccacatctttggaacccccatgggtgccgttaatcccctcctctcccaagctgagagcagccacacagagccagacctggaggactgcagcttccggtgtcgggggacctcccctcaggagagtctgtcttccatgtcccccatcagcagcctccccgcactcttcgaccagacagcctctgcaccctgtgggggcggccagttagacccggcggccccagggacgactaacatggagcagcttctggagaagcagggcgacggggaggccggcgtcaacatcgtggagatgctgaaggcgctgcacgcgctgcagaaggagaaccagcggctgcaagagcagatcctgagcctgacggccaaaaaggagcggctgcagattctcaacgtgcagctctctgtgcccttccctgccctgcctgctgccctgcctgccgccaacggccctgtccctgggccctatggcctgcctccccaagccggcagcagcgactccttgagcaccagcaagagccctccgggaaagagcagcctcggcctggacaactcgctgtccacttcttctgaggacccacactcaggctgcccgagccgcagcagctcgtcgctgtccttccacagcacgcccccaccgctgcccctcctccagcagagccctgccactctgcccctggccctgcctggggcccctgccccactcccgccccagccgcagaacgggttgggccgggcacccggggcagcggggctgggggccatgcccatggctgaggggctgttgggggggctggcaggcagtgggggcctgcccctcaatgggctccttggggggttgaatggggccgctgcccccaaccccgcaagcttgagccaggctggcggggcccccacgctgcagctgccaggctgtctcaacagccttacagagcagcagagacatctccttcagcagcaagagcagcagctccagcaactccagcagctcctggcctccccgcagctgaccccggaacaccagactgttgtctaccagatgatccagcagatccagcagaaacgggagctgcagcgcctgcagatggctgggggctcccagctgcccatggccagcctgctggcaggaagctccaccccgctgctgtctgcgggtacccctggcctgctgcccacagcgtctgctccacccctgctgcccgctggagccctagtggctccctcgcttggcaacaacacaagtctcatggccgcagcagctgcagctgcagcagtagcagcagcaggcggacctccagtcctcactgcccagaccaaccccttcctcagcctgtcgggagcagagggcagtggcggtggccccaaaggagggaccgctgacaaaggagcctcagccaaccaggaaaaaggctaaatccacccttacccctcctgacccccccaagtggagggaacagatcctggcctgaggggtcctagcctggagcaggcgcctgcgcccagaccctggagagccttgacccagagcctgtgctgaggtccagggagtgtggagagctcctggtgtcgaggactgagactgagaggggagccccctccatctggcccccttccctttccgcactgtccgctttgtgaggctcagaggaaggacagtctgcaagcccgcctaggaggtccatccccagcaaatgttttggaggtccccccagagagcagagtgggccatggcagaagtagggggttggttggacctgtcacatgaaatggatcagcacttgaatggggagaagtggagggagaggccctgggcctgtccctgcggggaaatcttttatggaagaagggctggacccactttacctgcagtttcttcccagctcgggcagatggcagaagggaccccttggactttttctcgccatccctccccccagcgcaggggcacaagctgagcttgtaaaagcccacagatgttgggggctggagaaggggcaggagagcatcacactcagccccagcctcctcaacctcttggggccccgtgatggggaggagagggcaggtgcggggaggctctggccttccttggtgccccgccctttgtttgcactattggacttaggagtgccgagggtggggagatggagctgcccgtctcagtgtgtgagtgtgtgtgtgcgtgcatgtgtgtgtgtgtgtgtgtgtgtgtgtgtgtctgtctgcctgtctctctcctcctggacccagggcagccaagggcagggataggcgcagtggtcagatgaagcagcgccagagaggggacctcccagctcttatttgcaccctccccacctcaccaactttggtccctctctgggggcatgaatggttaacaaacaccagagcagtactccaatattggagagtcgctgggggcacagggctttgaatcagggtagtatcctgccttccctcccctgaccccacatggtctcagggcccccttagggccccctaccccactgatagcttcctccttctctggcacaaggggagccccagggcttgggggagggcgtaaggtggggggaaatgccactgcttttagcaaaagcctccctcccagaattagccagcttgcctcctgcaccccacccccaccaaccaggggagccactaagctgactaacaactgtcccctcacccaccagctatttccccagggtagagtgggcaattctcaccttcaaagagtccccgcctgcccaggcctttggcacagaggctgagtggacagtcaggagagaggcgagaggcaaggcgaagcctgtgtccctgtttcagttgcactggggttggagcccagggtaggggtttccagcttccccaggctccggccttgtcagtctctttgcatgtgtggatttttctgtgtgtgtttctgtttgggtttttgttgttgggttttttttttttttttaataaagaaaagaagatgtgtatatttttggcaacgacagaaacgtagtgcagatatatttttgcctgtgctgctcaactgttttttttttctgatactgaaaataatattaatattcctgttgataagactttgtaagatgttagggagctgataatggaggggggtgggaatccttcaaaggcaatttcttaggcacttgcaagggcttgggggagggggaggcagttgtgatgacctcagaaatactcactttttattaatgctaaatatgttagaaagaaatgatagcattcagcattttattcttcttaatctattaagctgtgtaactccctgccccaaaccactgaaaagaaaagtaaccttcaggccaggcgcggtggctcacgcctgtaatcccaacactttgggaggctgaggcgggcggatcacttaaggtcaggagttcaagaccagcctggccaacatggtgaaaccccgtctctatcaaaaattagccgggcatggtggcacgtgcctgtaatcccagctacttgggaggctgaggcacgagaattgcttgaacccaggaggctgaggctgcagtgagccaagattgtgccactgcactccagcctgtgtgagagagtgagactctgtctcaaaagagaaaaaaaaagaaaagtaaccttcagagattcttagaagagttgctcattcacacccacgcccttgcccaaggctggcccacttagagcgaaacttaacttttgtctggatgggaagagaagtaagtctaccccgaggttgccatgttgaagagtgagaggtccaagtgattctgtgcattgaaaccaagacaccccacccagaacacttcttccctccctcagcccaaaccaaaggctggggttctcatctccaagtggctgttctccaactttcccaagccgcttgcattccccagactggactactgtggcggttaggttagatttgaagacggggcccaggctgggtatgaacgggtgcagccctcttctcctcttcccccccacatctctcatgagagaggtagtggcatttccttctcagggagcttcaatgggaaaggtctcgaaagcttcaggaggagcagaataccaacgcagggggatggctgtaacgatctcaccgtctcctaacctcagtcccttttttgagagtgaatggtggagggtgggaagggacccagatttgtagatctctttgtctgggggaggggaaggatgtggtttgcagagcggaagcagagtttggaaacgcatgagagcagagcttcgtgtgttcccaccctcagtgaggaggtgtgagtgggtgagcatgtggagttgggtgttcccaccctcagtgaggaggtgtgagtgggggtgcatatagaggcagtgcctgctgtggggtcacaactggtgcatgccagcgccaaagggacctgtctttaggggtcatttcagccagctcctcccatcacagatgacagctccaagcctagaaggggctcagtgacagggccaggacaagccctcaggactgtggcctcctggcccttggttcccctgccccacaacatggtctccacatggctggctggctggctgtccctgtgtgtgtgtgacacacggtgtgagtgcagggctgtgcccggggtgggagggtgtctatgtggcactgactgtcttagctcagagctggtggatcctctccatggacaatgacactttaaggattgtcttggtttgtttttcctatttgtggggtattttccccctcaggctcctgggtctgctgctgcctcaaggtgtcctgaccttgaggctgatgaggggacccctgcctgtttcccccatactgagttctagggaggtgctcaccccagactcttaggaagggtctagagaaatgagaggagcccaagccaggggccagctccgagaaagggtaacctccacgcttctctctcccaaattggaaatgaagacaggttttcaaaggcacaggctccccctgccagcttctaggatcttccttggtgtgcaatgggccagttaggggtaggcagcttgcacccagttctcctttatctcaacttattttcctggggagaggtgcctagagggattgaggtaacttcaactgggaattccaaggaaggtgggcaagtagccttggctctctcccaccatgtccatcaggattgagagtgtgtctagctcccgaccactttgtcttgacctactgaaaagttgggaactgaggggtgccttcattcccctttgttcactttctccagctcaacttgggacttgggtggtgggactggagacctcacccctgctcccgtcccgccccctttctatcccaacctgtttccatgtagcagacccttcctagggagcagggaggggaagccacagattgcaaacccaggggctcctttttcattctttctaaaaccttgatatcctcagcccaaaggcgatgcccccctgccacctccaagcctggaattgtgcataacccggatcttgtatctttgtataacggatgttatttgtacgaagggcagttcgtaaacagcacttgttcttttaataaaagaatgttttgcaaaaaaaaaaaaaaaaatccgaaga

SEQ ID NO: 2800 - DNA, 3365 bp, Homo Sapiens
  NM_005938
aaaagggggagggaactgcggctaaggagacgttcggtgatgggagcgcaatatatgaggggatacagtgcctcaggtttaaaagagcaggaagctgagtgagaggttgcagaaaaagtgtcttcgctcggcagaggttacaggtggcatctcagaaagagctttgaggctacaggctgtagtcgggaaggggatcggagaactgtgtgaagggacagcttagggactagcgtcctgggactagggggaagttcgcgactttctgaagactggcaggaatgtgcctcctggccctcgatgcttcccccctgaggggaggcatcgtgagggactgtggcaggcttcactgaacgctgagccggggaggtccaactccacgtatggatccggggaatgagaattcagccacagaggctgccgcgatcatagacctagatcccgacttcgaaccccagagccgtccccgctcctgcacctggccccttccccgaccagagatcgctaaccagccgtccgagccgcccgaggtggagccagatctgggggaaaaggtacacacggaggggcgctcagagccgatcctgttgccctctcggctcccagagccggccgggggcccccagcccggaatcctgggggctgtaacaggtcctcggaagggaggctcccgccggaatgcctggggaaatcagtcatatgcagaactcatcagccaggccattgaaagcgccccggagaagcgactgacacttgcccagatctacgagtggatggtccgtactgtaccctacttcaaggacaagggtgacagcaacagctcagcaggatggaagaactcgatccgccacaacctgtccctgcacagcaagttcatcaaggttcacaacgaggccaccggcaaaagctcttggtggatgctgaaccctgagggaggcaagagcggcaaagccccccgccgccgggccgcctccatggatagcagcagcaagctgctccggggccgcagtaaagcccccaagaagaaaccatctgtgctgccagctccacccgaaggtgccactccaacgagccctgtcggccactttgccaagtggtcaggcagcccttgctctcgaaaccgtgaagaagccgatatgtggaccaccttccgtccacgaagcagttcaaatgccagcagtgtcagcacccggctgtcccccttgaggccagagtctgaggtgctggcggaggaaataccagcttcagtcagcagttatgcagggggtgtccctcccaccctcaatgaaggtctagagctgttagatgggctcaatctcacctcttcccattccctgctatctcggagtggtctctctggcttctctttgcagcatcctggggttaccggccccttacacacctacagcagctcccttttcagcccagcagaggggcccctgtcagcaggagaagggtgcttctccagctcccaggctctggaggccctgctcacctctgatacgccaccaccccctgctgacgtcctcatgacccaggtagatcccattctgtcccaggctccgactcttctgttgctgggggggcttccttcctccagtaagctggccacgggcgtcggcctgtgtcccaagcccctagaggctccaggccccagcagtctggttcccaccctttctatgatagcaccacctccagtcatggcaagtgcccccatccccaaggctctggggactcctgtgctcacaccccctactgaagctgcaagccaagacagaatgcctcaggatctagatcttgatatgtatatggagaacctggagtgtgacatggataacatcatcagtgacctcatggatgagggcgagggactggacttcaactttgagccagatccctgagtcatgcctggaagctttgtcccctgcttcagatgtggagccaggcgtgttcatatctactctttacccttgagccctccccaggaatttgggaccctgctttagagctagggtggggtctggtcacacacaggtgttgaagaaattataaagataaagctgccccatctggggacgatatggggagggagatgggaggggaaaggggagagggtttttctcactgtgccaattagggggtaaggccccctctcaggagccatcatcggctttccccattcctacccacttaggctttgtagcaagatgagcaatgctgttggaaatgtgaagtcaccagtggccttacccctgcctttgggagcaggatttttttgtagagagtcttatctgagctgagccaggctagctggagcctgggatttctatgcagtggccccttaggccagtgatgtgcggtgggtgggctgtttaggggatctggaagggccaaggtctgagcactggagtggctcgccaggccaaatcacccttagaaggctgcagataacagaaaggctttttataaacttttaaagaaatataaacacaaatatagagattttttaaccatggcagggtgctagtggtgggcagaatgcttttttttctttctgaaggctttgtgatagtgacatgatacaaacactacagacaataaatattaggagacacagggaagtggggagaggtggggagtaatagtaaacacagggaagagctcccctacggaccaggtatagagaaaggtctatgcagaaataggttagagtttccctaacaaaaaagctaacccaggtcccctcattccttcaacttgtgcctgggagtgtgtggtgttagggtgcagccacactcttctatgacccagcatgggttagtgctatggtgggagagtacattgaaggcctggaattagcttggggccagggaagggactgggaggggagagaagagaaggagggaaggatttaggatggtaaagttaggtacagagacctccctgttcaaggcccctgacagctgtccctgcccttcttccccttccctgactgcaggggttatgtggaagtgtgtgtggcagcaggcagcggggaggggaggaacagggaagggggagctggggagcttggctgagggtctgggaaatgagcagggatggggggggatgtggatcaggtttactagcacctgccagggaggccatctggggctccttctccaccccagcccccaaagcagcccttcccccagtgccctttgcatcgtcccctcccccacccctgctgtgggttcccatcatttcctgtgtcagcgcctggcctacccagattgtatcatgtgctagattggagtggggaagtgtgtcaaatcaataaatgaataaattcaataaatgcctataaccagcaaaaaaaaaaaaaaaaa

SEQ ID NO: 2801 - DNA, 396 bp, Homo Sapiens
  NM_005950
actccgccttccacgtgcacccactgcctcttcccttctcgcttgggaactctagtctcgcctcgggttgcaatggaccccaactgctcctgtgccgctggtgtctcctgcacctgcgccagctcctgcaagtgcaaagagtgcaaatgcacctcctgcaagaagagctgctgctcctgctgccctgtgggctgtgccaagtgtgcccaaggctgcatctgcaaaggggcatcggagaagtgcagctgctgcgcctgatgtcgggacagccctgctcccaagtacaaatagagtgacccgtaaaatctaggattttttgttttttgctacaatcttgacccctttgctacattcccttttttctgtgaaatatgtgaataataattaaacacttag

SEQ ID NO: 2802 - DNA, 397 bp, Homo Sapiens
  NM_005951
accacgccctccacgtgttccactgcctcttctcttctcgcttgggaactccagtctcacctcggcttgcaatggaccccaactgctcctgcgaggctggtggctcctgcgcctgcgccggctcctgcaagtgcaaaaagtgcaaatgcacctcctgcaagaagagctgctgctcctgttgccccctgggctgtgccaagtgtgcccagggctgcatctgcaaaggggcgtcagagaagtgcagctgctgtgcctgatgtcgggacagccctgctgtcagatgaaaacagaatgacacgtaaaatccaggattttttttttctacaactccgactcatttgctacattcctttttttctgtgaaatatgtgaataataattaaacacttagacttga

SEQ ID NO: 2803 - DNA, 7986 bp, Homo Sapiens
  NM_005955
ggaagtgacgttaggggaaggtgggggcaatcatggtgccgctggggaggggagaagctgctgctgccgccgttgccgggagccgcggagacaagtcattacgttttcatttctcacaactgggctgagcacaactgaaccatgggggaacacagtccagacaacaacatcatctactttgaggcagaggaagatgagctgacccccgatgataaaatgctcaggtttgtggataaaaacggactggtgccttcctcatctggaactgtttatgataggaccactgttcttattgagcaggaccctggcactttggaggatgaagatgacgacggacagtgcggagaacacttgccttttctagtagggggtgaagagggctttcacctgatagatcatgaagcaatgtcccagggttatgtgcagcacattatctcaccagatcagattcatttgacaataaaccctggttccacacccatgccaagaaatattgaaggtgcaaccctcactctgcagtcggaatgtccggaaacaaaacgtaaagaagtaaagcggtaccaatgtacctttgagggctgtccccgcacctacagcacagcaggcaacctgcgaacccaccagaagactcaccgaggagagtacacctttgtctgtaatcaggagggctgtggcaaagccttccttacctcttacagcctcaggatccacgtgcgagtgcacacgaaggagaagccatttgagtgtgacgtgcagggctgtgagaaggcattcaacacactgtacaggctgaaagcacatcagaggcttcacacagggaaaacgtttaactgtgaatctgaaggctgcagcaaatacttcaccacactcagtgatctgaggaagcacattcgaactcatacaggggaaaagccatttcggtgcgatcacgatggctgtggaaaagcatttgcagcaagccaccaccttaaaactcacgttcgtacacatactggtgaaagacccttcttctgccccagtaatggctgtgagaaaacattcagcactcaatacagtctcaaaagtcacatgaaaggtcatgataacaaaggacactcatacaatgcacttccacaacacaatggatcagaggatacaaatcactcactttgtctaagtgacttgagccttctgtccacagattctgaattgcgagaaaattccagtacgacccagggccaggacctcagcacaatttcaccagcaatcatctttgaatcaatgttccagaattcagatgatacggcaattcaggaagatcctcaacagacagcttccttgactgaaagttttaatggtgatgcagagtcagtcagtgatgttccgccatccacaggaaattcagcatctttatctcttccacttgtactgcaacctggcctctccgagccaccccagcctctactacctgcctcagctccgtctgctcctccgcctgctccctccctaggacctggctcccagcaagctgcatttggcaacccccctgctctcttacaacctccagaagtgcctgttccccacagcacacagtttgctgctaatcatcaagagtttcttccgcacccccaggcaccgcagcccattgtaccaggactttctgttgttgctggggcttctgcatcagcagcggcagtggcatcagctgtggcagcaccagccccaccacaaagtactactgagcccctgccagccatggtccagactctgcccctgggtgccaactctgtcctaactaataatcccacaataaccatcaccccaactcccaacacagctatcctgcagtccagcctagtcatgggagaacagaacttacaatggatattaaatggtgccaccagttctccacaaaaccaagaacaaattcagcaagcatctaaagttgagaaggtgttttttaccactgcagtaccagtagccagtagcccagggagctctgtccagcagattggcctcagtgttcctgtgatcatcatcaaacaagaagaggcatgtcagtgtcagtgtgcatgccgggactctgcaaaggagcgggcatccagcaggagaaagggctgctcctccccaccccctccagagccgagcccccaggctcctgatgggcccagcctgcagctcccagcgcagactttctcttcagcccctgttcccgggtcatcatcctctaccttgccctcctcctgtgagcaaagccgacaagcagagactccttcagaccctcagacagaaacattaagtgccatggatgtgtcagagtttctatccctccagagcctggacaccccgtccaatctgattcccattgaagcactactgcagggggaggaggagatgggcctcaccagcagcttctccaagtgaagggcccatgtgtgctcacctctgggaaaagcgggtgagcaggaggcatgaggtacaatgcctgccatcatgggtcagaaatttgaaggatgaagaaatctactgtttgaaatcctcacctttcagacgtattttctttattcacatcccaggagcatccattttaaggaactattctttggaaaaaaacaaaaaacaaaaaaaacaacaaaaaaagctaagttataagtgaactgtttggctgcactgtatgtcacttttgcttgttgtcatgtgaacttggaaactaaggttactcgtgtgcataaaaattctaaatgaaagggtgtggtttccatcaatctgatgctgcccatcgcttgcactggggtctttgtggatcgggcaggagttttcagtgtgttgggtgttgctccttcctatgtgtcttttgaatctgaggctgacatttgcttggaaggccagacccttgctccatcagagagggcagtggcaaaggccagtgaggcagctgtgagttggacagggttcaggtgagatggtgttgtcatttgtgcttagtgttggtggtgctcagggtggataacacgggtcgttctgcagcccgcttcagcacaaataggcagcttaaggcctggctcacaggctgtggggttgatctggctctgcagaggccctaggcagcttgttgactgctgtctgttgatgacgtgtgtgcaaagcaggctctagcaacatgatcactgtccttgccttcctggttctttctctcggttggttgccagggcttgcagatcgcagtgaattttccttggggaacatcgctgttttgtcctagagtgaacttgtggcttatggccagtgctgtttggtggtctgccttctttttaatggtattttcttcctcagagcagaagggctgcattttgcttatcagaagaaggtgcagatttaagggaattcatatgaggtggcatgtaattggcaggccaggtgtcctggttccaggttccagccaggctttgggttgccccctccatctctgcccccctctggattttgcatacagcctcatacagtgcaaacaaggatgtgacttgctcagcttagtcatgtgatttatttaaaaaaaaaaaaaaaagaaacacaaaacgatgatcttctactcagggtatagcaaaacaaaaaaattccctttccaccaaaaagcctgaaatgttgcaataagttatctcatttggaatgtttcattaagttgtgttataggaaaaaattgtgtgtgtgtgttatagaattatatccatatgtctgcctttggctccaagtcattgcctcttaaaataaaagatacaatccatactagcatgaaaagtttccctcaacaggctatattaacatagtcatgagtgctgaccaaactcaccgagctcagaggccaggcatggcctgaggtgcagaataggcctctgcctcccaagagccctttccttgccctgagcaaggagtggtgttccacaaacaaggctgctcttctaagccaacagtgtcaggcaggaagcagccataattttgccttgcattttcattccctaatgtaaagggatctgcattggtcactctcctgttctctgagccattgctcagggccagccaagatattattgagaacagataatttaccttggagccagaggccctccctgcctttagcaaggatgttcagggacagacaaagagggcagtggtggtgaatgttgttactgccatgaggagaaatggcagtaagaaatcttaactacaagcagccaatttctcattccaggaccctagccagaataattgacttctttttttttttgagacagagttttgcttttgttgccctggctggagtgcagtggcgcaatcttggctcaccgcaacctccacttcccaggttcaagcaattctgcctcagcctcccgagtagctgggattacaggcatgcgccaccacgcctggctaattttgtatttttagtagagacggggtttctccatgttggtcaggctggtctcgaactcccaacgtcaggtgatcctcccgcctcagtctcccaaagtgctgggattacaggtgtgagccaccatgcctggtctagggaattgacttctttttgaccttctgcactcccttccccaaaaggattgtggcttctgttgaccattgacctcagcagaagttgataaggcaggaggtttccagtcctcctggaaaaccaactgctgagcatgagttgtccttggctgtctctgggcctcgcacccatgggaagttttgaggtagggcccttgctgtttacaacttctgagagagtagtgatgggaccccaaagtaagcttgtatcagagggcagtaatgaccttcccatatccccatcctgtggtcacctgggatttgggttccctggggcggaagtgggaaataggagcccagggaaggacatctgaagcacccacagtttaaatagcgactcttcttggttagccagggctgtgctcatgttgggccctacccaggtcagtggccttttcactctcaaagatcgggggtgacgaagcagcatcttaaacagtgtttaggctgacagatttttccagttgaagaagctgaagtatctgccttttgagggtgactctagattacaagagagactatcagatccaatcagcttttgaaaaatcaggaatgtgcttaaaatgccagtgagtggttgtgaagatcaggtttatttcccaggataggcagtctttctttccctccttttccagttctcttttcctacctgtccttccataagcctggtctctagtgccgaggaccttggagaagagagggcccctagctaagctggagccagaaagaaccttcatggtgagtgtggtttcccaaacttgggaaatgaacctagggtgaggttagggaggatttgtagaattctagcaggtaaaaatcaagcctttttcccctcccatagtaaacttaaccattttcaccctgtacgttatcttctagctcctactaacatctccaattagacaaccgcttcaaagggtgcttagcaccagggattggggttcatggacttaggaggtggtaaggaaactggctggcaccaccaaactgccttagtgaacttggcccttcccaggcaggtaggttgggcattgagggaaggtggcccagtctttgctggcagggtctggccagtctcatgggggcaccaccagtttggtgacagaagtggtgtcatttattgaattccacctccgtttagaaggagatcatggtacaaagcccaggaggggccttaagatgtgaagatctctctgagtaaaaggcaaggggcttctcttcttcacctctgggatagttggtagatcggagagttttattttcagggtcaaggctgtggactgatggggatattggagggtgggtgggttttcctgagagactttgtataatgctgaatgtgtccagagggacaagtttgcagaacctcatattggtatattaaagaaataataaaataaaaaagcactttaggttattttatctttaacccgattgctgcaatttcttttgtgtgtatatatacatatatatactttccacaaagttttattttttgctcagaataaaaagttaaattgaggtgtgaaaagaaaagcacttaccttggtgcaatatgtgtagcttgatggtcgttgtcccatgtggccctggcctggcagcgtttttccgctcaatcagccctgtgctgtgagactgtccatagggaaacactattatgcattctcagcaaccgctcaatctatgcaagccttccctgtgtgccccagggcgccccctcaggctctctgaagaactgctgtgggtcctgttttctgctgactgttgaggccctttttcatcacttcttggtctctcgccatcttttccctcttcaccattacaaaatgatgcctgaaaggaaggaacagattgttcctaggtagaaacctggcaccttctagacttttatatttgtaatcacatccattgtccttaaagacttttccagagtgattgaaaccattgatttgtggaactgcaacaatatttctcaagagtttacaattgtcttacaccaccaatcagaaatatgtttggggaggcatgggtggcagggggcaacatgagccatttccatactgctccccatactacctgtgttggttccttaagcaaaaaggcctccagccttcattaaatcctataaacaaacattacatcccatgaatcattatcaactttcttcctttactccacctcccccattttatcttcaattctcaggctatagaatagacaagttttagaatatacttcagccaaagcagaaggattttcatagatccaatatgcaaatagttctgctgtgacatagatcagaaattgtctgttccttaatatttgggggtggaggcaacaaaactgaagcatatttctgattggttagccattttggcctgtttcctcttgcatgttttttagggagagagggaaacagtcctgtatttcttctgatgccctttggggaagccgacgaccactgggcatttctcactgttactcctgttcaagagagggcttctcagtctgcactgaaaaatgcaaattaaactggatctttatgtcaatgtgtacatagtacaagcttttttactggaattgaggtttaaaaccacacactgcccttttggtggtgtgcctgttgggccaaaaattgggtgataatgtagtgtcactttctcagctcaatgcagtttctactttttcttatgggaaaatttttcataaaacctttttgcaccaaaacccaggggtgttttttgcaatatccttgttatcctcgtagtgtgccaagtcagaggctttctcttgcccttttcctgctgtgttctcaggcctcccaagggctatttgactcaacagtctacatccttcgttgtgttttggagaatgtgggggtgggggtcagagttcaaggtgtctgttcccttttcctgtgaactctttctagtccctatttggggagggtggctggaaacagatttttgctgaatttctggctcagatcttctagccaggaaaggcaagagcccccaagagcccttttttttgacatacactaatcattggccggggtcttggtgacaacttttaaaatcccaaatagttttatttggattatgtaaaagtaagtgtgaaacatgggaacaacggacttccactgagcgatgtgaaaacgttacaggttcagtacttccaaaggaagaaacctccaaacccaaaaaagaataaatatgaatttgtatttttgaagaatgtgaaataatggtgtttgcttaattgctcattttgtataaacttaatattgtactttaaaatatctgctaaaaagtgaaaatttaactttttggaattgaaaaagcaatattaaatactaatgaaatcctaattaaatgcttatttaaatctggtaaaaaaaaaaaaaaa

SEQ ID NO: 2804 - DNA, 3466 bp, Homo Sapiens
  NM_005956
aattacggccggattccggagtcctttccagctccctcttcggccgggtttcccgccgaatacaaaggcgcactgtgaactggctctttctttccgccaatcatttccgccagccattcatcaccgattttcttcatcttcccctccctcttccgtcccgcagtccccgacctgttagctctcggttagttaagggactcgggtccttccgaactgcgcatgcgccaccgcgtctgcagggggagaagcgggcaggggcgcaggcgcagtagtgtgatcccctggccagtccctaagcacgtgggttgggttgtcctgcttggctgcggagggagtggaacctcgatattggtggtgtccatcgtgggcagcggactaataaaggccatggcgccagcagaaatcctgaacgggaaggagatctccgcgcaaataagggcgagactgaaaaatcaagtcactcagttgaaggagcaagtacctggtttcacaccacgcctggcaatattacaggttggcaacagagatgattccaatctttatataaatgtgaagctgaaggctgctgaagagattgggatcaaagccactcacattaagttaccaagaacaaccacagaatctgaggtgatgaagtacattacatctttgaatgaagactctactgtacatgggttcttagtgcagctacctttagattcagagaattccattaacactgaagaagtgatcaatgctattgcacccgagaaggatgtggatggattgactagcatcaatgctgggaaacttgctagaggtgacctcaatgactgtttcattccttgtacgcctaagggatgcttggaactcatcaaagagacaggggtgccgattgccggaaggcatgctgtggtggttgggcgcagtaaaatagttggggccccgatgcatgacttgcttctgtggaacaatgccacagtgaccacctgccactccaagactgcccatctggatgaggaggtaaataaaggtgacatcctggtggttgcaactggtcagcctgaaatggttaaaggggagtggatcaaacctggggcaatagtcatcgactgtggaatcaattatgtcccagatgataaaaaaccaaatgggagaaaagttgtgggtgatgtggcatacgacgaggccaaagagagggcgagcttcatcactcctgttcctggcggcgtagggcccatgacagttgcaatgctcatgcagagcacagtagagagtgccaagcgtttcctggagaaatttaagccaggaaagtggatgattcagtataacaaccttaacctcaagacacctgttccaagtgacattgatatatcacgatcttgtaaaccgaagcccattggtaagctggctcgagaaattggtctgctgtctgaagaggtagaattatatggtgaaacaaaggccaaagttctgctgtcagcactagaacgcctgaagcaccggcctgatgggaaatacgtggtggtgactggaataactccaacacccctgggagaagggaaaagcacaactacaatcgggctagtgcaagcccttggtgcccatctctaccagaatgtctttgcgtgtgtgcgacagccttctcagggccccacctttggaataaaaggtggcgctgcaggaggcggctactcccaggtcattcctatggaagagtttaatctccacctcacaggtgacatccatgccatcactgcagctaataacctcgttgctgcggccattgatgctcggatatttcatgaactgacccagacagacaaggctctctttaatcgtttggtgccatcagtaaatggagtgagaaggttctctgacatccaaatccgaaggttaaagagactaggcattgaaaagactgaccctaccacactgacagatgaagagataaacagatttgcaagattggacattgatccagaaaccataacttggcaaagagtgttggataccaatgatagattcctgaggaagatcacgattggacaggctccaacggagaagggtcacacacggacggcccagtttgatatctctgtggccagtgaaattatggctgtcctggctctcaccacttctctagaagacatgagagagagactgggcaaaatggtggtggcatccagtaagaaaggagagcccgtcagtgccgaagatctgggggtgagtggtgcactgacagtgcttatgaaggacgcaatcaagcccaatctcatgcagacactggagggcactccagtgtttgtccatgctggcccgtttgccaacatcgcacatggcaattcctccatcattgcagaccggatcgcactcaagcttgttggcccagaagggtttgtagtgacggaagcaggatttggagcagacattggaatggaaaagttttttaacatcaaatgccggtattccggcctctgcccccacgtggtggtgcttgttgccactgtcagggctctcaagatgcacgggggcggccccacggtcactgctggactgcctcttcccaaggcttacatacaggagaacctggagctggttgaaaaaggcttcagtaacttgaagaaacaaattgaaaatgccagaatgtttggaattccagtagtagtggccgtgaatgcattcaagacggatacagagtctgagctggacctcatcagccgcctttccagagaacatggggcttttgatgccgtgaagtgcactcactgggcagaagggggcaagggtgccttagccctggctcaggccgtccagagagcagcacaagcacccagcagcttccagctcctttatgacctcaagctcccagttgaggataaaatcaggatcattgcacagaagatctatggagcagatgacattgaattacttcccgaagctcaacacaaagctgaagtctacacgaagcagggctttgggaatctccccatctgcatggctaaaacacacttgtctttgtctcacaacccagagcaaaaaggtgtccctacaggcttcattctgcccattcgcgacatccgcgccagcgttggggctggttttctgtaccccttagtaggaacgatgagcacaatgcctggactccccacccggccctgtttttatgatattgatttggaccctgaaacagaacaggtgaatggattattctaaacagatcaccatccatcttcaagaagctactttgaaagtctggccagtgtctattcaggcccactgggagttaggaagtataagtaagccaagagaagtcagcccctgcccagaagatctgaaactaatagtaggagtttccccagaagtcattttcagccttaattctcatcatgtataaattaacataaatcatgcatgtctgtttactttagtgacgttccacagaataaaaggaaacaagtttgccatcaaaaaaaaaaaaaaaaaa

SEQ ID NO: 2805 - DNA, 7150 bp, Homo Sapiens
  NM_005957
atgacgataaaggcacggcctccaacgagacctgtgggcacggccatgttgggggcggggcttccggtcacccgcgccggtggtttccgccctgtaggcccgcctctccagcaacctgacacctgcgccgcgccccttcactgcgttccccgcccctgcagcggccacagtggtgcggccggcggccgagcgttctgagtcacccgggactggaggtaggaacccagccatggtgaacgaagccagaggaaacagcagcctcaacccctgcttggagggcagtgccagcagtggcagtgagagctccaaagatagttcgagatgttccaccccgggcctggaccccgagcggcatgagagactccgggagaagatgaggcggcgattggaatctggtgacaagtggttctccctggaattcttccctcctcgaactgctgagggagctgtcaatctcatctcaaggtttgaccggatggcagcaggtggccccctctacatagacgtgacctggcacccagcaggtgaccctggctcagacaaggagacctcctccatgatgatcgccagcaccgccgtgaactactgtggcctggagaccatcctgcacatgacctgctgccgtcagcgcctggaggagatcacgggccatctgcacaaagctaagcagctgggcctgaagaacatcatggcgctgcggggagacccaataggtgaccagtgggaagaggaggagggaggcttcaactacgcagtggacctggtgaagcacatccgaagtgagtttggtgactactttgacatctgtgtggcaggttaccccaaaggccaccccgaagcagggagctttgaggctgacctgaagcacttgaaggagaaggtgtctgcgggagccgatttcatcatcacgcagcttttctttgaggctgacacattcttccgctttgtgaaggcatgcaccgacatgggcatcacttgccccatcgtccccgggatctttcccatccagggctaccactcccttcggcagcttgtgaagctgtccaagctggaggtgccacaggagatcaaggacgtgattgagccaatcaaagacaacgatgctgccatccgcaactatggcatcgagctggccgtgagcctgtgccaggagcttctggccagtggcttggtgccaggcctccacttctacaccctcaaccgcgagatggctaccacagaggtgctgaagcgcctggggatgtggactgaggaccccaggcgtcccctaccctgggctctcagcgcccaccccaagcgccgagaggaagatgtacgtcccatcttctgggcctccagaccaaagagttacatctaccgtacccaggagtgggacgagttccctaacggccgctggggcaattcctcttcccctgcctttggggagctgaaggactactacctcttctacctgaagagcaagtcccccaaggaggagctgctgaagatgtggggggaggagctgaccagtgaagaaagtgtctttgaagtcttcgttctttacctctcgggagaaccaaaccggaatggtcacaaagtgacttgcctgccctggaacgatgagcccctggcggctgagaccagcctgctgaaggaggagctgctgcgggtgaaccgccagggcatcctcaccatcaactcacagcccaacatcaacgggaagccgtcctccgaccccatcgtgggctggggccccagcgggggctatgtcttccagaaggcctacttagagtttttcacttcccgcgagacagcggaagcacttctgcaagtgctgaagaagtacgagctccgggttaattaccaccttgtcaatgtgaagggtgaaaacatcaccaatgcccctgaactgcagccgaatgctgtcacttggggcatcttccctgggcgagagatcatccagcccaccgtagtggatcccgtcagcttcatgttctggaaggacgaggcctttgccctgtggattgagcggtggggaaagctgtatgaggaggagtccccgtcccgcaccatcatccagtacatccacgacaactacttcctggtcaacctggtggacaatgacttcccactggacaactgcctctggcaggtggtggaagacacattggagcttctcaacaggcccacccagaatgcgagagaaacggaggctccatgaccctgcgtcctgacgccctgcgttggagccactcctgtcccgccttcctcctccacagtgctgcttctcttgggaactccactctccttcgtgtctctcccaccccggcctccactcccccacctgacaatggcagctagactggagtgaggcttccaggctcttcctggacctgagtcggccccacatgggaacctagtactctctgctctagccaggagtctgtgctcttttggtggggagcacttgcgtcctgcagaggaccacagtgggtggcacctcctgagaaggcgaggagagtggttgttgccaactaagccctcgaaccaaggcagcctccagagccagcctgggactcccagtgaacttacacttggagcccgtgcagtacaggcaaaacacgcaagggcatcaggcactggtggcatcgtagaagagatgtggcaaagtgctgtacccttccacctcctagaggtgggcagctgggccccacctacttgtgactgaaggggcacaccactgccctgcctgcccacttagccgtccatggcaccagccccctggatgggcattgggctgacacctaccatgctgctttttggcacagttgtctattctgagccttgagagaaaaagtgccccttaagggttgaaggcagtctgaacccttgtgcttggtggggctcgtggccttccccttttgcctggctgtggaggcctgatgctgccccgttccctgtcagaggctaagatgagatttgccagcacaggggccccagatctgcctgggcctgtgcagcagcccagcttcctggtgtatttttcaggtaggcccttgtcctgccagctgccttcctcatcccctcgtcctgtcccagaggttatctgcctggcctggctccccacgagtcacctgcaagccccagggcctgggggcagtgactggcaggtgcagatgggctgtttcgtgtagtggaagagcagcctgatggccaagggggtggacgcaattgtgggatgtcctctttactcccttcctggcctcactggctggggcagaggggcagccgctaggagagactgaaagcagcagctaggactgaggagtgggttttattgtccttcagagctcttcaagctgtcccctctgtcatcactccctggatgtgtggggcatggttccttccctgggaaggctaagttcagttctgttttttattctatgagaacaagtcacagctgcagctgggccccatgctctgccccaagcccccaaccccgcggtgctctggcggcttcctgtccactctcggggcccttggggcctggcttgctccagggtcttgggctactggcagctcctctccttgggctcctggctgccaggcgttggtgccacttcttaaaggcctggaaccagggaggagaggaaatgctattgttgtgggctttctccggggtctgtgctgtgcctgctagagcaacccctgtacccagctccttttgtccccagggcccctccctctgccccaagcagccagccagtcttgcctaggccaaatgcacaagctcagaatagatctgatggtgagctgggaagctgtactcagagcagagcaaatgagggagggggcgctcaggacccaggccctccatgggctagtgtgagtggcagccatgcctcatgccacaccttcttcgcaaactgatggaccgggtgggcctggcctgagctggggccacaaatcaaagcaagggctccagcatccagcctgtgtgttctgtaatggaactgaccccctcccctgaaaacgaaggggccccggggctggcaagcagggaaagctccacggtgcgtggctgtggcacagacttctggaaggctggctgagtggaatgcagggaagagggcagtacctgggaaaggacccacccatcttcctgctgctgtaactgctgagccactcgcagtcgcaggatccgctgccaccacgtctgccaggcccatctcaggtgccactccctgagctttggggacagttggcagagaaggcctcttgtgctcacgctcccccgcagtccccagcccttctgcctttctcccccgacactgctgcaccagagtgaaagggctatggcaagggggtgtcatctgaggagtattaagaatgcagattcctgggcctgtcccccaaggttttggagtcagtaggtccaagggccatacttttgagaggggtttgggttaagtatgaggtgaaatgggagatggtcagtgtggagaggggtgcacccactcaccagggtccgcaccagctgctctgccccttgggcatccacccagtgctgccatgccactgccaggcacctggcctgctgggaaccccgcagcccgtgaagcagtgcctcgaggcaccggcgctgcaggtacttcctcctgatggccaagagcatcgtgacccttcagggccagaaggagggcagagccatgggcctgggcctgcttttccaggatcctgcaggaacgagcactggccagagagggcccagctgtagccatggctcaggcaagcccctcagcccttgcccccatccctcggacccaccaaactgcacacacagctcctcttaccgtagcctccgtttatgggccttgctttgggctttgcaggctctgggctcagggctggagtgcgctcttggtccctggtccctcgtccacaggggcaggcctgggacccagctactctgtccaggccactgtggccagagctggaaggcagggcagagggaatgttccctgcaccctggaaaggggagttgagtcacaagaggttaaggtgggtccaggaaggcagctgctcttagtgcccgcctaggagttgagtacagtgaggagggtggaggaaggtgctgagcttagccttgtgccctgcccccatctccccaggcctccagcctctcccggctgcctgccgcccaaagagaaatcacaggggcggggcaggaatgcaaagtgttttctcagaacagctgaaacattccgaagagggaatggatggggagaatggtcaatacacataagaccgtgtcccaaggagctgatttccaggcccctgaggactggagaccgcttcacccctgcacttcagacaccgtttgtcccccggggcaaggtctccttactctgagcccaggccgttccccttggcttcctccgtccacccaggctgcactgcagtgatggcgcgggaggcaccagctctgtggcctgtgtccagcagctgcgggtctgaaggaatagccagagaggagcacctgaaccccatgggcttggacttcctggggccccgctgggatttcttcgctgctctagctggcaggacacatcccggcctcttccacccattcccccatgtggctgaagacattccaacaatggggtgggcccataatagttagccctcagtcagttcccggagcacagccctgggagggggctatttctctccccactgaaaacatttcaaagctgagttacttgtctgaggcctcatccctcggaagccgtctgactccagagtctgagcccccggctagtaccctatagagagggggctctccaaaggggctgctggggcatgtgtgcctgtggcagaaaagaggagaccctggaattcagcaccctgggtgccattcccagcgtttagtttctagaggcctcagtttctccatcagcttatgggatccttgtctttactgacaagaatggaatagaaatgtaaaagtactctgaaaagcaattgccctgtaacttatctagaaagaaaagaccctgagactccagaatctgctgttgccatagccccatatgtgtgaattctgcaactagccaaggctagttcctttcaattccatttaaaaaacaaaaaccagcaggtgtggtggctcatggcgtaatgggcctgcccaatgctttgggaggccaaggcaggtagatcgcttgagcccaggagtttgagacaagccctggcaacatagtgagatcccatttctacaaaaaaaaaaaaaaaaaaattagccgggtgtggtggcacacgcctgtagtctcagctactcaggtggctgaggtgggaggatcgtttgagccctggaggttgaggctgcagtgagctgtgatcgcaccactgcactctggcctgggcgacagagtgagacactgtctgagaacaaaaaacgactgaaaaaaaaaatcaccttagctttttctcttagaatcttctctaaaacgtattctttgtggcattctgaaataggattcatgatgatgcctgttgatcttagggacactacctcacctgccagtatctttggggctgtgtccttcaaggacatgtccccagactgctgtgcagtgtcattttttgtgtttggtttggtggtggcttcttcccccttgctaggctatcaacctcttatcaccacttgttggtgtcagaactaactgcttctggtctggagagggactgaccgatgcctttgggtagagagaattatgaaagaaattttggtatttttctactttatattttctgaggtttctgtaataagcatatttcacttttccaataagaaaaaaaaaaacttggcctggcgcggtggctcacacctgtaatcccagcactttgggaagtcgaggtgggaggatcacttgagttcaggagttcgagaccagcttgggcaatatggtgaaaccccgtctctactaaaaatacaaaaattagccaggcgtggtggcgtgcacttgtagtcccagctactcaggaagctgaggcgggagaatcacttgaacccgggaggcagaggttgcagtgagctgagatcactcctctgcttcagcctgggcaattgagccagactctgtctcaaaaataaacaaaaaaacttgac

SEQ ID NO: 2806 - DNA, 2725 bp, Homo Sapiens
  NM_005967
ctctcccagtctctaagccgcggcgtctccgcggccgagaggccccagcgcccgcctccccggcccccgcccccacccccgcccccggctctgcccacgccctccgcccgccagcccggcagccagcgcagctccgggcctcgctccctgtgcgtcctgcgggggcggaggcgcggagaggcggcaagcgcagccggggagggtgggggggcagaggcacagacagaggcgcggaggctcggagagagaagacgtggagggagggacagagcctggacagcggtggacacggcatcgtgcgcggggaagagggcagcacgcagcaggcgccgagcgccgggcaccgagaagggcagcccgggtgatctccggccgtccatgcacagagcgccttcccccacagccgagcagccgccgggcggaggggacagcgcccgccggaccctgcagcccagactcaagcccagtgcccgagccatggcactgcctcggacgctgggggagctgcagctgtaccgggtcctgcagcgcgccaacctcctttcctactatgagaccttcatccagcagggaggggacgacgtgcagcagctgtgtgaggcgggtgaggaggagtttctggagatcatggcacttgtgggcatggccaccaagcccctccatgtccggcgcctgcagaaggcactgagagagtgggccaccaatccagggctcttcagtcaaccagtgcctgctgttcccgtctccagcatcccgctcttcaagatctctgagactgcgggtacccggaaagggagcatgagcaatgggcatggcagcccaggggaaaaggcaggcagtgcccgcagttttagccccaagagcccccttgaacttggagagaagctatcaccactgcctgggggacctggggcaggggacccccggatctggccaggccggagcactccagagtcggacgttggggcaggaggagaagaggaggctggctcgccccccttctccccccctgcagggggaggagtccctgaggggactggggctggggggctggcagcaggtgggactgggggtggtccagaccgactggagccagagatggtacgcatggtggtggaaagtgtggagaggatcttccggagcttcccaaggggggatgctggggaggtcacatccctgctaaagctgaataagaagctggcacggagcgttgggcacatctttgagatggatgataatgacagccagaaggaagaggagatccgcaaatacagcatcatctatggccgtttcgactctaagcggcgggagggcaagcagctcagcctgcacgagctcaccatcaacgaggctgctgcccagttctgcatgagggacaacacgctcttattacggagagtggagctcttctctttgtcccgccaagtagcccgagagagcacctacttgtcctccttgaagggctccaggcttcaccctgaagaactgggaggccctccactgaagaagctgaaacaagaggttggagaacagagtcaccctgaaatccagcagcctcccccaggccctgagtcctatgtacccccataccgccccagcctggaggaggacagcgccagcctgtctggggagagtctggatggacatttgcaggctgtggggtcatgtccaaggctgacgccgccccctgctgacctgcctctggcattgccagcccatgggctatggagccgacacatcctgcagcagacactgatggacgaggggctgcggctcgcccgcctcgtctcccacgaccgcgtgggccgcctcagcccctgtgtgcctgcgaagccacctctcgcagagttcgaggaagggctgctggacagatgtcctgccccaggaccccatcccgcgctggtggagggtcgcaggagcagcgtgaaagtggaggctgaggccagccggcagtgagggttggactggtgtcttcagacccaggacctcagacttctggctcacacagacccccacgctctccatccccggaatctagtcacaaccctggatccttcctctgcccttctcctgcctccccacctgctccatgggcataagactgtggggcttcaagcaataacaagcagaggcctggagagaggacacaaggagggtgcgtggtgccctcacccctgcccagagcgagggggcaaggactctgcctccagggcatctggggttttcccctccctcacacaacacactcccattctctttaggtttgcaccagtggtgtgagcagttggactcagtttggacaagggggaaagggggacttccctgggaaggtccagctaaaagtggcaacatttgcccccagaattgggggcctgggaacactggacctgctccttctcccctctccttccccgtttttgtgcttctggtttgtttctttaattaatttaacaagtgctgcagtttgccctcccattcccatctatcccccaagtcctttgcaatttcttccctgccctacataggggcggtgggtgtgggatcccttcactggccccctcgggaggcctgggttggactcagggtctcctccagctgggggctggaccgcagcacctatctgagcagttagagcgtctttcttttcagattgtgtacagtagattatttattttgttattttggaataaaatttattttatggcttaggaaaaaaaaaaaaaaa

SEQ ID NO: 2807 - DNA, 2553 bp, Homo Sapiens
  NM_005968
tggttgcgtcgggtcacgtgggcgcgcaggcgcagcgcggtgcagcccgttcgctcacacaaagcccagacgcggagaaaatggcggcaggggtcgaagcggcggcggaggtggcggcgacggagatcaaaatggaggaagagagcggcgcgcccggcgtgccgagcggcaacggggctccgggccctaagggtgaaggagaacgacctgctcagaatgagaagaggaaggagaaaaacataaaaagaggaggcaatcgctttgagccatatgccaatccaactaaaagatacagagccttcattacaaacataccttttgatgtgaaatggcagtcacttaaagacctggttaaagaaaaagttggtgaggtaacatacgtggagctcttaatggacgctgaaggaaagtcaaggggatgtgctgttgttgaattcaagatggaagagagcatgaaaaaagctgcggaagtcctaaacaagcatagtctgagcggaagaccactgaaagtcaaagaagatcctgatggtgaacatgccaggagagcaatgcaaaaggtgatggctacgactggtgggatgggtatgggaccaggtggcccaggaatgattactatcccacccagtatcctaaataatcccaacatcccaaatgagattatccatgcattacaggctggaagacttggaagcacagtatttgtagcaaatctggattataaagttggctggaagaaactgaaggaagtatttagtatggctggtgtggtggtccgagcagacattcttgaagataaagatggaaaaagtcgtggaataggcactgttacttttgaacagtccattgaagctgtgcaagctatatctatgttcaatggccagctgctatttgatagaccaatgcacgtcaagatggatgagagggccttaccaaaaggagatttcttccctcctgagcgtccacaacaacttccccatggccttggtggtattggcatggggttaggaccaggagggcaacccattgatgccaatcacctgaataaaggcatcggaatgggaaacataggtcccgcaggaatgggaatggaaggcataggatttggaataaataaaatgggaggaatggaggggccctttggtggtggtatggaaaacatgggtcgatttggatctgggatgaacatgggcaggataaatgaaatcctaagtaatgcactgaagagaggagagatcattgcaaagcagggaggaggtggaggtggaggaagcgtccctgggatcgagaggatgggtcctggcattgaccgcctcgggggtgccggcatggagcgcatgggcgcgggcctgggccacggcatggatcgcgtgggctccgagatcgagcgcatgggcctggtcatggaccgcatgggctccgtggagcgcatgggctccggcattgagcgcatgggcccgctgggcctcgaccacatggcctccagcattgagcgcatgggccagaccatggagcgcattggctctggcgtggagcgcatgggtgccggcatgggcttcggccttgagcgcatggccgctcccatcgaccgtgtgggccagaccattgagcgcatgggctctggcgtggagcgcatgggccctgccatcgagcgcatgggcctgagcatggagcgcatggtgcccgcaggtatgggagctggcctggagcgcatgggccccgtgatggatcgcatggccaccggcctggagcgcatgggcgccaacaatctggagcggatgggcctggagcgcatgggcgccaacagcctcgagcgcatgggcctggagcgcatgggtgccaacagcctcgagcgcatgggccctgccatgggcccggccctgggcgctggcattgagcgcatgggcctggccatgggtggcggtggcggtgccagctttgaccgtgccatcgagatggagcgtggcaacttcggaggaagcttcgcaggttcctttggtggagctggaggccatgctcctggggtggccaggaaggcctgccagatatttgtgagaaatctgccattcgatttcacatggaagatgctaaaggacaaattcaacgagtgcggccacgtgctgtacgccgacatcaagatggagaatgggaagtccaaggggtgtggcgtggttaagttcgagtcgccagaggtggccgagagagcctgccggatgatgaatggcatgaagctgagtggccgagagattgacgttcgaattgatagaaacgcttaagcagttgccttttttaaacatcgatacgagacctctgaatttgtattttttcttgttaaccattttaatttgttggctggatgtataaagatgtttaaaaaattcagttgctttttggggtaatttgaattacttttttaatgactggggttccatttgactgtttgcattgagattgcaatgtgcgcaattttttttgtagttgtggcatcttgttgacatcgaatatgactttgataataaataccggttcctgaaaaaaaaaaaaaaaaaaaaaaaa

SEQ ID NO: 2808 - DNA, 2142 bp, Homo Sapiens
  NM_005973
ggaagttgtagttcctgtattggtgaggcaaggaggaggcggagtgactcggcggccattagctgtgtgtagttgcccgggactaggagcttaagtgaagaggtacgccttgttcggtggaaatcagccgtagccatgagtttctgccggggctagccctagagtacggagcaggcggacttttcggttccccgccccgccaggtggcggggcctactaggcctccgggcatccccggtctcaagtaggcctcatctgccggcaagggcgcccgaaacgcgggaggcgccatgtcgctggttgcttacgccagcagcgatgagagcgagccggatgaggctgagcccgagccggaggaagaggaggcggtggctcctacatctgggcccgctttagggggcttgttcgcttctctccctgcgcccaagggtccggccttgctgcctccgccccctcagatgctggcgccagcctttcccccgccgctgttgcttcccccacccaccggagaccccaggcttcagcctcctccccccttgcccttcggcctgggaggcttccccccacctccaggcgtgagcccggctgaagcggcgggagttggggagggactgggattggggttgccctcgccccgaggccctggcctcaatctgccccctccaattggcggtgccggtcccccgctggggcttcccaagccaaagaagaggaaagagcccgtgaagatcgcggcgccggagttgcataagggagattcagattctgaggaagatgaacccacaaagaagaaaactatccttcagggatccagtgaggggactggtttgtctgccttgcttccccaacctaaaaacctgactgtgaaagagactaacaggttgctcctgccccatgccttctcccgcaaaccctcggatggctcccctgatactaagccctccagactggcttctaagaccaagacttcctctcttgcccctgttgtgggcaccacaaccaccactccgtcgccctctgctatcaaggctgctgccaagagtgctgccctgcaggtgacaaagcagatcacgcaggaagaagacgacagtgatgaggaagtagcccccgaaaactttttctccctccctgaaaaggctgagccacctggagttgagccatacccttaccccatccccactgtccctgaagagctgcctccaggcacggaaccagagccggctttccaggacgatgcagccaatgccccccttgaattcaagatggcagcaggttcaagtggggccccttggatgcctaagcctggggacgactacagctacaatcagttttccacatatggcgatgccaatgccgctggtgcttattatcaggattattacagtggtggctactatcctgcacaggacccggccctggtccccccccaggaaattgccccagatgcctccttcatcgatgacgaagcatttaagcggctgcagggcaagaggaaccgagggagagaagaaatcaactttgtggagatcaaaggtgatgaccagctcagtggggcccagcaatggatgactaagtcattgacagaagagaaaaccatgaagtcattcagcaaaaagaaaggtgagcagccaacaggccagcagcggcggaaacaccagatcacatatcttattcatcaggccaaggagcgggagctggaactgaagaacacctggtcagagaacaagctcagccgccgtcagacccaagccaaatatggattctagggctctggaactgattgctcccaggatctcctgccagcccagctggcctggcccccagcttcacctctgggaccccagctgctctaagcccaggatctctttccccaaggacccagccctcgcctctgcgagaatgaacatatttgatagatttttcttaacaagttagaaaattcagctcctttctgtcctggagctagcaaagacttgtgtgatgcctccgaaggggctctgagttctggggtgggagttttgctctctgtcaggtgtgataaaatgttgaaccctccccaccaccacttttttttttttaaaccagggatgtctgttgaaataaaacattcagtctgacaaacaaaaaaaaaaaaaaaaaaaa

SEQ ID NO: 2809 - DNA, 970 bp, Homo Sapiens
  NM_005978
ctcccctcaccccggtccaggatgcccagtccccacgacacctcccacttcccactgtggcctgggtgggctcaggggctgcccttgacctggcctagagccctcccccagctggtggtggagctggcactctctgggagggagggggctgggagggaatgagtgggaatggcaagaggccagggtttggtgggatcaggttgaggcaggtttggtttccttaaaatgccaagttgggggccagtggggcccacatataaatcctcaccctgggagcctggctgccttgctctccttcctgggtctgtctctgccacctggtctgccacagatccatgatgtgcagttctctggagcaggcgctggctgtgctggtcactaccttccacaagtactcctgccaagagggcgacaagttcaagctgagtaagggggaaatgaaggaacttctgcacaaggagctgcccagctttgtgggggagaaagtggatgaggaggggctgaagaagctgatgggcagcctggatgagaacagtgaccagcaggtggacttccaggagtatgctgttttcctggcactcatcactgtcatgtgcaatgacttcttccagggctgcccagaccgaccctgaagcagaactcttgacttcctgccatggatctcttgggcccaggactgttgatgcctttgagttttgtattcaataaactttttttgtctgttgataatattttaattgctcagtgatgttccataacccggctggctcagctggagtgctgggagatgagggcctcctggatcctgctcccttctgggctctgactctcctggaaatctctccaaggccagagctatgctttaggtctcaattttggaatttcaaacaccagcaaaaaattggaaatcgagataggttgctgacttttattttgtcaaataaagatattaaaaaaggcaaaaaaaaaa

SEQ ID NO: 2810 - DNA, 510 bp, Homo Sapiens
  NM_005980
tgaggctgccttataaagcaccaagaggctgccagtgggacattttctcggccctgccagcccccaggaggaaggtgggtctgaatctagcaccatgacggaactagagacagccatgggcatgatcatagacgtcttttcccgatattcgggcagcgagggcagcacgcagaccctgaccaagggggagctcaaggtgctgatggagaaggagctaccaggcttcctgcagagtggaaaagacaaggatgccgtggataaattgctcaaggacctggacgccaatggagatgcccaggtggacttcagtgagttcatcgtgttcgtggctgcaatcacgtctgcctgtcacaagtactttgagaaggcaggactcaaatgatgccctggagatgtcacagattcctggcagagccatggtcccaggcttcccaaaagtgtttgttggcaattattcccctaggctgagcctgctcatgtacctctgattaataaatgcttatgaaatga

SEQ ID NO: 2811 - DNA, 1749 bp, Homo Sapiens
  NM_005981
aatccagaggcaggggagggacggtgcaggcgcagagtattgggtttggctggcctcgatttaaagagacagaagctgtcggggtcctggaagacggtccccaataccctccccccaagtccttgggaccacttgggtccccagagctggggagatggtttgtggcggctttgcctgctccaagaatgcgctttgcgctctcaacgtggtctacatgctggtgagcttgttgctcattggagtggctgcttggggcaagggcctgggtctggtgtccagcatccacatcatcggcggagtcattgctgtgggagtcttccttctccttattgcagtggctggactggtgggtgctgtcaaccaccaccaagtcctgctgttcttttacatgatcatccttggtttggtcttcatcttccaatttgtaatctcttgctcatgtctggctattaaccgaagcaaacagacagatgtcatcaatgcttcttggtgggtcatgagcaacaagactcgggatgaactggaaagaagttttgattgttgtggcttattcaacctcacaaccctgtatcaacaagattatgatttctgcactgcaatctgcaagagccagagccccacatgccagatgtgtggagaaaagtttcttaagcattcagacgaagccctgaaaatcctagggggtgttggactcttctttagctttacagagatccttggtgtttggctagcaatgagatttcggaatcagaaggatcctagagccaaccccagtgcctttctatgagactttggatccttctgacttttcttctgctctctctaagctttctcttcctcccttagggaatatctagggtctgtaaccgttttggtttgagaaaaaggaaaggccccttgtcacatcctctaaaattgatggaatagcaagactttatgccttgacatattttagtgggagccagactataaggaataaaaggaaaaactttcttcctctctctccaagaggatatgggaagcttctgtgagtgcataggatgggggctggagtcattcttagctgtttcccttcctctgtccatatactggatcacctcaacataccctggtgtggctctaagggtaaatcagggatagggccaaggagaaaacaaccaagaactctttcctgtaataagcaggatccagtttgagaaagtttagcgaatataaaagtaaaagccatttaaaaatctatattctttttttttttttgacacagagtcttgctctgttgcccaggctggagtgcaatggcatgatctcggctcaccgcaacctctgcctcccgggttcaagcgatcctcctgcctcagtctcccaagtagctgggattacaggtgtgcaccaccacgcctgactaattttgtatttttagtagagacagggtttcaccatgttagtcaggctggtctcgaactcctgacctcaggtgatccacccgcgttggcctcccaacgtgctgggattataggcgtgagccaccacgccccgcctaaaatccatattcaaagaagcaatttcagttcctttctaagctttgtcagtcaaggggctccactgacttcctaggccctgtaatttaaccagtctttaaggttttgcaggaaagtcccttcttccaagtggtttttccaaatcgcacaatggcaaagccaaacagaggaagaaacattaaaaaaaaaaaaaagaccattaaaaaaaaaa

SEQ ID NO: 2812 - DNA, 1620 bp, Homo Sapiens
  NM_005984
gcggccgccccgcccctgggaccataaccggccgccgccgccaccgcggaccgagcgcggagttctggagtctcggacccgaagccgccacagggcgccccgcctcccgcccgccatgcccgcgccccgcgccccgcgcgctctggcggccgccgcgcccgcgtccgggaaggccaagctgacgcacccggggaaggcgatcctggcaggcggcctggcgggtggcatcgagatctgcatcaccttccccaccgagtacgtgaagacgcagctgcagctggacgagcgctcgcacccgccgcggtaccggggcatcggggactgcgtgcggcagacggttcgcagccatggcgtcctgggcctgtaccgcggccttagctccctgctctacggttccatccccaaggcggccgtcaggtttggaatgttcgagttcctcagcaaccacatgcgggatgcccagggacggctggacagcacgcgtgggctgctgtgcggcctgggcgctggcgtggccgaggccgtggtggtcgtgtgccccatggagaccatcaaggtgaagttcatccacgaccagacctccccaaaccccaagtacagaggattcttccacggggttagggagattgtgcgggaacaagggctgaaggggacgtaccagggcctcacagccactgtcctgaagcagggctcgaaccaggccatccgcttcttcgtcatgacctccctgcgcaactggtaccgaggggacaaccccaacaagcccatgaaccctctgatcactggggtcttcggagctattgcaggcgcagccagtgtctttggaaacactcctctggatgtgattaagacccggatgcagggcctggaggcgcacaaataccggaacacgtgggactgcggcttgcagatcctgaagaaggaggggctcaaggcattctacaagggcactgtcccccgcctgggccgggtctgcctggatgtggccatagtgtttgtcatctatgatgaagtggtgaagctgctcaacaaagtgtggaagacggactaagcctagagaggccgcaaggggaccgccccaggcaccgccagagtgtcctgctacctttgtctcacgattccagtgcagtagtgccaaaaggccccttcccacgtccctcgagctctgtagcctggtctgtgcattgtggctgtcaaatccatgtgtcccccctgtggtctgtgtgtgacaccaccactgtgtcccagtgtctggcccagccatggctggatgtgcatctggcctatgaccctgtgcctgtgtttcatgttctgtgtcacgtgaccctgtgccccgcctcccggggtgcccgtgtggcctgggtcctcggccctgtagccctggcccggtcccagtccggtgccttccaccctgccctggcctaccacagctgcctccgggcctcggcctggcttcaccgcattccaggggctgcagccccctgcttctcccgccattggccttaactggccctcgggccctctctccgccccggacagggtggcacccaccactctcaggaccaccctgccaaggcagaataaaccggatcctgttgcaaaaaaaaaaaaaaaaaaaaa

SEQ ID NO: 2813 - DNA, 4449 bp, Homo Sapiens
  NM_005993
ggccagcgtcggttgccgccttagcgggcgcctccttttcatccctcatccttcatccctggctttcgcgctctagcggagtgggatctgcgaacacgtgaggcgggggcgcggtccccaggctgccgagatggccctgagcgacgaaccggccgcgggcggccccgaggaggaggcggaggacgagacactggcctttggcgcggcgctggaagcgttcggcgagagcgcggagacccgggcgctgctgggccgcctgcgggaggtgcacggcggcggcgcggagcgcgaggtggccctggagcggttccgcgtaataatggacaaataccaggagcagcctcatctgttggacccgcaccttgaatggatgatgaacttgttgttggacatagtgcaagatcagacatctccagcttcccttgtacatctggcttttaaatttctttacatcatcaccaaggttcgaggctataaaacatttcttcgtttatttcctcatgaagttgccgatgtagagcctgttttagatttggtcacaattcagaatcccaaggaccatgaagcttgggaaacccgctacatgcttttgctctggctctccgtgacctgcctgatcccttttgatttttctcgccttgacgggaacctcctcacccagcctgggcaagcacgaatgtccataatggaccgtattctccaaatagcagagtcctacttgattgtcagtgacaaggcccgagatgcagctgctgtccttgtgtccagatttatcacacgtcctgatgtcaagcaaagcaagatggctgagttcctggactggagcctgtgcaatctggcccgttcctccttccagaccatgcagggggtcatcaccatggatgggacgctgcaggccctggcacaaatatttaaacatggaaaacgtgaagactgtttgccctatgctgccactgtcctcaggtgcctcgatggctgcagactccctgagagcaaccagaccctgctgcggaagctgggggtgaagcttgtgcagcgactggggctgacattcctgaagccgaaggtggcagcatggaggtaccagcgtggctgccgatctttggctgcaaatctgcagctcctcactcagggtcagagtgagcagaagccactcatcctgaccgaagatgacgacgaagatgacgacgtcccagagggggtggagcgtgtgatagagcagctgctggtcgggctgaaggacaaggacacggtcgtgcggtggtctgcagccaagggcatcggtaggatggctggcaggcttcccagagccctggcggatgatgtggtcgggtctgtgctggactgcttcagtttccaggagactgacaaggcgtggcatgggggatgtctggcgctggcagagctgggcaggagaggcctgttgctgccgtctcgactcgtggatgttgtcgccgtgatcctgaaggcgctgacctacgacgagaagcggggtgcctgcagcgtgggcaccaacgtcagggacgccgcctgctacgtgtgctgggccttcgcgcgtgcctatgagcctcaggagctgaagccctttgtgactgcaatctcgagtgcactggtgattgctgcggtgtttgaccgagacataaactgcagaagagcagcctctgccgccttccaggagaatgtggggagacagggcactttccctcatggtattgatattttgaccacagctgactattttgccgtcggtaacagatccaactgtttcctggttataagtgtgtttattgccggctttcctgagtacacgcagccaatgatagaccacctggttaccatgaagatcagccactgggatggggtcatccgagagttggctgcgagggcgctgcacaacctggcccagcaggcacccgagttcagcgccacgcaagtcttcccgaggctgctgtccatgacactgagtccagatcttcacatgaggcatgggtcgattctcgcctgcgcagaagttgcttacgccttgtacaaacttgcagcccaagagaacaggcccgtcacggaccatctggacgagcaggcagtgcagggcctgaagcagattcaccagcagctctatgatcgtcagttatacaggggtctgggaggacagctcatgagacaagcagtgtgtgttttaatagaaaagttgtcactttccaaaatgccctttagaggtgacaccgtaattgatggttggcaatggctgataaatgacactttgagacatctccatctcatctcaagtcactcccgccagcagatgaaggatgcagcagtctcggccctggctgctctatgcagtgaatattacatgaaggagccgggggaggcagatcccgcaattcaggaggagctgatcacgcagtacctggctgagcttcggaaccccgaggagatgactcgctgtggcttctcgttggccttgggcgcccttccaggcttccttctgaaaggccggctccagcaggttctcacaggtttaagagcagttacccacacttcccccgaggacgtaagttttgctgagtccaggagagacggcttgaaggccattgcgaggatttgccagactgttggtgtgaaagcaggagccccagacgaagctgtgtgcggagagaatgtttcccagatttactgtgcgctgctgggctgcatggacgactacaccacggacagcagaggggacgtgggcacctgggtccgcaaggccgccatgaccagtctgatggatctgacacttctgctggctcggagccagcctgagctgatcgaggcccatacctgtgagcgcatcatgtgctgtgtggcccagcaggccagtgagaagattgaccgtttccgtgctcacgccgccagcgtgttcctgacgctcctgcactttgacagccctcccatcccccacgtgccccaccgaggagaactggaaaagctgtttcccaggtccgatgtggcctccgtgaactggagtgcaccttcccaggccttcccacgcatcacccagctccttgggctgcccacctaccgctaccacgtcctgctggggctagtcgtgtccctgggcggcttgacggagtcgacgatccggcactccacccagagcctctttgagtacatgaagggcattcagagcgacccgcaggccctgggcagcttcagcgggacccttctgcagatctttgaggacaaccttctgaatgagagggtgtccgtgccgctgctgaagacgctggaccacgtgctcacccacggctgcttcgacatcttcaccacggaggaggaccacccctttgctgtgaagttgcttgcgctctgtaagaaagaaatcaagaattcaaaagatatccagaagctcctgtcaggcatcgcagtgttctgcgagatggtgcagttccccggcgacgtgaggaggcaggccctcctgcagctgtgtctgctcctctgccaccgtttcccgctgatccggaagaccacggccagccaggtgtacgagacattgctcacctacagtgacgtcgtgggcgcggatgtgctggacgaggtggtgactgtgctcagtgacactgcgtgggacgcggagcttgcagtggtgagagagcagcgcaaccgtctgtgtgaccttctgggcgtacccaggccccagctggtgccccagcctggtgcctgctgaagccagtcctggagcccatacctcacccctgcctggtgaggatgtcttgttcctgagggaggccggtgtggaaagcctcgcacagtggtgcctccagctgttgaagggtagcgctggcccttggaggctggcactagctgacagcttttcctctctgcacctgcgctctggtgacttggggtggacgcctctgccttcacttgaacacaaatgtgcttcctataaaatcatgtaccaagaagttcctgccttttgtctctgagcctgatgtgtgtaggggtgatggaaaggctcactgcccaggggtcagccagaggggaggtgggctgcactcctcctgcctggagaccaggcccccttcttgcctggtgctgtccctgctgtgggagacgtctggccacaggcagtgccccacccagtcttggagagagatgaatgttaaatcagaggttcaaatgctagagaactgagaagccctggtggcaggcatggtctggagtgctgggcagatgctgtttctgggcccgtctgcctggtgggggtgctgtcctcccccctgtgcacacgtgagcatcgtgcatgtggcccctctgcagtgcaggagtcactgattgatgggtgtgccgaccagcagcttcacaaatgtctgctgcaaggggaatcgtcagagtccaatgtgtgcctctacagtaatgtcggaaataaataccattcttgaaataaaaaaaaaaaaaaaaaaa

SEQ ID NO: 2814 - DNA, 2107 bp, Homo Sapiens
  NM_005998
ctaacttgtctggccgttcttgcgtagggggcgggactaaggctgtcaattggtctgtttttgtgccgatcaatgagatgggtgcggtgattggcgactaccttgagagtagcgggttgaggtgtaagccctgaggaggcagcgttttctgggcttctgtctggttctctctctccagaaggttctgccggttcccccagctctgggtacccggctctgcatcgcgtcgccatgatgggccatcgtccagtgctcgtgctcagccagaacacaaagcgtgaatccggaagaaaagttcaatctggaaacatcaatgctgccaagactattgcagatatcatccgaacatgtttgggacccaagtccatgatgaagatgcttttggacccaatgggaggcattgtgatgaccaatgatggcaatgccattcttcgagagattcaagtccagcatccagcggccaagtccatgatcgaaattagccggacccaggatgaagaggttggagatgggaccacatcagtaattattcttgcaggggaaatgctgtctgtagctgagcacttcctggagcagcagatgcacccaacagtggtgatcagtgcttaccgcaaggcattggatgatatgatcagcaccctaaagaaaataagtatcccagtcgacatcagtgacagtgatatgatgctgaacatcatcaacagctctattactaccaaagccatcagtcggtggtcatctttggcttgcaacattgccctggatgctgtcaagatggtacagtttgaggagaatggtcggaaagagattgacataaaaaaatatgcaagagtggaaaagatacctggaggcatcattgaagactcctgtgtcttgcgtggagtcatgattaacaaggatgtgacccatccacgtatgcggcgctatatcaagaaccctcgcattgtgctgctggattcttctctggaatacaagaaaggagaaagccagactgacattgagattacacgagaggaggacttcacccgaattctccagatggaggaagagtacatccagcagctctgtgaggacattatccaactgaagcccgatgtggtcatcactgaaaagggcatctcagatttagctcagcactaccttatgcgggccaatatcacagccatccgcagagtccggaagacagacaataatcgcattgctagagcctgtggggcccggatagtcagccgaccagaggaactgagagaagatgatgttggaacaggagcaggcctgttggaaatcaagaaaattggagatgaatactttactttcatcactgactgcaaagaccccaaggcctgcaccattctcctccggggggctagcaaagagattctctcggaagtagaacgcaacctccaggatgccatgcaagtgtgtcgcaatgttctcctggaccctcagctggtgccagggggtggggcctccgagatggctgtggcccatgccttgacagaaaaatccaaggccatgactggtgtggaacaatggccatacagggctgttgcccaggccctagaggtcattcctcgtaccctgatccagaactgtggggccagcaccatccgtctacttacctcccttcgggccaagcacacccaggagaactgtgagacctggggtgtaaatggtgagacgggtactttggtggacatgaaggaactgggcatatgggagccattggctgtgaagctgcagacttataagacagcagtggagacggcagttctgctactgcgaattgatgacatcgtttcaggccacaaaaagaaaggcgatgaccagagccggcaaggcggggctcctgatgctggccaggagtgagtgctaggcaaggctacttcaatgcacagaaccagcagagtctccccttttcctgagccagagtgccaggaacactgtggacgtctttgttcagaagggatcaggttggggggcagcccccagtccctttctgtcccagctcagttttccaaaagacactgacatgtaattcttctctattgtaaggtttccatttagtttgcttccgatgattaaatctaagtcatttgagaaagtt

SEQ ID NO: 2815 - DNA, 1514 bp, Homo Sapiens
  NM_006000
agttctcactgagacctgtcaccccgactcaacgtgagacgcaccgcccggactcaccatgcgtgaatgcatctcagtccacgtggggcaggcaggtgtccagatgggcaatgcctgctgggagctctattgcttggaacatgggattcagcctgatgggcagatgcccagtgacaagaccattggtggaggggacgactccttcaccaccttcttctgtgaaactggtgctggaaaacacgtaccccgggcagtttttgtggatctggagcctacggtcattgatgagatccgaaatggcccataccgacagctcttccacccagagcagctcatcactgggaaagaggatgctgccaacaactatgcccgtggtcactataccattggcaaggagatcattgacccagtgctggatcggatccgcaagctgtctgaccagtgcacaggacttcagggcttcctggtgttccacagctttggtgggggcactggctctggcttcacctcactcctgatggagcggctctctgttgactatggcaagaaatccaagctggaattctccatctacccagccccccaggtgtctacagccgtggtcgagccctacaactctatcctgaccacccacaccaccctggagcactcagactgtgccttcatggtggacaacgaagcaatctatgacatctgccgccgcaacctagacatcgagcgcccaacctacaccaacctcaatcgcctcattagccaaattgtctcctccatcacagcttctctgcgctttgacggggccctcaatgtggacctgacagagttccagaccaacctggtgccctaccctcgcatccacttccccctggccacctatgcaccagtcatctctgcagaaaaggcataccacgagcagctgtcggtggcagagatcaccaatgcctgctttgagcctgccaaccagatggtaaagtgtgatccccggcacggcaagtacatggcctgctgcctgctgtaccgtggagatgtggtgcccaaggatgtcaacgctgccattgccgccatcaagaccaagcgcagcattcagtttgtggactggtgccccacaggcttcaaggttggtatcaactaccagcctcccactgtggtgcctgggggtgacctggccaaggtgcagcgtgccgtgtgcatgctgagcaacacgaccgccatcgccgaggcctgggcccgcctggaccacaagttcgacctgatgtatgccaagagggcgtttgtgcactggtatgtgggtgagggcatggaggagggtgagttctccgaggcccgtgaggatatggctgccctggagaaggattatgaggaggtgggcatcgactcctatgaggacgaggatgagggagaagaataaagcagctgcctggagcctattcactatgtttattgcaaaatcctttcgaaataaacagtttccttgcacggttaaaaaaaaaaaaaaaaaaaaaaaaaaaaaaaaaaaa

SEQ ID NO: 2816 - DNA, 1677 bp, Homo Sapiens
  NM_006009
aggttctcttacatcgaccgcctaagagtcgcgctgtaagaagcaacaacctctcctcttcgtctccgccatcagctcggcagtcgcgaagcagcaaccatgcgtgagtgcatctccatccacgttggccaggctggtgtccagattggcaatgcctgctgggagctctactgcctggaacacggcatccagcccgatggccagatgccaagtgacaagaccattgggggaggagatgattccttcaacaccttcttcagtgagacgggggctggcaagcatgtgccccgggcagtgtttgtagacttggaacccacagtcattgatgaagttcgcactggcacctaccgccagctcttccaccctgagcaacttatcacaggcaaagaagatgctgccaataactatgcccgagggcactacaccattggcaaggagatcattgacctcgtgttggaccgaattcgcaagctggccgaccagtgcacgggtctccagggcttcttggttttccacagctttggtgggggaactggttctgggttcacctcgctgctcatggaacgtctctcagttgattatggcaagaagtccaagctggagttctctatttacccggcgccccaggtttccacagctgtagttgagccctacaactccatcctcaccacccacaccaccctggagcactctgattgtgccttcatggtagacaatgaggccatctatgacatctgtcgtagaaacctcgatattgagcgtccaacctatactaacctgaataggttaataggtcaaattgtgtcctccatcactgcttccctgagatttgatggagccctgaatgttgacctgacagaattccagaccaacctggtgccctatccccgcatccacttccctctggccacatatgcccctgtcatctctgctgagaaagcctaccatgaacagctttctgtagcagagatcaccaatgcttgctttgagccagccaaccagatggtgaaatgtgaccctcgccatggtaaatacatggcttgctgcctgttgtaccgtggtgacgtggttcccaaagatgtcaatgctgccattgccaccatcaagaccaagcgtaccatccagtttgtggattggtgccccactggcttcaaggttggcatcaactaccagcctcccactgtggtgcctggtggagacctggccaaggtacagagagctgtgtgcatgctgagcaacaccacagccattgctgaggcctgggctcgcctggaccacaagtttgacctgatgtatgccaaacgtgcctttgttcactggtacgttggggaggggatggaggaaggtgagttttcagaggcccgtgaggacatggctgcccttgagaaggattatgaggaggttggtgtggattctgttgaaggagagggtgaggaagaaggagaggaatactaaagttaaaacgtcacaaaggtgctgcttttacagggaagcttattctgttttaaacattgaaaagttgtggtctgatcagttaatttgtatgtagcagtgtatgctctcatatacaattactgacctatgctctaaaacatgaatgctttgttacagacccaagctgtccatttctgtgatgggttttgaataaagtattccctgtcttaaaaaaaaaaaaaa

SEQ ID NO: 2817 - DNA, 1194 bp, Homo Sapiens
  NM_006012
ccttaatggcgcccgcccagactcctggaagtgagcggcctagcgagcgagctcccaggcgcaaagcacgccggaagctgtagttccgccatcggacggaagccgaccggggcgtgcggagggatgtggcccggaatattggtagggggggcccgggtggcgtcatgcaggtaccccgcgctggggcctcgcctcgccgctcactttccagcgcagcggccgccgcagcggacactccagaacggcctggccctgcagcggtgcctgcacgcgacggcgacccgggctctcccgctcattcccatcgtggtggagcagacgggtcgcggcgagcgcgcctatgacatctactcgcggctgctgcgggagcgcatcgtgtgcgtcatgggcccgatcgatgacagcgttgccagccttgttatcgcacagctcctcttcctgcaatccgagagcaacaagaagcccatccacatgtacatcaacagccctggtggtgtggtgaccgcgggcctggccatctacgacacgatgcagtacatcctcaacccgatctgcacctggtgcgtgggccaggccgccagcatgggctccctgcttctcgccgccggcaccccaggcatgcgccactcgctccccaactcccgtatcatgatccaccagccctcaggaggcgcccggggccaagccacagacattgccatccaggcagaggagatcatgaagctcaagaagcagctctataacatctacgccaagcacaccaaacagagcctgcaggtgatcgagtccgccatggagagggaccgctacatgagccccatggaggcccaggagtttggcatcttagacaaggttctggtccaccctccccaggacggtgaggatgagcccacgctggtgcagaaggagcctgtagaagcagcgccggcagcagaacctgtcccagctagcacctgagagctgggcctcctctccagaatcatgtggaggggccagaggcctgccagacccccagctgggccctgctcaccccttgttgctgggcttggaggggcctcttgaggaacttttaatttgcaggggtgcccgctatggacggggcattccagctgagacactgtgattttaaattaaatctttgtggtctttgcaaaaaaaaaaaaaaaaaaaaaaaaaaaaaaaaaaaaaaaaaaa

SEQ ID NO: 2818 - DNA, 1816 bp, Homo Sapiens
  NM_006014
ggcgaccacggtgtcttcaaaagccccgtcagggttggcttcctggggccggaccgactgtgggtcagtttgcaccagcgctctggaatcgagttacgcgcgaaagggcagagtttctggaggaaaccgcagcctctcaaccgctgaccgggtctcagaaggcccccggcagggccgcttggcgggaactgaccacgcgccagtcaggctctccagggacctgcgcaggcgcgtgtgggcggagtcgtgcgcagggggcggggcttcgggaaggagccacagagagggcggggcgtaggacctgcgcttcgggggtggagtcggagcggcgcggcggcggtcatgcgggacgcggatgcagacgcaggcggaggcgctgacggcggggatggccggggtggccacagctgccgcgggggcgtggacacagccgcagctccggccggtggagctcccccagcgcacgcgccaggtccgggcagagacgccgcgtctgcggccagggggtcacgaatgcggccgcacatattcaccctcagcgtgcctttcccgacccccttggaggcggaaatcgcccatgggtccctggcaccagatgccgagccccaccaaagggtggttgggaaggatctcacagtgagtggcaggatcctggtcgtccgctggaaagctgaagactgtcgcctgctccgaatttccgtcatcaactttcttgaccagctttccctggtggtgcggaccatgcagcgctttgggccccccgtttcccgctaagcctggcctgggcaaatggagcgaggtcccactttgcgtctccttgtaggcagtgcgtccatccttccctagggcaggaattcccacagttgctactttcctgggagggcctcatgttttatctggttcttaaatgtttgttactacagaaaataaaactgcgctactattccaagtctgagtttatttgcagctggggcacctcccaatattcttgttgtgcttgggttgctgggggggggttctagaattcagatattcaaggagtacaaggaaattgaagacaatttaggaaatggaagaaaatgaaaatcaattgggttctgtcattcaggattaactactgtcaacattttggaatacttcctcagttttacagttgcacttacatagtaaatgtgtaactgtaatatacaccacataatatttgcaagtttagtgttaaatttttttcctgatttttaaatctaacatgagcttttttcctctaacgatcagtgaagaaagtgctggggcaattgactagtgtctggggcaaggagttggctccctggaaaatacagtgtctccagccttagggctcttttatagattctatcagattttctgagagtgaaaaggaagaggtacaactgcttttattctcagaaaacaaggaaatggtttgatccttttgagtcttgctttgaagatgtgctgtgtgggaccagagcagctcttaactgtaggcttgtttccctctatggaggcaacaaacaccattctgggcaccctggccagtgctgcctaggtgaacatgagcttctctatcctggtgggtggggacagctgctagtccctgtcctgcttgcacactggagttaccgttcatcctctcctgctggggtgatggccttccctggtcttgggtagcttcctcacacgcctgtgctcaccagtagtcgtagtccgctgcacactggaacgggagcctctgtggatatccagggttctttccctgtgcagctctcttctctctggttctccgccctgcaaactccag

SEQ ID NO: 2819 - DNA, 2585 bp, Homo Sapiens
  NM_006020
ggccgcgagatggggaagatggcagcggccgtgggctctgtggcgactctggcgactgagcccggggaggacgcctttcggaaacttttccgcttctaccgtcagagccggcccgggaccgcagacctggaaggggtcatcgacttctcggcggcccacgcagcccgtggcaagggtcctggtgcccaaaaggtgatcaaatctcagctaaatgtgtcttctgtcagtgagcagaatgcatatagagcaggtcttcagcccgtcagcaagtggcaagcctatggactcaaaggctatcctgggtttatttttatcccaaaccccttcctcccaggttaccagtggcactgggtgaaacagtgccttaagttatattcccagaaacctaatgtatgtaacctggacaaacacatgtctaaagaagagacccaagatctgtgggaacagagcaaagagttcctgaggtataaagaagcgactaaacggagaccccgaagtttactggagaaactgcgttgggtgaccgtaggctaccattataactgggacagtaagaaatactcagcagatcattacacacctttcccttctgacctgggtttcctctcagagcaagtagccgctgcctgtggatttgaggatttccgagctgaagcagggatcctgaattactaccgcctggactccacactgggaatccacgtagacagatctgagctagatcactccaaacccttgctgtcattcagctttggacagtccgccatctttctcctgggtggtcttcaaagggatgaggcccccacggccatgtttatgcacagtggtgacatcatgataatgtcgggtttcagccgcctcttgaaccacgcagtccctcgtgtccttccaaatccagaaggggaaggcctgcctcactgcctagaggcacctctccctgctgtcctcccgagagattcaatggtagagccttgttctatggaggactggcaggtgtgtgccagctacttgaagaccgctcgtgttaacatgactgtccgacaggtcctggccacagaccagaatttccctctagaacccatcgaggatgaaaaaagagacatcagtacagaaggtttctgccatctggatgaccagaatagcgaagtaaaacgggccaggataaaccctgacagctgagacttggagatcccatcctttttactcaggcacctgcttaccgtaaatgatcatgttattgtgtattgccgtggacttcagcacccagacaagccaaaaacagagacagggaagaactcattgttgatcacactgttgccttggaacccacgcagaagtaaactcagccactttgctcagagaagtgtttgacatggtctgttcctagttacatgttggctgtaatgtatgttgagaagtcagtccaaggaggtatgttcttccacaacagccttctcagcctctgctatttcctttgaggaaggtagaagtgagtttccatgtttgcagagtatttaaatacctcagattttattaatgagaaatacagtacccctccctccactccatctggtaatttatggtaaaattgtggttctgtgaaccagctattagtctcatcttcttaactccctcaggcatcatcaaattctttgatcttctcttccacctctctggctctcatggaagaatcctttacacatgaaaacaatggaactggaaaatcttgtcttttagaaaagaaattaatcacaactatctctcttgcctaaaagataaatataggtaaacccaaggaaaggggaatttagtttctctacatgtcatttcggtctccaaactccctgttggctttttaatgcaattttaattgttggaataaaaaagtcccaagggtgttttgttactgttttctccatgaataaactcacttgattttaaattaaagatctatatctgtctttggggtttagtctatctgggattaaggtttttttttctgtttttctttgctgtattgttcatgctattgaagccctctagctgtttctgccctacaccattctgctgtgccctaagtattctttgtggctgtctcacagaagagagaacatttcttaatattccagtcactgctgttattgtctgagggtaggcagcttggaaaaatgtaggcaacaccaagttttaatctttatacccccaacaatttgactgactatatcatggtccaggttactttacatttctctggacctcggtttcctcatcataaaatgaagatactgtagactaccatcttcctaaagggatattggtatttgaaagagaattaagtgctcctttctacaaacatgatgtgccaaaattgttttattataagggctctttgaaacatcctaacttccttgtgtggaggactggctggaagcccatttggtacctactgtttgcaatgcatgttattaagtttacatgtctcctctgtcctgctctgccccttttttaaattactggcattgaatattgagttcatatggtaatagcagggtttttaaatgaataaaaattatggatttatctct

SEQ ID NO: 2820 - DNA, 3210 bp, Homo Sapiens
  NM_006027
gcctaaggaaacgtgtcgtctggaatgggcttgggggccacgcctgcacatctccgcgagacagagggataaagtgaagatggtgctgttattgttacctcgagtgccacatgcgacctctgagatatgtacacagtcattcttactatcgcactcagccattcttactacgctaaagaagaaataattattcgaggatatttgcctggcccagaagaaacttatgtaaatttcatgaactattatatccgttttcctcggagtgagagaaaactctttttagatatcatctgagaggtagttaatttggcaccatggggatacagggattgctacaatttatcaaagaagcttcagaacccatccatgtgaggaagtataaagggcaggtagtagctgtggatacatattgctggcttcacaaaggagctattgcttgtgctgaaaaactagccaaaggtgaacctactgataggtatgtaggattttgtatgaaatttgtaaatatgttactatctcatgggatcaagcctattctcgtatttgatggatgtactttaccttctaaaaaggaagtagagagatctagaagagaaagacgacaagccaatcttcttaagggaaagcaacttcttcgtgaggggaaagtctcggaagctcgagagtgtttcacccggtctatcaatatcacacatgccatggcccacaaagtaattaaagctgcccggtctcagggggtagattgcctcgtggctccctatgaagctgatgcgcagttggcctatcttaacaaagcgggaattgtgcaagccataattacagaggactcggatctcctagcttttggctgtaaaaaggtaattttaaagatggaccagtttggaaatggacttgaaattgatcaagctcggctaggaatgtgcagacagcttggggatgtattcacggaagagaagtttcgttacatgtgtattctttcaggttgtgactacctgtcatcactgcgtgggattggattagcaaaggcatgcaaagtcctaagactagccaataatccagatatagtaaaggttatcaagaaaattggacattatctcaagatgaatatcacggtaccagaggattacatcaacgggtttattcgggccaacaataccttcctctatcagctagtttttgatcccatcaaaaggaaacttattcctctgaacgcctatgaagatgatgttgatcctgaaacactaagctacgctgggcaatatgttgatgattccatagctcttcaaatagcacttggaaataaagatataaatacttttgaacagatcgatgactacaatccagacactgctatgcctgcccattcaagaagtcatagttgggatgacaaaacatgtcaaaagtcagctaatgttagcagcatttggcataggaattactctcccagaccagagtcgggtactgtttcagatgccccacaattgaaggaaaatccaagtactgtgggagtggaacgagtgattagtactaaagggttaaatctcccaaggaaatcatccattgtgaaaagaccaagaagtgcagagctgtcagaagatgacctgttgagtcagtattctctttcatttacgaagaagaccaagaaaaatagctctgaaggcaataaatcattgagcttttctgaagtgtttgtgcctgacctggtaaatggacctactaacaaaaagagtgtaagcactccacctaggacgagaaataaatttgcaacatttttacaaaggaaaaatgaagaaagtggtgcagttgtggttccagggaccagaagcaggtttttttgcagttcagattctactgactgtgtatcaaacaaagtgagcatccagcctctggatgaaactgctgtcacagataaagagaacaatctgcatgaatcagagtatggagaccaagaaggcaagagactggttgacacagatgtagcacgtaattcaagtgatgacattccgaataatcatattccaggtgatcatattccagacaaggcaacagtgtttacagatgaagagtcctactcttttgagagcagcaaatttacaaggaccatttcaccacccactttgggaacactaagaagttgttttagttggtctggaggtcttggagatttttcaagaacgccgagcccctctccaagcacagcattgcagcagttccgaagaaagagcgattcccccacctctttgcctgagaataatatgtctgatgtgtcgcagttaaagagcgaggagtccagtgacgatgagtctcatcccttacgagaagaggcatgttcttcacagtcccaggaaagtggagaattctcactgcagagttcaaatgcatcaaagctttctcagtgctctagtaaggactctgattcagaggaatctgattgcaatattaagttacttgacagtcaaagtgaccagacctccaagctacgtttatctcatttctcaaaaaaagacacacctctaaggaacaaggttcctgggctatataagtccagttctgcagactctctttctacaaccaagatcaaacctctaggacctgccagagccagtgggctgagcaagaagccggcaagcatccagaagagaaagcatcataatgccgagaacaagccggggttacagatcaaactcaatgagctctggaaaaactttggatttaaaaaagattctgaaaagcttcctccttgtaagaaacccctgtccccagtcagagataacatccaactaactccagaagcggaagaggatatatttaacaaacctgaatgtggccgtgttcaaagagcaatattccagtaaatgcagactgctgcaaagcttttgcctgcaagagaatctgatcaatttgaagtccctgtttgggaatgaggcacttatcagcatgaagaattttttctcattctgtgccattttaaaaatagaatacattttgtatattaactttataattgggttgtggtttttttgctcagctttttatatttttataagaagctaaatagaagaataattgtatctctgacaggtttttggaggttttagtgttaattgggaaaatcctctggagtttataaaagtctactctaaatatttctgtaatgttgtcaagtagaaagatagtaaatggagaaactacaaaaaaaaaaaaaaaaaa

SEQ ID NO: 2821 - DNA, 5337 bp, Homo Sapiens
  NM_006030
gccccccctccccgcggcgccgcatcttgaatggaaacatggcggtgccggctcggacctgcggcgcctctcggcccggcccagcgcggactgcgcgcccctggcccggctgcggcccccaccctggccccggcacccggcgcccgacgtccgggcccccgcgcccgctgtggctgctgctgccgcttctaccgctgctcgccgcccccggcgcctctgcctacagcttcccccagcagcacacgatgcagcactgggcccggcgtctggagcaggaggtcgacggcgtgatgcggatttttggaggcgtccagcagctccgtgagatttacaaggacaaccggaacctgttcgaggtacaggagaatgagcctcagaagttggtggagaaggtggcaggggacattgagagccttctggacaggaaggtgcaggccctgaagagactggctgatgctgcagagaacttccagaaagcacaccgctggcaggacaacatcaaggaggaagacatcgtgtactatgacgccaaggctgacgctgagctggacgaccctgagagtgaggatgtggaaagggggtctaaggccagcaccctaaggctggacttcatcgaggacccaaacttcaagaacaaggtcaactattcatacgcggctgtacagatccctacggacatctacaaaggctccactgtcatcctcaatgagctcaactggacagaggccctggagaatgtgttcatggaaaaccgcagacaagaccccacactgctgtggcaggtcttcggcagcgccacaggagtcactcgctactacccggccaccccgtggcgagcccccaagaagatcgacctgtacgatgtccgaaggagaccctggtatatccagggggcctcgtcacccaaagacatggtcatcatcgtggatgtgagtggcagtgtgagcggcctgaccctgaagctgatgaagacatctgtctgcgagatgctggacacgctgtctgatgatgactatgtgaatgtggcctcgttcaacgagaaggcacagcctgtgtcatgcttcacacacctggtgcaggccaatgtgcgcaacaagaaggtgttcaaggaagctgtgcagggcatggtggccaagggcaccacaggctacaaggccggctttgagtatgcctttgaccagctgcagaactccaacatcactcgggccaactgcaacaagatgatcatgatgttcacggatggtggtgaggaccgcgtgcaggacgtctttgagaagtacaattggccaaaccggacggtgcgcgtgtttactttctccgtggggcagcataactatgacgtcacaccgctgcagtggatggcctgtgccaacaaaggctactattttgagatcccttccatcggagccatccgcatcaacacacaggaatatctagatgtgttgggcaggcccatggtgctggcaggcaaggaggccaagcaggtgcagtggaccaacgtgtatgaggatgcactgggactggggttggtggtaacagggaccctccctgttttcaacctgacacaggatggccctggggaaaagaagaaccagctgatcctgggcgtgatgggcattgacgtggctctgaatgacatcaagaggctgacccccaactacacgcttggagccaacggctatgtgtttgccattgacctgaacggctacgtgttgctgcaccccaatctcaagccccagaccaccaacttccgggagcctgtgactctggacttcctggatgcggagctagaggatgagaacaaggaagagatccgtcggagcatgattgatggcaacaagggccacaagcagatcagaacgttggtcaagtccctggatgagaggtacatagatgaggtgacacggaactacacctgggtgcctataaggagcactaactacagcctggggctggtgctcccaccctacagcaccttctacctccaagccaatctcagtgaccagatcctgcaggtcaagtattttgagttcctgctccccagcagctttgagtctgaaggacacgttttcattgctcccagagagtactgcaaggacctgaatgcctcagacaacaacaccgagttcctgaaaaactttattgagctcatggagaaagtgactccagactccaagcagtgcaacaacttccttctgcacaacctgatcttggacacgggcatcacgcagcagctggtagagcgtgtgtggagggaccaggatctcaacacgtacagcctactggccgtgttcgctgccacagacggtggcatcacccgagtcttccccaacaaggcagctgaggactggacagagaaccctgagcccttcaatgccagcttctaccgccgcagcctggataaccacggttatgtcttcaagcccccacaccaggatgccctgttaaggccgctggagctggagaatgacactgtgggcatcctcgtcagcacagctgtggagctcagcctaggcaggcgcacactgaggccagcagtggtgggcgtcaagctggacctagaggcttgggctgagaagttcaaggtgctagccagcaaccgtacccaccaagaccagcctcagaagtgcggccccaacagccactgtgagatggactgcgaggttaacaatgaggacttactctgtgtcctcattgatgatggaggattcctggtgctgtcaaaccagaaccatcagtgggaccaggtgggcaggttcttcagtgaggtggatgccaacctgatgctggcactctacaataactccttctacacccgcaaggagtcctatgactatcaggcagcctgtgcccctcagccccctggcaacctgggtgctgcaccccggggtgtctttgtgcccaccgttgcagatttccttaacctggcctggtggacctctgctgccgcctggtccctgttccagcagcttctctacggcctcatctaccacagctggttccaagcagaccccgcggaggccgaggggagccccgagacgcgcgagagcagctgcgtcatgaaacagacccagtactacttcggctcggtaaacgcctcctacaacgccatcatcgactgcggaaactgctccaggctgttccacgcgcagagactgaccaacaccaatcttctctttgtggtggccgagaagccgctgtgcagccagtgcgaggctggccggctgctgcagaaggagacgcactcggacggcccggagcagtgtgagctagtgcagagaccgcgataccggagaggcccgcacatctgcttcgactacaacgcgacagaagatacctcagactgtggccgcggggcctccttcccgccgtcgctgggcgtcctggtctccctgcaactgctgctcctcctgggcctgccgccccggccgcagcctcaagtcctcgtccacgcctctcgccgcctctgagcaccctgccccaccccacctccactcccacctcacccggcctcttcgcctttcccaccctcctgccccacactccccgccttagagcctcgtccctccctcactgaaggacctgagctggccaggccctgagagtctggtctgcgccttgggatggggagtcccaaagcgggacgccgcaggtgtttggcacccaaatcacatctcacctccgaactgttcaagtgtccccagacccttcttgcctgctgggctccccccagtgggatgggacagggaggccacacgcactggtgccaaaaccaggcctctgctgccgcccttcctggaggctgcctatgttgggggggaccctgcctcagctgacccggcctctctgccccacccaagcccaaacttggtttctgtgagaatagtggaggaaggtgagatggccagtttgaagcctgtgcctcccagcttaaatcctagcaggagagaggctctggggcagcccccatgggctcctgcccctttcaggcctacagccacatccccaagcccaccaggtgtcaggatagtcacagtgataccagttcagacactaccccatatacacctggaacattgaggatggaaactggactcacattcgacataccccactgggcacacgcacaaacacacacactatggggtggggtgggtgtaggggcttacaaagccttacacagggcgaggggttggtgggagggttggcacctgcacactccatctcctgctcaccacctgcctctaatctgagctgcagcctggctggtcctcccatttctaaagctgaatgtcaaacagtgccaaatgctggggcagggggtgaagaaccctctgtcccacccctagccaccagtgtcctccaagtgccccctcacctctccaggtgctcattgtaaccatttctcactagtgtcaggcccccagtgggaccacatgccactgcctgcacctttcggcagaggaacccccaccagacatcaccctttgccttagcaggggtgactttgtctctcctggctgggccatccttccgccaatctggcccttacacactcaggcctgtgcccactccctatctccttcccacccctacacacacactccctgcttgcaggaggccaaactgtccctcccttgctgaacacacacacacacacacacacacaggtggggactgggcacagctcttcacaccattcattctggtcatttcccccaaaggcatcccagcctgggggccagtggggaactgagggcaaggggatatagtgatggggctcagatggactgggaggagggggagggtgatgcattaattaatggcttcgttaattaatgtcatgttgcttgtcgctttctcagtgtgtgtgtgtggtccatgcccactgctggtgccagggtgggtgtccatgtgcacccggcctggatgccagctgtgtccttcgggggcgtgcgtgtaactgtagtgtagtcaggtgctcaatggagaatataaacatatacagaaaaatatatattttaagtttaaaaaacagaaaaacagacaaaacaatccccatcaggtagctgtctaacccccagctgggtctaatccttctcattacccacccgacctggctgcccctcaccttgggctgggggactggggggccatttccttttctctgccctttttttgttgttctattttgtacagacaagttggaaaaacaacagcgacaaaaaagtcaagaaactttgtaaaatatcgtgtgtgtgattccttgtaaaatattttcaaatggtttattacagaagatcagttattaaataatgttcatattttcacttcaaa

SEQ ID NO: 2822 - DNA, 10573 bp, Homo Sapiens
  NM_006031
gcggggggagggcgagcccaagcgcgggggagggagtgtaaatagagcgaaggctgctctgtgtcagccccgtcaccgccgggcggcccgcgcggagtctgagggagatggaagttgagcaagagcagcggcgcagaaaggtggaggccgggaggacgaagcttgctcacttccgacagagaaaaacaaaaggtgacagttcgcattcggagaaaaagacggcgaagaggaagggctcggctgtcgatgcgtctgtccaggaggagagtccggtaaccaaggaggacagcgcactctgtggaggaggggacatttgcaaaagcacatcatgtgacgacacccctgatggggcaggaggggcctttgcagctcagccggaggactgtgatggagagaagagagaggacttggaacagctgcagcagaagcaagtcaatgaccatcctccagagcagtgtgggatgttcacagtcagtgaccacccaccagaacagcatgggatgttcacagtcggtgaccacccaccagaacagcgtgggatgttcacagtcagtgaccacccaccagaacagcatgggatgttcacagtcagtgaccacccaccagaacagcgtgggatgttcacaatcagtgaccaccaaccggaacagcgtgggatgttcacagtcagtgaccacacaccagaacagcgtgggatcttcacaatcagtgaccacccagcagaacagcgtgggatgttcacaaaggagtgtgaacaagaatgtgaacttgccattactgacctggagagcggccgtgaagatgaggctggcctgcatcagagtcaggccgtgcatggccttgagctggaggcgctgcgcctgagtctgagcaacatgcacacggcgcagctggagctgacacaggccaacctccagaaggagaaggagacggcattgacggagctgcgggagatgctcaacagccggcgtgcccaggagctggccctgctacagagcaggcagcagcacgagctggagctcctcagggagcagcacgcacgggagaaggaggaggtggtgctcaggtgtggacaggaagcagctgagctgaaggagaagttacaatcagaaatggagaaaaacgcccagatagtaaagaccctgaaggaagattgggaatctgaaaaagatttatgtttagaaaatctacgcaaagaactgtctgcaaagcatcaatcagaaatggaggatttacaaaaccagtttcagaaagaattggcagaacagagagctgagttggagaagatttttcaagacaaaaaccaggctgaacgggcccttaggaacctggagagtcatcatcaagcagccattgagaagttacgtgaagacctgcagtccgagcacggccggtgtttagaagacttggagttcaagttcaaagagagcgagaaagaaaaacagctggagttagagaatcttcaagcatcatatgaagacctgaaggcacaatcacaagaagagatcaggcgcttgtggtcccagcttgattctgccaggaccagtagacaggaattgagtgagctacatgagcaactcctggcgcgcacctctcgtgtggaagatttagaacagctgaagcagcgagaaaaaacccagcatgagtccgaactggagcaactgaggatttattttgaaaagaagttaagggatgctgagaaaacttaccaagaagacctaaccctgttacagcagaggctgcagggggcgagggaagatgctcttctggactctgtggaagttgggttgtcctgtgtgggtttagaagagaaacctgagaaaggaagaaaagatcacgttgatgaactcgagcctgagcgacataaggagagcctgccacgcttccaggcggagttagaagaaagccacaggcaccagctggaagcgctggagtctcccctctgcatccagcacgaggggcatgtctcagacagatgctgcgtagagacttcagcattgggacacgagtggcgtctggaaccctctgaagggcacagccaagagcttccctgggtgcatctccagggtgtgcaggacggggacttggaggccgacacagagcgggcagccagagtcttgggtctggaaactgagcacaaggtgcaactttcgcttcttcagactgagctcaaagaagaaattgaactcctaaaaatagaaaatagaaatttgtatgggaagttgcagcatgaaactcgtctgaaggacgatttggagaaggtaaaacacaatctaattgaagaccaccagaaggaactaaataatgctaagcaaaagactgagctgatgaaacaggaattccaaagaaaagaaacggactggaaagttatgaaggaggagctacagcgggaagctgaggagaagttaacattgatgctacttgaactgagagaaaaggctgaatccgagaaacagaccatcataaacaagtttgagcttcgagaagctgaaatgaggcagcttcaggaccaacaggcagcccagatcctggatctggagaggtccttgacggagcagcagggccgcctgcagcagctggaacaggacctcacttcagacgacgccctgcattgcagccagtgtgggcgggagccgcccacagcccaggacggggagcttgctgcgctccacgtgaaggaagactgcgccctgcagctgatgctggcccggagcaggtttttagaggaacgtaaagagatcaccgagaaattcagtgcggaacaagatgccttcctgcaggaggcccaggagcagcatgcccgtgagctgcagctcctccaggagagacaccagcagcagctcctgtcagtgacggcggagctcgaggccagacaccaggccgcgttgggcgagctgacagcctccttagagagcaagcagggggctctgctggctgcacgtgtggccgaactgcagacaaaacacgctgccgacctcggcgctctggagaccagacatctgtccagccttgattctttggaatcctgttacctctctgaatttcagaccatccgtgaggagcacaggcaggccctagagctcttacgagcagactttgaggaacaactgtggaaaaaggactctcttcaccaaacgattttgactcaagagttggagaaactgaagcggaaacacgaaggggagctacagtctgtgcgggaccacctgcgaaccgaagtgagcacagagctcgccggaaccgtggctcacgagctgcagggagtgcaccagggtgaatttggaagtgaaaagaaaactgctttgcatgaaaaagaggagacacttcggcttcagagtgcacaggcacagccttttcaccaagaggagaaagagtctttgtctctgcagcttcaaaagaagaatcaccaagtccagcagctgaaagaccaggttttatccttaagtcacgagatagaagagtgccgctccgagttggaggtgctgcagcagaggcgggagcgggagaaccgggaaggcgcaaacctcctctccatgctcaaggccgacgtcaacctgtcccacagcgaaagaggggccctccaggacgccctgcgcaggctgctgggtttgtttggagagacgctgagggcagccgtcaccctgaggagccggatcggggagcgcgtggggctctgcctggatgacgcgggcgcaggcctggccctgtcgacagctccggcgctggaggagacatggtctgatgtggccctcccggagttggacagaactttgtctgaatgtgcagagatgtcttccgtggctgaaattagcagccacatgcgtgaaagctttctcatgagcccagaaagtgtgcgggagtgtgagcagcccatccggagggtcttccagagcctcagcctggccgtggacggcctcatggagatggccctggactccagcaggcagctggaagaagcacgccaaattcattctcgttttgaaaaagaatttagttttaagaatgaggagacagcacaggttgtcaggaagcaccaggagctgctggagtgtttgaaggaggagagcgcagcaaaggcagagctggcgctggagctgcacaagactcagggtacccttgagggattcaaggtggagacagcagatctgaaggaggtgctggccgggaaggaggattccgagcaccgtctggtgctggagctggagagcctgagacggcagctgcagcaggcggcccaggagcaggcggcgctgagggaggagtgcacccgtctgtggagtcggggggaggccacagccacggacgccgaggccagagaagctgctctccggaaggaagtggaggatctgaccaaagaacagtcggagaccaggaagcaggctgagaaggaccgctcagccctgctctcccagatgaagattttggagtctgagttagaagaacagctgtctcagcatcgcgggtgtgccaagcaggcggaggccgtcactgccctggaacagcaggtggcatctctggacaagcatttgcgcaaccagcggcaattcatggatgagcaggcagccgagcgggagcacgagcgcgaggagttccagcaggagattcagaggctggaggggcagctccgccaggcggccaagccgcagccctggggccctcgcgacagccagcaggcgccgctggatggagaggttgagttgttacaacaaaagttgagagaaaagttggatgaatttaatgaattggctatacagaaagagtcggcagatagacaagtgttaatgcaggaagaagaaattaaacgtctggaggagatgaacatcaacatcaggaaaaaagtggcccagctccaggaagaagtggaaaaacagaaaaacatcgtgaaagggctggaacaggataaagaggtgttaaagaaacagcagatgagtagcttgcttctggcgtccacgttgcagtctacactagatgcaggcagatgtcccgagcctccttcgggcagccctcctgagggtccagaaatacagttagaggtgacacagagagcactcctgcggcgcgagagcgaggttttggacttaaaagaacagctagaaaagatgaaaggtgacttagaaagtaaaaatgaagaaatactacatctgaacttaaaattggacatgcagaacagccagactgctgtcagcctcagagaacttgaggaagagaacacgagcttgaaggtcatatataccagaagttctgagattgaagagctgaaagccactattgaaaatctgcaagagaatcagaaacgattacaaaaggagaaagcagaggaaattgaacaactccatgaagtcattgagaagctgcagcacgagctgtccctcatggggcctgtggtgcacgaagtcagcgacagtcaggctggcagtctgcagagcgagctgctctgctcccaggccgggggccctcgtgggcaggccctacagggcgagctcgaggctgcgctggaagccaaggaggccctgagccggctgctggctgaccaggagcgcaggcacagccaggccctggaggccctgcagcagcgcctccagggcgcagaggaggctgcggagctacagctggctgagctggagcgcaatgtagccctcagggaggctgaggtcgaagacatggcctcccggatccaggagttcgaagcggccctgaaagcaaaggaagcgacgattgccgagagaaatttagaaatcgacgctctgaaccagcggaaggcggcccactctgccgagctggaggccgtcctgttggccttggcccgcatccgccgcgccctggagcagcagcccctggcagccggggcggcgcctcccgagctgcagtggctccgagcgcagtgtgcccgcctcagccgccagctgcaggtgctgcaccagcggttcctgaggtgccaggtggagctggacaggcggcaggcccgcagagccacagctcacacacgggtgcccggggcccacccacagcctcgcatggatggtggcgccaaggcccaggtcaccggcgacgtggaggcctcccatgatgctgctttggagccggttgtccctgacccacagggtgatctgcagcctgtcctggtgacgttgaaggatgcacctctctgcaagcaagaaggcgtgatgtcagtgctcaccgtctgccagaggcagctgcagtcggagctgctcttggtgaaaaatgaaatgcgcctgagtctggaggacggcggcaagggtaaagaaaaagtactggaagattgtcagctgccgaaggtcgatctcgtagctcaggtgaaacagcttcaggaaaaactgaaccgtttgctgtattccatgaccttccagaatgtggatgctgccgacaccaaatctctgtggcccatggcctcagcacacctgttggagagcagctggagtgatgattcctgtgacggagaagagcctgacatatcaccccacatagacacatgtgatgccaatacagccacggggggtgtaactgatgttatcaaaaatcaggccatagacgcgtgtgatgccaatacaaccccagggggtgtaactgatgttatcaaaaattgggattccttgataccagatgaaatgccagattctcccattcaagaaaaatcagaatgtcaggacatgtctctttcttcaccgaccagcgtacttggtggctcccgccaccagagccacactgcagaggctgggccccggaagagcccggtcgggatgctggacctgtcttcctggagctcccctgaggtcctcaggaaggactggaccctggagccctggcccagcctccccgtgacaccccactcaggagccctgagcctgtgcagtgccgacacatccctgggggacagggcggacacctcgctgccacagacccaggggccggggctgctttgttccccaggcgtgtctgcagcagcgctggcactgcagtgggccgagtctccgccggctgacgaccaccatgtgcagaggacggctgtggagaaagatgtcgaagattttatcacaacatcctttgattctcaagaaacattaagttcacctcctcctggattagaaggaaaagctgatagaagtgagaaaagtgacggctcgggttttggagcaagactgagcccggggtcaggaggccctgaggctcaaactgctggtcctgtgacccctgcttccatctctggaaggtttcagccgctgccggaagccatgaaggagaaggaagtgcgtccgaagcacgtgaaggctttactgcagatggtgcgtgacgagagccaccagatcctggcgctgtcagaaggccttgcacccccaagcggcgagccacacccaccccggaaggaagacgagatacaggacatctcgctccatgggggaaagacgcaggaagtgcccaccgcgtgccccgattggagaggggaccttctgcaggttgtgcaagaggcctttgaaaaagagcaggagatgcagggggttgagctgcagccccgactcagtggctcagatctggggggtcacagctccctgctcgaaaggctggagaagatcatccgtgagcagggagacctgcaggaaaagtccctggagcatcttcgcttgccggaccggagcagcctgctgtccgagatccaggcgctgcgtgcccagctgcgcatgacgcacctgcagaaccaggagaagctgcagcacttgcgcacggcgctgacaagcgcagaggcgcgcgggagccagcaggagcaccagctgcgcaggcaggttgaactgctggcttataaagtagagcaggagaagtgcattgctggtgacttgcagaagacgctgagtgaagagcaagagaaggcaaacagcgtgcagaagctcctggcggcggagcagactgtagtgcgagatttgaagtccgacctctgtgagagcaggcagaagagcgaacagctgtcccggtccctctgcgaggtgcagcaggaggtcctccagctgagatccatgctgagcagtaaggagaacgagctgaaggccgcgcttcaggagctggagagtgagcaggggaaggggcgtgccctgcagagccagctggaggaggagcagctgcggcacctgcagagggagagccagagtgccaaggccctggaggagctgcgggcgtctttggagacacagcgtgctcagagcagtcgactctgcgtggcactgaaacacgagcagacggccaaggacaacctgcagaaggagctgcgtatcgagcactcacgctgcgaggccttgctggctcaggagcggagccagctctctgagctccagaaggaccttgcggctgagaagagccgcaccctggagctgtcagaggccttgcggcacgagcggctcctgaccgagcagctgagccagaggacacaggaggcttgcgtgcaccaggacacacaggcccatcacgctctgctgcagaagctgaaggaggagaagtcccgggtggtggacttgcaagcgatgcttgaaaaggtgcagcagcaagccctgcattctcagcagcagcttgaggctgaggctcagaagcactgtgaggcgctcaggagagagaaggaggtaagtgccacactgaagtcgacggtggaagccctgcacacccaaaaacgagagctgagatgctctctggagagagagagggagaaaccagcgtggttgcaggcagaattagagcagtcacacccacggttgaaagagcaagaaggacgcaaggctgcgaggaggagcgcggaggccaggcagagcccagcggctgcggagcagtggaggaagtggcagagagacaaggagaagctgcgagaattagaactgcagcgtcagcgtgacttgcataagatcaagcagcttcagcagacagtgagagacctggagtcgaaggacgaggtgcctggcagccgcctccacctaggttctgcccgcagggctgccggctcggatgcggaccacctccgggaacagcagcgagagctggaggcgatgaggcagcggctgctctctgccgcccggcttctcaccagcttcaccagccaggccgtggacaggacagttaatgattggacgtcatccaatgagaaagcagtgatgtctttactgcacacgttggaggagctgaagtctgacttgagcaggcccacctcctcccagaaaaaaatggcagcagagctgcagttccagtttgtggacgtcctgctgaaagacaatgtttccctcacaaaagcgctcagcacggtgacccaggagaagctggagctgagcagagccgtgtctaagcttgagaagttgctgaagcaccatctgcagaagggctgcagcccaagcaggtcggaaaggtctgcttggaagccagacgaaacggctccacagagttccctgaggcgcccagaccccggccggcttccaccagctgccagcgaggaagcacacaccagcaatgtcaagatggaaaaattgtacctgcattacttgagagcagagagctttagaaaagctctgatttatcaaaagaagtatcttttgctgttgattggtggattccaggattctgaacaagaaacactctccatgattgcccatttgggggtatttccttccaaagcagaacggaaaatcacatctcgtcctttcaccaggttccgcacggccgtcagggtggtcattgcaatattaagattacgttttttggttaagaaatggcaagaagtagatcggaaaggagctctggcacaaggcaaagcccctcgcccagggccccgagcacgacagccgcagtctccacccagaaccagagagtcccccccaacccgggatgtaccctctggccacaccagggaccctgccagaggccgcagactggcagcagcagcctccccacacagtgggggaagagccactccatccccaaattcaagattagaaagatccctgactgcttctcaagatccagaacattccttgacagagtatattcaccatttagaagtgatccagcaaagattgggaggggtactaccagattctacttcaaagaaatcctgccacccgatgattaaacagtgaataaaatgtcatggctctttcctgcgacaattctatttgaggaaaagatttgtttttcccttttcccaaggaagctcgtgggacagcatgggcactactcttcatgtgcggtgacaccagcccccagatgccttgaattaagtgtcctcacctttatgcatgactgcaaagccagctggagcattttctatggagcctccgtatgttttaggcccatgaccttcgtgaggtgacgggcactcactcccatgagccctggctgtgtgctgttgtgtgcctatcggcagatccatccttcctgcctccaaggaggatacacagagaatggcttcctgttgttttgtttattttcttaacgtgtacagatggaaacttcatttaaaaataaaaacaaaacaactcaaaaaggaataaaatttaatcactgttttgtttgtgaataaaaaaaaaaaaaa

SEQ ID NO: 2823 - DNA, 3518 bp, Homo Sapiens
  NM_006034
caggcggcccccgggagagcctcgcgggggagccgggagcctggtttccccgccaacccccatcccgcccgccccggcggccaccctgggggcgaggcagcccggcgcgtgggaggggacggcgcgccattggcttgtgcgcggaaccgagaggagggaccagcgcgggccgccagactcggtaagccccggccgcgcagggcgccgcgcgcagtccagccggcccggccctgccctgccctgccctgtcctgccctgccctgccctgccctgccctgcactgcccggcccggcacgggcggcgcgatgtgaggcgtccgagcccggagcctccgcctggcatcagctccacgtagcccagcgccggcacgcgcgaggccccccttctgcagaggccgggctggaggagaagatggcggccaagcagcccccgcctctgatgaagaagcacagccagacggacctcgtgagccgcctgaagacccgcaagatcctcggcgtgggcggggaggatgacgacggggaggtgcatcgctccaagatcagccaggtcttaggcaatgaaatcaagtttaccattcgggagcctttggggctcagggtctggcagttcgtctctgctgtgctcttctccggcattgccatcatggcgcttgccttccctgaccagctctatgatgcggtctttgatggagcccaggtgaccagcaagacccccatccgcctctacggcggtgccctcctcagcatctccctgatcatgtggaacgctctctacacggctgagaaggtcatcattcgatggaccctgctcaccgaagcttgctatttcggggtccagttcttggtggtcactgccacgctagctgagacgggcctcatgtccctggggatcctgctgctcctggtcagccgcctcctttttgtcgtcatcagcatttactactattaccaagtcggccgaagacccaagaaggcctagttgcccgctgggcctggggccctgcccatgcctgggccagagtggcgctggggcctcggcttccctttggctcctggaaggcaggagggtcccctgccctgccccagtcctgccccagggaggcagggggtggggggccttcctttcctcctgggcaccccgtgtgctgtgatctcctgggctttcaggcttgacatgctggtctggggagagacagggcctctgctgccctgttcttcaccctcacagtgatacctcctttccttgggtctcttggcctccagaccccctcaatagacactgactaaagtcaagctggagtcatgagggtagtgggctaagtcgagggtccagcctcttctgccaggaagcccttcttgcttttgagagaggctgtgaccaccccccatccttctccctacactcccagccaacctagtgcccaagcagctaaacttggcttccttctaatcctggaaaaccctgtacccctcctcctcaatctggccctctccacatgcacaccctgaaaacacacacagacacacaacacacacacatacacacccctgaacacacacacagacacacatacacccatgatgtgagcaaacacacacacgtgcgccttcatagcccagccaagggcatgcaggcagggtgtgctgcctgagatggcacctccctttcagccattcttcaagaatgggccacacacagctagaagtcctctcccagctagaagtcctgtccccactctcctggcctgacaagatgagctctcctgggaccttgctctagggcactctgcctctaccctaggacactggaatgccctgggagccccctccctgcaaccagcctgagttcagccccacggacaaagggacacacagcccccaatggagaccattgtaagtggtggggctgggagaggaggaacagaaggaaagccatagcgctctcttgccccttggcatgtaccccaaggcctgatggccactgggctcagcctgtcccccactcctgcctgcttcccggtgagctgccccccacacgtgcagcccgggctgcctccagggtctggctgagtgggatcaggtggccctccaactcagcacaggaaataagtagaaacatttcagcaggccacctcccctcatcttccccgccctgtccagcgccctggcaaaggctgacaactggctgtcttggggccgaacagcccctgccctgcctctgagggcccaccagcctgtgctgcatacccaccgcccagcttctccctgagggcccaccagcctgtgctgcatacccaccgcccagcttctccctgagggcccaccagcctgtgctgtacaccccgttagtccctgatcccaaccttctccctcctgccagcacaccgatgcacacaccggaagtggcgagcccaagccctggggacaggtgtagggagaaaagcagccccaggcctcagactcgcttcccatcctggcatagagtgggggatggctggagggtgtctataggtacagcccgctctggctgctgccaggtgggcccctgccaggggtcctcacccctgtccaccctgtgcctggctgtccctgcacccagatacagcaacatggcctgtacccagcagagtggtggcaccaccatggttacagcggatgccccgagactctgcttggtaaacgtggcagagcagaatgggaggctggaccctgaggaagggcccctctcctggcatctgtctcttgctacctaagcctgtgcctctccctaaagagctgcctccctgctgccgagccctggtctggccacgagccaccactgcctcccgctgctgcccacaggtggtgccgccaatgggcagtgccctcaggccgaagcctcaatcccccatctgagccaggcctaatcctctaatagtgatggttggtttgtcctcccataactgcaggtggattccacctggggaatgaggctgcgtgtcgggcgtctgctggccctgagacatccagtcttccacactcaactgtgggatgggagggtggcgtggccttaccccatgaggctgtccaggctctggcacacagctgtgctcacaaaatactgggtggcttggttagagctaattgtagtggagcctgcaggtgagggtgagggagggggctgcaggtcaggtaagatctggaagacagacgtacagcttggagggcagggggactctaaggcaaggagatttacagttgggaaggaggcagtggcagaggggtgagggacaggggcccttaagtccagcgaggaaagctcggtgtgggcccgctctacgctccgtttggggtgacctggaacgcctcttctcccagctccctccagccatcagcagcctcttgtcaagcttctgcctcgccccagtctatccccaaccccaaatcaagaccacctttcttcacggtcactatttattctttgttcctttttctttttgtaagaaacattcacaaaaaccagtgcaaaaccatca

SEQ ID NO: 2824 - DNA, 6903 bp, Homo Sapiens
  NM_006036
gaagaaactgaggcccggagacacagttaagtgtaggagctaagacctcaacccaggtctctctgactcttaactacttattagcaatcaaggttaataaaagctacctcctgacaaaccagagatggccttacattttatttgtgcatcttgcaggggttttttgttgtttttaattaaagcgctaaatacctttttaacattaaaaatccgaagttgagtatgtccagtatttggaaccgaaccaaattggattttttgctatacagcttactgtacaagtgacctggaacagttgcttagaacctcccacagccacagtttggcaacctgtaaaatgtgcatggtaatatctactttattaagtccatataaaatttaaattagacaaacaagataaaagcacctggcagttagttaacactcaacaataattaatcttccctcccccacctttattaaataattaggcttttccagtttatcttccacatatataccaaagatacgttcataattatgtaagaccaaagggctttttaccttttacagccctgagttcctgagataccccattaagtctgtgtacttatttgcaaatttatattttgtttcttgttttgttttttgttttagtttaacccctatgtgtgccagagtcagtgctgcatagtttgagcctgataggattaactttacaaatgagacatttaagtcacatctgccaagaattatgatttgaatgaaactttaacttacacaggtttttagatttagttagcctaagttatcagctgtctgaagttattcataacctaagtggggcatggccctgaaaaggagggatgagaactgctgatcttagttactctgagaacccactactctgtaatcatacctataaaatcattcgtgtgctggcagccccaaaaggagcataaaccagggactttgatatcatgcagcagaagaccaaattatttctccaagctttgaagtatagtattcctcaccttggaaaatgcatgcagaaacagcatttgaatcactataacttcgctgatcattgttacaatagaataaaattgaaaaaatatcacctaaccaagtgtcttcagaataaacccaagatatcagagttagcaagaaacatcccaagtcggagcttctcatgtaaggatcttcagcctgttaaacaagaaaacgaaaaaccccttccagaaaacatggatgcatttgaaaaagtgagaacaaaattagaaacacagccacaagaagaatatgaaatcatcaatgtggaagttaaacatggtggttttgtttattaccaagaaggttgttgcttggttcgttccaaagatgaagaagcagacaatgataattatgaagttttattcaatttggaggaacttaagttagaccagcccttcattgattgtatcagagttgctccagatgaaaaatatgtggctgccaagataagaactgaagattctgaagcatctacctgtgtaattataaagctcagcgatcagcccgtaatggaagcttctttcccgaatgtgtccagttttgaatgggtaaaggacgaggaagatgaagatgttttattctacaccttccagaggaaccttcgctgtcatgacgtatatcgagccacttttggtgataacaaacgtaatgaacgcttttacacagaaaaagacccaagctactttgttttcctttatcttacaaaagacagtcgtttcctcaccataaatattatgaacaagactacttctgaagtgtggttgatagatggcctgagcccttgggacccaccagtacttatccagaagcgaatacatggggtcctttactatgttgaacacagagatgatgaattatacattctcactaatgttggagaacctacagaatttaagctaatgagaacagcggctgatacccctgcaattatgaattgggatttattttttacaatgaagagaaatacaaaagtgatagacttggacatgtttaaggatcactgtgttctatttctgaagcacagcaatctcctttatgttaatgtgattggtctggctgatgattcagttcggtctctaaagctccctccttgggcctgtggattcataatggatacaaattctgacccaaagaactgcccctttcaactttgctctccaatacgtcccccaaaatattacacatacaagtttgcagaaggcaaactgtttgaggaaactgggcatgaagacccaatcacaaagactagtcgcgttttacgtctagaagccaaaagcaaggatggaaaattagtgccaatgactgttttccacaaaactgactctgaggacttgcagaagaaacctctcttggtacatgtatatggagcttatggaatggatttgaaaatgaatttcaggcctgagaggcgggtcctggtggatgatggatggatattagcatactgccatgttcgaggtggtggtgagttaggcctccagtggcacgctgatggccgcctaactaaaaaactcaatggccttgctgatttagaggcttgcattaagacgcttcatggccaaggcttttctcagccaagtctaacaaccctgactgctttcagtgctggaggggtgcttgcaggagcattgtgtaattctaatccagagctggtgagagcggtgactttggaggcacctttcttggatgttctcaacaccatgatggacactacacttcctctgacattagaagaattagaagaatgggggaatccttcatctgatgaaaaacacaagaactacataaaacgttactgtccctatcaaaatattaaacctcagcattatccttcaattcacataacggcatatgaaaacgatgaacgggtacctctgaaaggaattgtaagttatactgagaaactcaaggaagccatcgcggagcatgctaaggacacaggtgaaggctatcagacccctaatattattctagatattcagcctggaggcaatcatgtaattgaggattctcacaaaaagattacagcccaaattaaattcctgtacgaggaacttggacttgacagcaccagtgttttcgaggatcttaagaaatacctgaaattctgaaacactgcattcaactgggaattggaaacacactgaaatatttcatagtcttacttccaattgagttagcaaaaaaaaaattaataacttgagacttttaagttattaattttttaaaatgtgcttctccatctaaattttgcttagtctacatctcacttgcttatactattctctccattgatgcacatgcccattaacctaggaaagtaattttcaaatcatgctccttagaaggatgtggagtagagggaagggaaggattggtgatagcagagctccaggcctcccttccagtcagaacagttgagcagtttacaaattagtgtcctgcctctttgctagcaaatgcttttagacactgtggcagtgagtcatcctctaatttctatgactgcattttaagggaaaagataaaattcttccccttaaaattcgttaaagtttttgaataatctggggtcctaatgtgttctggtcatccctgattgatgctatctgaataaagttataagctcctataagccataatttacttttaaacattttatttttttcaaaacatttgagaacctttcttaaagcagttacattcaagctacagaaatatcgaagaattaatgattgttcaccaagcagcatgctgtacatgaagctattacaaatgcttacaatcccactgaaatgccagtgtcttcatctcttcataaaggtgcctaacacgaggtatacagtatgttcagtacactggaatagcatgctcgattggaaacaaagcatctatctctgaaagctgtttggcgatgaaggagattcttcgtgttgtgttcaaagatgagtccctctcccttgtccagaaaaatgccacttgtatcaactttactgcctttgtcggcagaattggtacttaaccttattctcattttagcgggaaggcccgaaatcatattatgtagatttaacagtgttgattctccaaaattcagaaccacgataaagattctgtcgatgccatccagctctcttgtgtacacaacatagtggctgtcattcctcaaatggcaaaaccagcccctgttgaggagtagctcattggcatgaagtagacttaaatcttgatataacttcaaagccgatctgggctgagtcttttggacctatttttttaaaaaagtatttacgtaagtgtttgattctaagaattgtttgtaagtatttttaatatattgtaaggagttatttacccaaaacacttgctccaattttgccccttataattgccaaattgtaagcatcaataagtaggtaagaacaatttatataaaaactgatagaaatgacaaattcggggtttcggcttgtctgggagtcaataagtacgcacagtgctctgctacattgtagagtttctgtagagatcaaatttgactccactttaggagtcccaaagcaaatgtccatgtctaagatgaatatttaacttgcatagtcattctgtgctatattgtaactgccagatggccagaaagaaggcaacagtggactcagacttctgaggaatttgggtttgttcccctttgtagactaatgtgtaggttgctgttgtgcgaagatcgtgtaactttagcagacatgtatttcttgcacagctaatagaagacaaagttgaaaaaaaggatgcaaaataaaaagctgcctaaggtgaaagttagaaattgtagacttttttttaccataatagtatgtgttcattaaagatgatttgggtttattttacagctatataaaacataatttgatgatgtacttctaacctttcaagcattttctgttattgactatataatatagcctccataaatgtttttaatgacaatattctgttgaacggttgtaccatactcagccatgccctttcattttgacgatagtgtttctaatattttgtatttttattcccctccccccatttttgtattacttaagatagattatcagaaagacagttactttgtcaaagagtatgggcacttgatacataatgccaaattattcttcataagagctgttgccaaatcagtgataatgttcatttaattgtattcttgccagccatgtttactggggtgatagttgttattgtggttgttattgttctttaggggtaggttcccaatatgtggtctttaaataattatctaatggtgtttaaaaagatgtttattctgtttgtcaggtacaaagatatttatgatacatgtatgacttgtctaagttattaacattttctctagccttaggtaatgcatgaaagcacatgtttcagtgccactcacataagaagtgcccggtaagtgttagctattattgtctacttgagttactactttctaaaagtatgttgaagtctttttctgtaattgcagatttgttgattttgcatttgagtattttctatattttgaagctgttagatgcgtagtcatgatttttggtggaatgttttatcaatttttgaaaattgcctttgtctcatataatgcttttcatattgaactatattttgtctgctattaaatacttccaagcctgatttttgtaattttattttttattcaattacaagaatacatactataaaaaggttttcttcaacacctttccatagcttcacagttcccctcagagacaggcactatatgttcttttgtttttaatgtatcatatgtttgcataggcacagaatgtatcatttcatatgtttatatatttttctttacacagttggtgatatgttaccattctatactttattgaatacctgtttgaaatggtctcatatcaatgtatatagaactgtcatttttaaaagctgcatactgggcccatagttgatagaactggttttctgttgataaaatatttaaatcatttcttgtgtcttctattaaaaacaaattttgcaggccaggcaaggtggctcaggcccgtaatcctagcactttgggaggcaaggcagacagatcaccagaggtcaggagttcaagaccagcctggccaacatggtgaaacaccatctctactaaaaaatacagaaattacccgggcataatgacgtgcacctgtaatcccagctacttgggaggctgcagcaggagaatcacttgaacccaggaagcagaggctgcagtgtgccgagatcacgccactgcactcgagcatgggtgacggagcaagactgtctcaaaaaaaaaaaaaaacagtgttgagatcctttaagtattattgtgcacatgtgcaaatatttctaagtattaggaatggaattattaggtcaaaagataacttcattttttgtgtttatagctatagctgggttgcaagctttctattatttgcttgctatatcttcattttaattctttgtgttttatgttagtgtttcttatgtctgtttttgttatctgagtggttttatcttttaataggctaatttaacccattcatatttgtaattattgtattatttagacataattcggaagccctattttatttgtagttatactattgtttagggtttttttctattaagctttttgttggattgactgtataatttttttcttctagtattctttgaaaatttgaaaattgttatattttatgtctagtgttctttgaaaataattctttgaaaattatttttatgtcctaattttaccattaaaattatgaccacttgaaaaaaaaaaaaaaa

SEQ ID NO: 2825 - DNA, 8980 bp, Homo Sapiens
  NM_006037
ggaggttgtggggccgccgccgcggagcaccgtccccgccgccgcccgagcccgagcccgagcccgcgcacccgcccgcgccgccgccgccgccgcccgaacagcctcccagcctgggcccccggcggcgccgtggccgcgtcccggctgtcgccgcccgagcccgagcccgcgcgccggcgggtggcggcgcaggctgaggagatgcggcgcggagcgccggagcagggctagagccggccgccgccgcccgccgcggtaagcgcagccccggcccggcgcccgcgggccattgtccgccgcccgccccgcgccccgcgcagcctgcaggccttggagcccgcggcaggtggacgccgccggtccacacccgccccgcgcgcggccgtgggaggcgggggccagcgctggccgcgcgccgtgggacccgccggtccccagggccgcccggccccttctggacctttccacccgcgccgcgaggcggcttcgcccgccggggcgggggcgcgggggtgggcacggcaggcagcggcgccgtctcccggtgcggggcccgcgccccccgagcaggttcatctgcagaagccagcggacgcctctgttcaacttgtgggttacctggctcatgagaccttgccggcgaggctcggcgcttgaacgtctgtgacccagccctcaccgtcccggtacttgtatgtgttggtgggagtttggagctcgttggagctatcgtttccgtggaaattttgagccatttcgaatcacttaaaggagtggacattgctagcaatgagctcccaaagccatccagatggactttctggccgagaccagccagtggagctgctgaatcctgcccgcgtgaaccacatgcccagcacggtggatgtggccacggcgctgcctctgcaagtggccccctcggcagtgcccatggacctgcgcctggaccaccagttctcactgcctgtggcagagccggccctgcgggagcagcagctgcagcaggagctcctggcgctcaagcagaagcagcagatccagaggcagatcctcatcgctgagttccagaggcagcacgagcagctctcccggcagcacgaggcgcagctccacgagcacatcaagcaacaacaggagatgctggccatgaagcaccagcaggagctgctggaacaccagcggaagctggagaggcaccgccaggagcaggagctggagaagcagcaccgggagcagaagctgcagcagctcaagaacaaggagaagggcaaagagagtgccgtggccagcacagaagtgaagatgaagttacaagaatttgtcctcaataaaaagaaggcgctggcccaccggaatctgaaccactgcatttccagcgaccctcgctactggtacgggaaaacgcagcacagttcccttgaccagagttctccaccccagagcggagtgtcgacctcctataaccacccggtcctgggaatgtacgacgccaaagatgacttccctcttaggaaaacagcttctgaaccgaatctgaaattacggtccaggctaaagcagaaagtggccgaaagacggagcagccccctgttacgcaggaaagacgggccagtggtcactgctctaaaaaagcgtccgttggatgtcacagactccgcgtgcagcagcgccccaggctccggacccagctcacccaacaacagctccgggagcgtcagcgcggagaacggtatcgcgcccgccgtccccagcatcccggcggagacgagtttggcgcacagacttgtggcacgagaaggctcggccgctccacttcccctctacacatcgccatccttgcccaacatcacgctgggcctgcctgccaccggcccctctgcgggcacggcgggccagcaggacgccgagagactcacccttcccgccctccagcagaggctctcccttttccccggcacccacctcactccctacctgagcacctcgcccttggagcgggacggaggggcagcgcacagccctcttctgcagcacatggtcttactggagcagccgccggcacaagcacccctcgtcacaggcctgggagcactgcccctccacgcacagtccttggttggtgcagaccgggtgtccccctccatccacaagctgcggcagcaccgcccactggggcggacccagtcggccccgctgccccagaacgcccaggctctgcagcacctggtcatccagcagcagcatcagcagtttctggagaaacacaagcagcagttccagcagcagcaactgcagatgaacaagatcatccccaagccaagcgagccagcccggcagccggagagccacccggaggagacggaggaggagctccgtgagcaccaggctctgctggacgagccctacctggaccggctgccggggcagaaggaggcgcacgcacaggccggcgtgcaggtgaagcaggagcccattgagagcgatgaggaagaggcagagcccccacgggaggtggagccgggccagcgccagcccagtgagcaggagctgctcttcagacagcaagccctcctgctggagcagcagcggatccaccagctgaggaactaccaggcgtccatggaggccgccggcatccccgtgtccttcggcggccacaggcctctgtcccgggcgcagtcctcacccgcgtctgccaccttccccgtgtctgtgcaggagccccccaccaagccgaggttcacgacaggcctcgtgtatgacacgctgatgctgaagcaccagtgcacctgcgggagtagcagcagccaccccgagcacgccgggaggatccagagcatctggtcccgcctgcaggagacgggcctccggggcaaatgcgagtgcatccgcggacgcaaggccaccctggaggagctacagacggtgcactcggaagcccacaccctcctgtatggcacgaaccccctcaaccggcagaaactggacagtaagaaacttctaggctcgctcgcctccgtgttcgtccggctcccttgcggtggtgttggggtggacagtgacaccatatggaacgaggtgcactcggcgggggcagcccgcctggctgtgggctgcgtggtagagctggtcttcaaggtggccacaggggagctgaagaatggctttgctgtggtccgcccccctggacaccatgcggaggagagcacgcccatgggcttttgctacttcaactccgtggccgtggcagccaagcttctgcagcagaggttgagcgtgagcaagatcctcatcgtggactgggacgtgcaccatggaaacgggacccagcaggctttctacagcgaccccagcgtcctgtacatgtccctccaccgctacgacgatgggaacttcttcccaggcagcggggctcctgatgaggtgggcacagggcccggcgtgggtttcaacgtcaacatggctttcaccggcggcctggacccccccatgggagacgctgagtacttggcggccttcagaacggtggtcatgccgatcgccagcgagtttgccccggatgtggtgctggtgtcatcaggcttcgatgccgtggagggccaccccacccctcttgggggctacaacctctccgccagatgcttcgggtacctgacgaagcagctgatgggcctggctggcggccggattgtcctggccctcgagggaggccacgacctgaccgccatttgcgacgcctcggaagcatgtgtttctgccttgctgggaaacgagcttgatcctctcccagaaaaggttttacagcaaagacccaatgcaaacgctgtccgttccatggagaaagtcatggagatccacagcaagtactggcgctgcctgcagcgcacaacctccacagcggggcgttctctgatcgaggctcagacttgcgagaacgaagaagccgagacggtcaccgccatggcctcgctgtccgtgggcgtgaagcccgccgaaaagagaccagatgaggagcccatggaagaggagccgcccctgtagcactccctcgaagctgctgttctcttgtctgtctgtctctgtcttgaagctcagccaagaaactttcccgtgtcacgcctgcgtcccaccgtggggctctcttggagcacccagggacacccagcgtgcaacagccacgggaagcctttctgccgcccaggcccacaggtctcgagacgcacatgcacgcctgggcgtggcagcctcacagggaacacgggacagacgccggcgacgcgcagacacacggacacgcggaagccaagcacactctggcgggtcccgcaagggacgccgtggaagaaaggagcctgtggcaacaggcggccgagctgccgaattcagttgacacgaggcacagaaaacaaatatcaaagatctaataatacaaaacaaacttgattaaaactggtgcttaaagtttattacccacaactccacagtctctgtgtaaaccactcgactcatcttgtagcttatttttttttaaagaggacgttttctacggctgtggcccgcctctgtgaaccatagcggtgtgcggcggggggtctgcacccgggtgggggacagagggacctttaaagaaaacaaaactggacagaaacaggaatgtgagctgggggagctggcttgagtttctcaaaagccatcggaagatgcgagtttgtgcctttttttttattgctctggtggatttttgtggctgggttttctgaagtctgaggaacaatgccttaagaaaaaacaaacagcaggaatcggtgggacagtttcctgtggccagccgagcctggcagtgctggcaccgcgagctggcctgacgcctcaagcacgggcaccagccgtcatctccggggccaggggctgcagcccggcggtccctgttttgctttattgctgtttaagaaaaatggaggtagttccaaaaaagtggcaaatcccgttggaggttttgaagtccaacaaattttaaacgaatccaaagtgttctcacacgtcacatacgattgagcatctccatctggtcgtgaagcatgtggtaggcacacttgcagtgttacgatcggaatgctttttattaaaagcaagtagcatgaagtattgcttaaattttaggtataaataaatatatatatgtataatatatattccaatgtattccaagctaagaaacttacttgattcttatgaaatcttgataaaatatttataatgcatttatagaaaaagtatatatatatatataaaatgaatgcagattgcgaaggtccctgcaaatggatggcttgtgaatttgctctcaaggtgcttatggaaagggatcctgattgattgaaattcatgttttctcaagctccagattggctagatttcagatcgccaacacattcgccactgggcaactaccctacaagtttgtactttcattttaattattttctaacagaaccgctcccgtctccaagccttcatgcacatatgtacctaatgagtttttatagcaaagaatataaatttgctgttgatttttgtatgaattttttcacaaaaagatcctgaataagcattgttttatgaattttacatttttcctcaccatttagcaattttctgaatggtaataatgtctaaatctttttcctttctgaattcttgcttgtacatttttttttacctttcaaaggtttttaattatttttgtttttatttttgtacgatgagttttctgcagcgtacagaattgttgctgtcagattctattttcagaaagtgagaggagggaccgtaggtcttttcggagtgacaccaacgattgtgtctttcctggtctgtcctaggagctgtataaagaagcccaggggctctttttaactttcaacactagtagtattacgaggggtggtgtgtttttcccctccgtggcaagggcagggagggttgcttaggatgcccggccaccctgggaggcttgccagatgccgggggcagtcagcattaatgaaactcatgtttaaacttctctgaccacatcgtcaggatagaattctaacttgagttttccaaagaccttttgagcatgtcagcaatgcatggggcacacgtggggctctttacccacttgggtttttccactgcagccacgtggccagccctggattttggagcctgtggctgcaaggaacccagggacccttgttgcctggtgaacctgcagggagggtatgattgcctgaccaggacagccagtctttactctttttctcttcaacagtaactgacagtcacgttttactggtaacttattttccagcacatgaagccaccagtttcattccaaagtgtatattgggttcagacttgggggcagaagttcagacacaccgtgctcaggagggacccagagccgagtttcggagtttggtaaagtttacagggtagcttctgaaattaactcaaacttttgaccaaatgagtgcagattcttggattcacttggtcactgggctgctgatggtcagctctgagacagtggtttgagagcaggcagaacggtcttgggacttgtttgactttcccctccctggtggccactctttgctctgaagcccagattggcaagaggagctggtccattccccattcatggcacagagcagtggcagggcccagctagcaggctcttctggcctccttggcctcattctctgcatagccctctggggatcctgccacctgccctcttaccccgccgtggcttatggggaggaatgcatcatctcactttttttttttaagcagatgatgggataacatggactgctcagtggccaggttatcagtggggggacttaattctaatctcattcaaatggagacgccctctgcaaaggcctggcagggggaggcacgtttcatctgtcagctcactccagcttcacaaatgtgctgagagcattactgtgtagccttttctttgaagacacactcggctcttctccacagcaagcgtccagggcagatggcagaggatctgcctcggcgtctgcaggcgggaccacgtcagggagggttccttcatgtgttctccctgtgggtccttggacctttagcctttttcttcctttgcaaaggccttgggggcactggctgggagtcagcaagcgagcactttatatccctttgagggaaaccctgatgacgccactgggcctcttggcgtctgccctgccctcgcggcttcccgccgtgccgcagcgtgcccacgtgcccacgccccaccagcaggcggctgtcccggaggccgtggcccgctgggactggccgcccctccccagcgtcccagggctctggttctggagggccactttgtcaaggtgtttcagtttttctttacttcttttgaaaatctgtttgcaaggggaaggaccatttcgtaatggtctgacacaaaagcaagtttgatttttgcagcactagcaatggactttgttgtttttctttttgatcagaacattccttctttactggtcacagccacgtgctcattccattcttctttttgtagactttgggcccacgtgttttatgggcattgatacatatataaatatatagatataaatatatatgaatatatttttttaagtttcctacacctggaggttgcatggactgtacgaccggcatgactttatattgtatacagattttgcacgccaaactcggcagctttggggaagaagaaaaatgcctttctgttcccctctcatgacatttgcagatacaaaagatggaaatttttctgtaaaacaaaaccttgaaggagaggagggcggggaagtttgcgtcttattgaacttattcttaagaaattgtactttttattgtaagaaaaataaaaaggactacttaaacatttgtcatattaagaaaaaaagtttatctagcacttgtgacataccaataatagagtttattgtatttatgtggaaacagtgttttagggaaactactcagaattcacagtgaactgcctgtctctctcgagttgatttggaggaattttgttttgttttgttttgtttgtttccttttatctccttccacgggccaggcgagcgccgcccgccctcactggccttgtgacggtttattctgattgagaactgggcggactcgaaagagtccccttttccgcacagctgtgttgactttttaattacttttaggtgatgtatggctaagatttcactttaagcagtcgtgaactgtgcgagcactgtggtttacaattatactttgcatcgaaaggaaaccatttcttcattgtaacgaagctgagcgtgttcttagctcggcctcactttgtctctggcattgattaaaagtctgctattgaaagaaaaagaaagcgaacagtttttgtttgttttttttgccgtgtgtgctccatagtggaggcgctattttccaattgatgagaatgacaaacatatataatctatctatctatctatctatctatctatctatacagggggcttgaaccttactcacccaagagcttcttacggaatgtggtagaaaaccaagttgtaacgacactgtaacctacctgatgcctgttcgcgcccgccgtgagctgcgcactggccgtggccaccattcacctctgtaatttaatccgtttctcttggattgtctggacgtgcccgatggttctttcttttgctcagtggagttggaggttttgtgtttggttttctcattcttgtcttgttttgtgtgggtggattttcaccgaccaatgatatcctcttctgacggtcaccttctttccacttcactggagtccagtattctgtaccacatcacgcaacgtgttatcttgtggtgtaaataaagactgcgttacttgccctcccaaaaa

SEQ ID NO: 2826 - DNA, 2032 bp, Homo Sapiens
  NM_006041
gtggccagggcgcgagagtgcaacgtcctcctggccccgagcgcgtcgtcgcgccccgggagcagaccctcgcccagcagttaccgccgtcccgactttccgttccagttgcagctcctgccgggcaacatgtcaagagccgccgccgctacagctgccgccgccacctggggaagagcagcagcagcagcggcggccgcgggcacacgggggcaataaaccgagccacccgggcgtccagcgtgccggggaaccctctctgcgctcactgcccggcgggacccacgccatgtgctgagccatgtccctggccgcgcccgcgggcagcgcatggggcagcgcctgagtggcggcagatcttgcctcgatgtccccggccggctcctaccgcagccgccgccgcccccgccgccggtgaggaggaagctcgcgctgctcttcgccatgctctgcgtctggctctatatgttcctgtactcgtgcgccggctcctgcgccgccgcgccggggctgctgctcctgggctctgggtcccgcgccgcacacgacccgccagccctggccacagctccggacgggacgccccccaggctgccgttccgggcgccgccagccaccccactggcttcaggcaaggagatggccgagggcgctgcgagcccggaggagcagagtcccgaggtgccggactccccaagccccatctccagctttttcagtgggtctgggagcaagcagctgccgcaggccatcatcatcggcgtgaagaagggcggcacgcgggcgctgctggagtttctgcgcgtgcaccccgacgtgcgcgccgtgggcgccgagccccatttcttcgatcgcagctacgacaagggcctcgcttggtaccgggacctgatgcccagaaccctggacgggcagatcaccatggagaagacgcccagttacttcgtcacgcgggaggcccccgcgcgcatctcggccatgtccaaggacaccaagctcatcgtggtggtgcgggacccggtgaccagggccatctcggactacacgcagacgctgtccaagcggcccgacatccccaccttcgagagcttgacgttcaaaaacaggacagcgggcctcatcgacacgtcgtggagcgccatccagatcggcatctacgccaagcacctggagcactggctgcgccacttccccatccgccagatgctcttcgtgagcggcgagcggctcatcagcgacccggccggggagctgggccgcgtgcaagacttcctgggcctcaagaggatcatcacggacaagcacttctacttcaacaagaccaagggcttcccctgcctgaagaaggcggagggcagcagccggccccattgcctgggcaagaccaagggcaggacccatcctgagatcgaccgcgaggtggtgcgcaggctgcgcgagttctaccggcctttcaacctcaagttctaccagatgaccgggcacgactttggctgggattgagcagacccgggctatgtaccttacccacgtggcttatctattgacagagattatatgtatgtaaaatgtacagaaatctattttataataatttatttttaattcataagcaattaattcactaagctgcctagccacactctttagagagttagcttcataatctgttaacattccaaagtgtttaactctagtatttcgttttcttcttcacaattgatggtgcttctattttttcttctcccctacctgttatatttaaaacaaagaaaagcacaacttgagatttttgttgttacgggtattcagccttcagtcaccgtctgagttctccagttgctgcctccttgtcttgtcttgggtctcccattccagcttccctgtctcttcctgcctgtgtacctcgtaggaacgctgagctgcctcaacagggctgtattctgaagggcaggcctcatgcagcagcctccttgcagatgtggtgtcccgtccaatgatgtagcctgaaagccacagccctagggttctg

SEQ ID NO: 2827 - DNA, 7580 bp, Homo Sapiens
  NM_006045
atgacggacaacatcccgctgcagccggtgcgccagaagaagcggatggacagcaggccccgcgccgggtgctgcgagtggctgagatgctgcggtggaggggaggccaggccccgcactgtctggctggggcaccccgagaagagagaccagaggtatcctcggaatgtcatcaacaatcagaagtacaatttcttcacctttcttcctggggtgctgttcaaccagttcaaatactttttcaacctctatttcttacttcttgcctgctctcagtttgttcccgaaatgagacttggtgcactctatacctactgggttcccctgggcttcgtgctggccgtcactgtcatccgtgaggcggtggaggagatccgatgctacgtgcgggacaaggaagtcaactcccaggtctacagccggctcacagcacgaggcacagtgaaggtgaagagttctaacatccaagttggagaccttatcatcgttgaaaagaaccagcgggtccctgccgacatgatcttcctgaggacatcagaaaaaaacgggtcatgcttcttgcggacggatcagctggatggggagacggactggaagctgcggcttcccgtggcctgcacgcagaggctccccacggccgccgaccttcttcagattcgatcgtatgtgtacgcagaagagccaaatattgacattcacaacttcgtgggaacttttacccgagaagacagcgaccccccgatcagcgagagcctgagcatagagaacacgctgtgggctggcactgtggtcgcatcaggtactgttgtgggtgttgttctttacactggcagagaactccggagtgtcatgaatacctcaaatccccgaagtaagatcggcctgttcgacttggaagtgaactgcctcaccaagatcctctttggtgccctggtggtggtctcgctggtcatggttgcccttcagcactttgcaggccgttggtacctgcagatcatccgcttcctcctcttgttttccaacatcatccccattagtttgcgcgtgaacctggacatgggcaagatcgtgtacagctgggtgattcgaagggactcgaaaatccccgggaccgtggttcgctccagcacgattcctgagcagctgggcaggatttcgtacttactcacagacaagacaggcactcttacccagaacgagatgattttcaaacggctccatctcggaacagtagcctacggcctcgactcaatggacgaagtacaaagccacattttcagcatttacacccagcaatcccaggacccaccggctcagaagggcccaacgctcaccactaaggtccggcggaccatgagcagccgcgtgcacgaagccgtgaaggccatcgcgctctgccacaacgtgactcccgtgtatgagtccaacggtgtgactgatcaggctgaggccgagaagcagtacgaagactcctgccgcgtataccaggcatccagccccgatgaggtggccctggtacagtggacggaaagtgtgggcttaaccctggtgggccgagaccagtcttccatgcagctgaggacccctggcgaccagatcctgaacttcaccatcctacagatcttccctttcacctatgaaagcaaacgtatgggcatcatcgtgcgggatgaatcaactggagaaattacgttttacatgaagggagcagatgtggtcatggctggcattgtgcagtacaatgactggttggaggaagagtgtggcaacatggcccgagaagggctgcgggtgctcgtggtggcaaagaagtctcttgcagaggagcagtatcaggactttgaagcccgctacgtccaggccaagctgagtgtgcacgaccgctccctcaaagtggccacggtgatcgagagcctggagatggagatggaactgctgtgcctgacgggcgtggaggaccagctgcaggcagatgtgcggcccacgctggagaccctgaggaatgctggcatcaaggtttggatgctgacaggggacaagctggagacagctacgtgcacagcgaagaatgcacatctggtgaccagaaaccaagacatccacgtttttcggctggtgaccaaccgcggggaggctcacctcgagctgaacgccttccgcaggaagcatgattgtgccctggtcatctcgggagactccctggaggtttgcctcaagtactatgagtacgagttcatggagctggcctgccagtgcccggccgtagtctgctgccgatgtgcccccacccagaaggcccagatcgtgcgcctgcttcaggagcgcacgggcaagctcacctgtgcagtaggggacggaggcaatgacgtcagcatgattcaggaatctgactgcggcgtgggagtggaaggaaaggaaggaaaacaggcttcgttggctgcagacttctccatcactcaatttaagcatcttggccggttgcttatggtgcatggccggaacagctacaagcggtcagccgccctcagccagttcgtgattcacaggagcctctgtatcagcaccatgcaggctgtcttttcctccgtgttttactttgcctccgtccctctctatcaaggattcctcatcattgggtactccacaatttacaccatgtttcctgtgttttctctggtcctggacaaagatgtcaaatcggaagttgccatgctgtatcctgagctctacaaggatcttctcaagggacggccgttgtcctacaagacattcttaatatgggttttgattagcatctatcaagggagcaccatcatgtacggggcgctgctgctgtttgagtcggagttcgtgcacatcgtggccatctccttcacctcgctgatcctcaccgagctgctcatggtggcgctgaccatccagacctggcactggctcatgacagtggcggagctgctcagcctggcctgctacatcgcctccctggtgttcttacacgagttcatcgatgtgtacttcatcgccaccttgtcattcttgtggaaagtctccgtcatcactctggtcagctgcctccccctctatgtcctcaagtacctgcgaagacggttctctccccccagctactcaaagctcacatcataggccgtgcgttcgctggagggggccctggtcttggcgcttccctgatggacagagctcaagttccatttatattaaccgccacctgtggattttgcagtaattgctaacacatgcagttttaatgggaagtggctctgcgcctaaacggagtcctaacgctgcatcaacgggagggagggtcctgaaagagacccatctgggcctgtctgaacccctcgttcttcatgtttaggtgaatatgaatatgttaaagctggtggctcagctgggagatttatatgggtcactgtgcgagcttccttatgacttgaattttgttgtcacatgataaaagtttctgtgtagctgaaggttgtagaaggcttgtgtgtgtgtgtgtgtgtgtgtgtgtgtgtgtgtgtgtttttaaagagtcctaatgtgtatgtactctttatgtctttcttgctcttacaaagaggtgtcagaaaaatagaaagctcttggtgtcggtttgggaggaaaagacagtgacatttggtaaaaagttatccacacaataatctccattcggaaatgctcagtatcgtctccagccagccctgcttatccaggttacactggattcctgggatcgtaaccagtaaatgagaggagagggagagagagtgtcctaagtccaatctgttatccttgatctgattcagcatccatagtgtgtgagttaacttcacctgccacctcgtaaaagaatttcagaggtgtgatcccgctttattgggacctggtaacaatcacaaagccagtggctgtttgagaaggacctcagacattttcagcagagttgttttagcaggaaacgtgccactgaatggcccctaaatgtgtcgacagtgtgataagagactcaactaattctttaggcaacatggcagatgtgactcagatcctccaagaccaaagcggaaaggtcagggggctgggactcttctcttccatagaagcctgtttcctgttaggaggcataatggaagatgaccccacaaaggcagaggcatctttcggaacaacactggtggcagctttcagaacaaggaacccctggtgggaggacgcccaagctacagcgttgggatctgggatctgttccactgccggcagatttcaaggggaacttgctgaaaggcagccagtggtgaagatttctcccctcccaggatggactacatgccggcatgtttcttataaagctgtggctgcttgtttcagaggaagggagtttgcagtcgcgggacgtggtagagcaaggcattcttgggttttcaagttgcttcttgcagaagccacatatgcatgccataagggttaagttggtggatctttaagagccaagtgtggttgagatcttggatttgcgtttacttcttgatgaatacatatccttcaaaccctctgcctggcgctacttctgtgtgcttcagagatgtacatcacagcctggtttctgatgcctactaactcctgctcttggagagctggagacacgaggatcagatagtcccttgcctttggagcactcttgataagcttttgtattttgtgttgtccttttaaaatgttctagaatgactttacgttgcaggtactggttaattggctgttgacaccacatctattttgtcttatgattctgcagttttgcagtacttttctctatctgattcagccatttctgccagagggaaaaggtcggcagaaaagatgtattgagtgaatagttaaggataggatctttgtccaaaaatttcagaaagattgagcaaatctgacgtattcattgagtgagtttctgtgttttcaaaggtggaggagaaatttgtgctggaagtttttaagcctccgttttcttggaaatcagtctgtaacactggcaagtcttaagatagtcccatttagactttgcagatgctgaacctggctctgtaacgctgggaagtcttaagatagtcctgtttagactttgcaaaccctgtacctggctttgctcggagattcgggatgctggctcctgcaggcagggcgtgtgggagcctcgtcagaaagttttagaggtttccagcagaagcagaatgaagatggtctccctggccttttccttaattctcaattttgattgaggtgcacaagttgacttttaaagccaacgcttaagatactgattgacatcttcaagggagaatgctcccaggaggggctgaagaagccatagttggaagtggaaggtactcgtcagtgttctccacaaacctttttactctgttgtctcagccgcactggggcggaggcggtcaagggtgagaagtaccgacactcaagtgcaaactgccacgtcgttggcccatcccatcagtgggcagctggctgacgccattcactggacggtccctgaacacctaggaatgcacacaccgtgcttctcagacactggagacgcaaaggcaggaggatgcagtccggtgagaggacacgatctttacctgcacaatcagactgtaagcccagcagagaaccccaggggcgcctgggtacttctcggaggtcatcttagttgtggtggggaagacaaagaaataagcaaacaagaaactagagttactatacaagaaactctcctgagtttgtaaaccttaagcataaggattcagttgacctttttcttggttcatcaatctggaaagaacttacataaagcgccattgacactgtcacctgggagctccatgggccgtaagtctttgacagccaatttaatttgaggtcagagggccttgaggtacacagtcagcactgtttgaacacttttcctgaaagcaaaactcacagctccctgcgccctctgacaacactagctatttctgccagagtaagaacttctattactattttattattgttcatatgtcttttgatgatggttgtgtgacagggggaagcaggatctatttggtttcttcccctccccccaccccttcctttttgtctctctttttttttctctaagaaaatcaccagactagtttttccatcttgagtaatttcttatgtgggacagttttgatcctcattttgaaagcatgcgtgtgcacatgtgtgttgcctgtggtgccaggtgagacaggtggcactaactccagctgcttggaaggcatcccaagggcgcatcttaaagttggagcagacctcccttttccagcccctggggccattagaccacgtgctggaactagcattgtaaaattcccatcccagttccactcccctgaagtgaaacccttttttttttgtgacagtaaatcttaaaaatcattgtctctttatgaacatttcctcagtttcttctctgctgaaaatgtaagccatgctactttttaatgtattttgaattttgtgctcattggaaattgatatgctaatgcctcccccaccccccgccagacttttctttttatactttgtcttgtttttactggggtaggctgggcatgcgtgcgtgcctttagggcagcattttaaacctttgccaaaattgcaaatgggacatgtacattcttctgctccatcctacttaaacacctatcagctatttttatctttaaccttttctgtatgtttgaagtgtgtggggggtgtgtgtgtgtgtgaaagagcgagagaatgatgtcatctaaagttttttgaagaattatttggttttcattgcattaaaattctatcactcccagctttgttttcatttaaaaaaatatacaaagagctttgtaaatacaacacattttatttctcccccttcttttaatgtacagcttttttgccacttatatatacttaaaatattcccatgaattatgtccagttcttcttggaaaaaaatttggttttgaatgaacctgcaaagcatcctgcagcgtgagcagctcctccacctggagctccgaagcatcttctcaggccaaagcggcattacccgtgaatctgtcttctccgccacagcatggtttgaggcgcagtctgttaatatagctgggccatgtcagtgactgttgtgtttgtggggtcaggtggggggcatggtatttgcaaaaaaaacaaattatggctaatttattattttgttgcagtggggttaactgtaaactcatgtaagagtctgtgatttcctcattggttgatctctctctctgtaatcctcattgcaaattttcaccaggacagcgttttttgattagaggggagctctggcacagtatgctttaatttagcaggaacttccagatgatttaaattctcgatgctgtgatgacacacatatgatctttcgtgtttctgagcgactctactttcattgtttgccagcgtggctcgttgctgttgcccaataaagcttgtgtacgttctgc

SEQ ID NO: 2828 - DNA, 6724 bp, Homo Sapiens
  NM_006047
aaccacgccgttcctcccccttctggaacgcggagccgctgagcgggccgacggccattttgtgaagcggcgaaggaggtggtggctgcgttgggctccgggaagccgttcgggctggggctgtcggccgcggggcggaggcactcgcgcggggggtaattcggggtctgggttctggtgccgcgcagctttccccgtctaaaagttggttttaattggttgcccacaggattgacttggcctctacttcttgttaaggaaattcatctcttgttttatcaggtgtgtgtggtttcagcgcagcatggctgtggtcatccgtttgcaaggtctcccaattgtggcggggaccatggacattcgccacttcttctctggattgaccattcctgatgggggcgtgcatattgtagggggtgaactgggtgaggctttcatcgtttttgccactgatgaagatgcaaggcttggtatgatgcgcacaggtggtacaattaaagggtcaaaagtaacactattgttgagtagtaagacggaaatgcagaatatgattgaactgagtcgtaggcgttttgaaactgccaacttagatataccaccagcaaatgccagtagatcaggaccaccacctagctcaggaatgagtagcagggtaaacttgcccacaacagtatccaactttaataatccatcacccagtgtagttactgccaccacttctgttcatgaaagcaacaaaaacatacagacattttccacagccagcgtaggaacagctcctccaaatatgggggcttcctttgggagcccaacgtttagctcaactgttccaagcacagcctctccaatgaacacagtcccgccgccaccaattcctccaattccagcgatgccatctctgccaccaatgccatccattcccccaattccagttcctcctccagtacctacattgcctcctgtgcctcctgtgcccccgattcccccagttccttctgtgccacccatgaccccactgccacccatgtcgggcatgccgcccttgaatccgccacctgtggcacctctacctgctggaatgaatggctctggagcacctatgaatttgaacaataatctgaatcctatgtttcttggtccgttgaatcctgttaaccctatccagatgaactctcagagcagtgtgaagccactccccatcaaccctgatgatctgtatgtcagtgtgcatggaatgcccttttctgcaatggaaaatgatgtcagagatttttttcatgggctccgtgttgatgcagtgcatttgttgaaagatcatgtaggtcgaaataatgggaatggattggttaagtttctctcccctcaagatacatttgaagctttgaaacgaaacagaatgctgatgattcaacgctatgtggaagttagccctgccacagaaagacagtgggtagctgctggaggccatatcacttttaagcaaaatatgggaccttctggacaaactcatccccctcctcagacacttcccaggtcaaaatcgcccagtgggcagaaaagatcaaggtcaagatcaccacatgaggctggtttttgtgtttacttgaaagggctaccatttgaagcagaaaacaaacatgtcattgatttttttaaaaagctggatattgtggaagatagtatttatatagcttatggacccaatgggaaagcaactggcgaaggctttgtagagttcagaaatgaggctgactataaggctgctctgtgtcgtcataaacagtacatgggcaatcgctttattcaagttcatccaattactaagaaaggtatgctagaaaagatagatatgattcgaaaaagactgcagaacttcagctatgaccagagggaaatgatactaaatccagagggggatgtcaactctgccaaagtctgtgcccacataacaaatattccattcagcattacaaagatggatgttcttcagttcctagaaggaatcccagtggatgaaaatgctgtacatgttcttgttgataacaatgggcaaggtctaggacaggcattggttcagtttaaaaatgaagatgatgcacgtaagtctgaacgcttacaccgtaaaaaacttaatgggagagaagcttttgttcatgtagttaccctagaagatatgagagagattgagaaaaatccccctgcccaaggaaaaaagggattaaagatgcctgtgccaggtaatcctgcagttccaggaatgcccaatgcgggactgcccggtgtgggactgcccagtgcaggacttcccggtgcaggcctgcccagcacaggactgcctggttcagcaataaccagtgcaggactgcctggtgcgggaatgcccagtgcaggaatacctagtgcaggaggtgaagagcatgccttcctgactgtaggatcaaaggaagccaataatgggcctccatttaactttcctggtaattttggtggatcaaatgcctttgggccaccaatccctcctccaggattaggaggcggggcctttggtgatgctaggcctggtatgccttcagttggaaacagtggtttgcctggtctaggactggatgttccgggttttggaggtggaccaaacaatttaagtgggccatcgggatttggagggggccctcagaattttggaaatggccctggtagcttaggcggtcccccggggtttggaagtggccctcctggtcttggaagtgcccctgggcatttgggtgggccaccagcttttgggcctggccccggccccggccccggccctggcccaatccatattggtggtccccctggctttgcatctagttctggaaaaccaggaccgacagtaattaaagtgcaaaacatgccctttactgtgtctattgatgagattttagatttcttttatggctatcaagtaatcccaggctcagtgtgtttaaaatacaatgaaaaaggtatgcccacaggtgaagccatggtggcctttgagtctcgggatgaagccacagctgctgtcattgacttaaatgacaggcctataggttcaagaaaagtaaaacttgtattagggtagccattcacatcattttttatagggtagatcttcatattgctgtgattaatgcatccagattgttttcctagtatttccaggttagaacctgtggattgtttcaattgcatatagcttggtttccataacatagagcattggttgactgtttacagaagactcactcaccaggataaacattgctgtatgttacagtaaagctatctggagagaacacataaatgattttggcataccattagagaaaccatttgtaaaactcaaatgaccacataaagcttatcaaggagtctagattggttttgttttataccatatgggatgaagaaaatagaaatgtcagtagaactcattgagggtgctcttgccagctgctgaaaatagaagttggctactctcagaatttggtttaaagctggacagatttgctttgttatagggtaaagctttgtctaaagtcctcattttcttttaaaattgaataaaatttctgtatacagattcattgtatgtacctttattgcttcttaagggtccttgctgtatagacagtcctgcttcagaagttgctgctttgtttgtctaattgactcatttgtaaatgagcagaactgttttgttggtttttttccctaaatataaaagtccacacttcgtttgtgctataacctcaaactttgatttctaatgtcacacttaaaactgtgtggaataagacttttgccataaaaataaactatggagtcctttatctaccagagcctttttggtttgaccgccacgatttaggttagtcagtttaaaaattgttcatgttgtttggatggtatcgaaaaccagaaaccacttttaataatgtgtttaagatacttgatttgaagtccttttcatatggactaattgtagtatcaatttcctcctgtcccgattatgtgaaattttggcctttaaacaaagaggggcccattcataagaaagtgttatatctaggtttttaaaactgaagttgaaattatctttgttagcagtagtagtatagaataaaagatccgtatgctggttcgtagattgatacgtgttagtcctgttatttggaggctttttggcatagttgttcgatcaggagcctgtttactaaaagtcttcatacagagtacaagtgcagccgccagaggagaaaattgagattcttgaccctttcatactcttttctttggtattcaggacactaaggcaggaggaccacatgagttctggttggtaagtgtccttgtcatgaaaacacttgccttacaaggctctaattatgatttccctagtcagtgctctgaagatgtgtcacattatattataaacaatacggaaggggagataggtgagatgatatgaaaaacaaattttctcactgtcataaaaggctctaattatggttactttccttgtgatgaaaaacttggccttacagggctctagttatggttactttccctagtcaatgctctgaaaatgtgtcacattataaacaatacagaaggagagatagatgagagatcatgaaaaccaaattttatcttttacatggcccctttgtcttcgtttgaaacatccccaacatttcctacaaatcagcgtagttacaaaggggtcagtcttttaaaataagtatttcctattaaactatatatatatacagtgcctttttggtgttgtgagtcagtggaacactgaaatacagcggttgtgtaatttaagagtggcaacagtttcatttgataagatttgaaaaggctttttatcactacaatcttagaggattgacagtacaggatttttgtttaagagaaggattgtttagactcaagaggtgactatgttgtgggtcttttgataattcatgaatacagatttgctttgaccgatcactagatactgcctcctcaatttcaaaagcaatataacgtttgtatatgctgtttaatttaagttaatgttaagtaatcatttctcattccaaagacaatgcaaaaaacttcagcactgcttgagagttgtatttcagccacagatattttctccattggaaagctattttcattttagaaaaatgggttgtttgaagatgaaagtcttttatcttttttcacaatttattttggttatatgttcgtacattcttattaaatatttcatacactttattgcaactactttgttatttctacatcttagataaatgctgaaaaggaaaacgatttcattgttcatctaattaaataaattaaaagagcggtttgtgtagaaattggagagaactatgttttatatgaatcacaacagtgctcgttgtggactgtaattaaatgctttgccctctggaacttgatttttgtgtatctgagatttattaacagtgctaactgctaaggatactgtttatcttgttctgggcattggagtttcagtttttaaaaaattcttgaaaatgtattctgtgaaactactcatacctctcttcctgcgaattttctcctaagaactaggtttggggtagaaatgaattgacattattttctcatttgctttgtatggtatgaaggatttgtaaagctttgctcaaagttgtgtgcatttgtaaacactatcatgatattttcaattttatgtgtaaattttattgtctgtttttggtgactctgacattaatggaagagaatattttccattagatttaattttttttcctctcccttctgattttttttttattggtgttcatttttcttttgatttaaaggattagagaaatctacaaatgtatgtcataaataagcaaatttgtaaacttttctgaactttagtgaaacatttagttcacaagcataatttggaggtgtgttctgtgtttacacagtagtttggatgtacaattattattagtggctttttaaaaaatgaaacagtgttaagtgaaatgtagttcctagctttgtactccaagttgtcaaagcatcaacaatgaaaattcgattaggaaactttatttaaaatttcaggtagtaatattcagtgtagttaaggccagtcttaacccactggatgaaaatctaggactgtatggaagtaagcaaacattacatttttaggtggaaatagtcagccttgcataaaaacaaggatgcgtgaaagccttaaattccagctcccttttactggagtctgtggttgtgtacaggtatgggccaagtgtaaaatctcatcaattttaagaacactcgggaaatgagtaaagaaaatgtaaaattgctgctagtcaaatcttttggaaagaatttctggaagtggtcactttaaaaattattttccacccttgcaaaattgccacatttaaattgttttactggcagttctatagtagtccagactttagaaaccaaacacaacaaaatggcttgttgccaatatggccacaacattgccagcaaatactgccttggcatcactcagcagaggtttttgtttataaagatgaagtcttgaatactgttcaataaacttgtcaaaaaataaaacaggctgatgcttttaatgctttaactgcaaaaaaaaaaaaaaaaaaaaaaa

SEQ ID NO: 2829 - DNA, 785 bp, Homo Sapiens
  NM_006049
gggagtcggcggcgatggcgtcatcaccgagtgccgggccgacagcagcccggaggttggctatgtgaccaggcaacatgctgagccggcttcaggaactgcgcaaggaggaggagacgctgctgcggttgaaggcagccctgcacgaccagctgaaccgcctcaaggttgaagaattagccctccaatcaatgatcagttctagaagaggggatgagatgctgtcttctcacactgtacctgaacagtcacatgatatgttggtgcatgtagacaatgaagcatcaatcaaccaaacaaccctggagctgagcacaaagagtcatgtgacggaagaggaggaggaggaagaggaagaagaatcagattcctaaaggagggggaaagccaggctggtgaaatgcacatctgaacagagacaggcatgggaaggaggcccaaaagcgacatggcaaaccaccgggcaggggactcgctctttgttgcttcccaaacacttagacgccagcagcatgggttggtgtgctgggctggttaaggccgatggtggagcagagccaacctgcaaaatccacttcctcagcatcagatctcttgataaaagcatgaacctgcatgtaaggaaacgagaggacgtggtgttaaaaagaaacaaaaaaacaaaacccaccaggaaggaaaatccaagagtttcaggtctagagcttgtgctgcacttggaaagagcacctggcacctgcccctgagcaacagtggggccagctgcaggcccaaagacctgctcc

SEQ ID NO: 2830 - DNA, 4620 bp, Homo Sapiens
  NM_006055
aactgggcggtaaaatagcccttctgttactgtccggggctgcggggtgagaggccagggccgagaagggcttcaggacgcgggaggcgcacttgcttcaagtcgcgggcgtgggaacggggttgcaaaacggggcctctttgtccgggcttgcttccggcgtcatggctcaaagggccttcccgaatccttatgctgattataacaaatccctggccgaaggctactttgatgctgccgggaggctgactcctgagttctcacaacgcttgaccaataagattcgggagcttcttcagcaaatggagagaggcctgaaatcagcagaccctcgggatggcaccggttacactggctgggcaggtattgctgtgctttacttacatctttatgatgtatttggggaccctgcctacctacagttagcacatggctatgtaaagcaaagtctgaactgcttaaccaagcgctccatcaccttcctttgtggggatgcaggccccctggcagtggccgctgtgctatatcacaagatgaacaatgagaagcaggcagaagattgcatcacacggctaattcacctaaataagattgatcctcatgctccaaatgaaatgctctatgggcgaataggctacatctatgctcttctttttgtcaataagaactttggagtggaaaagattcctcaaagccatattcagcagatttgtgaaacaattttaacctctggagaaaacctagctaggaagagaaacttcacggcaaagtctccactgatgtatgaatggtaccaggaatattatgtaggggctgctcatggcctggctggaatttattactacctgatgcagcccagccttcaagtgagccaagggaagttacatagtttggtcaagcccagtgtagactacgtctgccagctgaaattcccttctggcaattaccctccatgtataggtgataatcgagatctgcttgtccattggtgccatggcgcccctggggtaatctacatgctcatccaggcctataaggtattcagagaggaaaagtatctctgtgatgcctatcagtgtgctgatgtgatctggcaatatgggttgctgaagaagggatatgggctgtgccacggttctgcagggaatgcctatgccttcctgacactctacaacctcacacaggacatgaagtacctgtatagggcctgtaagtttgctgaatggtgcttagagtatggagaacatggatgcagaacaccagacacccctttctctctctttgaaggaatggctggaacaatatatttcctggctgacctgctagtccccacaaaagccaggttccctgcatttgaactctgaaaggatagcatgccacctgcaactcactgcatgaccctttctgtatattcaaacccaagctaagtgcttccgttgctttccaaggaaacaaagagtcaaactgtggacttgattttgttagcttttttcagaatttatctttcattcagttcccttccattatcatttacttttacttagaagtatccaaggaagtcttttaactttaatttccatttcttcctaaagggagagtgagtgatatgtacagtgttttgagattgtatacatatattccagaacttggaggaaatcttatttaagtttatgaatataaccatctgttactgttctaaaaatgtttaaaagaaactcaatacagataaagataaatatgtgactattattgggtattacacttcacttctctttaatatttttcctccaactggagggcagacaattttctgacttgcttttctctaggtggttcattttgaaaggggacagaaatataactaaatgcttccaggagaaaaattccaagagttacaatctggacttggtacctaaatatcattttttaaattcttgatgcctatttggactagaggtaaacatactttcagattggcctgtttttgtcggtaaggcatacagccttcagaagccaacatttttaatcaaaaacttataaaacatgatgatcattgtgaaaattctgagttgaaggttagtttaagataagctaacaataacagtctgtgttttctctaaaataatctgagttttttggaactctttatttaaatatgtgtgtttttcagtattcaaataagatcaggaagccaattttctatgtatgaatatgctttaacctaggatttcagtccactctgactgactttctaaactttaacttgggtttttacagtgactatgcattagtgctgactctttggtataagccataaaatattttccttcctatcaatttatctgaactttggtcttttcactaaattgtacagtattctacttctgtttaaaaaggggagatgagaaagggaatactatctaaccaataacttgaacaaaaacactaaactaagcatttaatagaaatgctttttattgaggaggtattatccagagttcatgcttagaacaaatgcatctttgcgtatcctagacttaacaattcatcagtttctgagaccacagaatcaggttttccgtagtagataaagactctctggtgcttcaaattctgttcaagtgttttgactcatcagcttctactctttctattactgcctttgcctggcttgttttgtctctttgcaactgattttgcaaaaaaaaattgtagctttaaaataacagggtctaagtattttaaatgtgcctatttcacagctctcttggtcacaaaaacatgctatttttattggaacttcaaaccaaatccccactgagtgtgtactggttcctgcaggtagcagtctcctattatctcctgtttagcaccaaaagagctaatattattggaaactgaccttttaaaggccactggcagtaggatttaaaaagcagcccactgctcagtttccaggatcagcttcctccttctgtcacttgtgtaagttggcactaccttgtgcctctcagattgctgaagtgctgctggtaagcatgtgcatgctctgcctttcttgtgaaagttttcaatcagcgatatcagcacttacagtaagaagtaaaagtagtgcacagcaaagctaatttgcctttgcctggggtgttcagcttgaaagaataaagctcatttggtttagttaaatgtcttactctactgtgcctatgcttttagctgcgttactaagcaagggaaaaataacagtttctctgagccagagaagacttgatcacagttctccaagcatcgtgatagcaatgcttaaccccaggaagatttcaaggcagggagaagaacatttcaaataagattcttgttaacccatttatgcctagtgttccattattggaatgctaagcttgtgggagtcatttacatcctactgctcaaagtcattgccaaggtctgatttttcacacaaaaaattgcaacccccagcataaatgggttagctactgtcatcagttagcaaattcatccacacaaacacaattagagtttggtttttttttaagcttttcaaaacttactaaactggcacaattttatatgtatgctatttgttgtatttatgcttaagagcaaaaaagttttgatgggattttaaattcaggcaaagcctacaacgctgagacaatcccctaacaacatggtagtaactaaagaaacttttatactaggcttcttagttttaaaaggaagtggcatcattgtttcagttctagtttgtatttttctctcagatatttttcttctttaaaaatctttcccagaagttggttcctagaaaactcaataccatcatctcttatctctatacagggactaggtaataaaaccttcaaaggttgtcaaaggtcatcaagcagtgttcatttatcctgtcacatgtttctgtttctatagtaatttagaaattgcaaatagttaacttttcatcatgtaaaaagttaacattatcctatttccatagataccatggacggcggtgtggcctgagttgtcagtctttaatcctgagtcatgtggctctcttttcatctttgatgtcagttccaattatttggcatcaaaaaccttcatggtaggtagagttttaggtaaaagtggatctagggttactttctttattaacatttcctaaataactgaattgagagacatactctgctactatgtcctcaggttaatttttgtctgatcttacgatgccctgccttttactagctactttagaaatagaaaatgtgaagagtgactatttacatgtatactcctttggctgctagaactcatctgtagtcctttattatttacactgaattccaatttcatttctgcttccgctaagtaagagcacctcattcctgtgttttctctactattgagctgtagacgaactgtttctctaattataaagcaaactgtttgggatattcagggaaactaccccaatgttatgttgtcatttaatgggaaaggctgggatcatatgtatttctatgttctgtaaagtatttgacttactagttctcaataaaattttattaggactatataaaaaaaaaaaaaaaaaaa

SEQ ID NO: 2831 - DNA, 3274 bp, Homo Sapiens
  NM_006056
gcgtcggggcgcgggctggggccgctgtcagtcagtccactggctcccgcgccgcgtctgtgtccgtcgctcggagggtggaagccggggtctcgcgggccgcgggccgcatgactcctctctgcctcaattgctctgtcctccctggagacctgtacccagggggtgcaaggaaccccatggcttgcaatggcagtgcggccagggggcactttgaccctgaggacttgaacctgactgacgaggcactgagactcaagtacctggggccccagcagacagagctgttcatgcccatctgtgccacatacctgctgatcttcgtggtgggcgctgtgggcaatgggctgacctgtctggtcatcctgcgccacaaggccatgcgcacgcctaccaactactacctcttcagcctggccgtgtcggacctgctggtgctgctggtgggcctgcccctggagctctatgagatgtggcacaactaccccttcctgctgggcgttggtggctgctatttccgcacgctactgtttgagatggtctgcctggcctcagtgctcaacgtcactgccctgagcgtggaacgctatgtggccgtggtgcacccactccaggccaggtccatggtgacgcgggcccatgtgcgccgagtgcttggggccgtctggggtcttgccatgctctgctccctgcccaacaccagcctgcacggcatccggcagctgcacgtgccctgccggggcccagtgccagactcagctgtttgcatgctggtccgcccacgggccctctacaacatggtagtgcagaccaccgcgctgctcttcttctgcctgcccatggccatcatgagcgtgctctacctgctcattgggctgcgactgcggcgggagaggctgctgctcatgcaggaggccaagggcaggggctctgcagcagccaggtccagatacacctgcaggctccagcagcacgatcggggccggagacaagtgaccaagatgctgtttgtcctggtcgtggtgtttggcatctgctgggccccgttccacgccgaccgcgtcatgtggagcgtcgtgtcacagtggacagatggcctgcacctggccttccagcacgtgcacgtcatctccggcatcttcttctacctgggctcggcggccaaccccgtgctctatagcctcatgtccagccgcttccgagagaccttccaggaggccctgtgcctcggggcctgctgccatcgcctcagaccccgccacagctcccacagcctcagcaggatgaccacaggcagcaccctgtgtgatgtgggctccctgggcagctgggtccaccccctggctgggaacgatggcccagaggcgcagcaagagaccgatccatcctgagtggagccttaaagtggcttcacctggaggggccagagggtcacctggagctggggagacacatctgccttcctctgcagggatgccttcacgtactgtccctagttcagcctagaaattctgaccagcacctcagtttccctcagagggaaacagcaggaggagggatccctgactgctgaggactcacactgaccagacgccacaccttgtgcttcttatctgtccactgccactcccccagttcaaatccttaccctgcagaaatatcacagttagctggggctcagcagtcctccctctggggactccctgccaccactgccagtttctgaaacggtcccactgggtcctcactgtccttcccagttcctgttcaggttctggcaggggcccagggatccaggggacctggttccaatctcagccctgctgtcaccaccttgtcatgcaccatcaagcatatcagtctacctttctttttttctgagacagagtctcactctgtcgcccaggctagagtgcagtggcgcgattttggctcactgcaacctccgcctccggggttcaagcgattctcctgcctcagcctcccgagtagctgggactacaggtgagccccagcatgcccagctaattttttttaatttttagtagagacggggtttcaccatgttggccaggctggtctcaaactcttgacctcaggtgatccgccgacctcggcctcccaaagtcctcggattacaggcatgagccaccacacccggccaatcagtccacctttctaggccttggttccttgcctgaaaaatgaaagaggcgctggctttccacagtgtcatgctttggcactttagctatggttttctttctgtgtgtgtgtaagccactgcttataataaaaccaacaataccctcagactgaaagggcggaagttattatctgcatctttatcaaccccaagccccacttcctccctgacctccccatgccctccccagcctctcccagcacaagtggggcaaagccagcatgcaagcagaccccaccaccacagcccacctccgtcctcacatacgtgcaggctggctcgggagtccagtgagcagagcattggacttggctggccagagggtctctgagggcaagagacatggccaaccaagggcaaggagtgaccctgtggagggttctgccgaactcaatgcagtgagaagagggacagggacaagtagtccttgaaactgagccccattctgaatccctgcaggccaagtcattgctcagccaggactcagttcatggaggaaacttgtcctgctgcagtccctgagtcttgtcctcctgagaggaagccctggcttccaaggctgggagctggaggatgaccttcggtcggtctgtctgggttctccctgcagacagcttcctagctcatgcccatagctcatgctccctgccgagaaagtggaggacgtggtacagggttgcagatgtttagttttaaaaattcaattataaaaataataaatgctcatgatagaaaatttggaaagtgcaaataagcaaaaatgaaaacaattttaaaaatgtaaaacctctcttgccagggaatgggggaagggcaagtgaggagttctttaatgggtgaagagtttcagttttgcaaaatgaaaaagttctggagatcagttgtgcaacaatatgaatatacataacaatactgaactatacactgaaatggttaagatggtacattttatgttatgtgtattttaccacaatttttataaaaagaggattaaatctaaaggaaagaaaaaattaaaaccacccataactttactctgaagcagtaacagtggcatgtttcctccta

SEQ ID NO: 2832 - DNA, 3268 bp, Homo Sapiens
  NM_006058
atgcttacgtgccttttggcaggtcccctccctgttctggcctgtgttcccctcggcacaaggaaggggctgggtggtctctgtggctcgcctccgctctgaaattccggctttcaaggtggccccaggccttcgacaggggcttccggcgctgggagtgcggcaaggcgccgcgcaggcccgggacggtggccccagggaagtcgctcctagaggggaaggccgccgaagggacgagagacaccgcgggcccccggaaccgcaggcagccggtgtttacctcgctcggtcccaccccaggcggccgcgggcccgcccggagcgcgcggcgcgattgggcgagtggcctgccagtctccggggactttcccaggggtggggcggcccggccaggcccccggcacttcctcgtcctcggcccgggtgccctgcccccgtccaggagccctaggagtgctacggggggccggagccttgcccgggccgctgccccgtccctggattcggggctggacgcagcaagcggggcgctgtgtccccaagctccccgtcctcgggcgggcaccacggcaggggctgagctaccctcatggaagggagaggaccgtaccggatctacgaccctgggggcagcgtgccctcaggagaggcatccgcagcttttgagcgcctagtgaaggagaattcccggctgaaggaaaaaatgcaagggataaagatgttaggggagcttttggaagagtcccagatggaagcgaccaggctccggcagaaggcagaggagctagtgaaggacaacgagctgctcccaccaccttctccctccttgggctccttcgaccccctggctgagctcacaggaaaggactcaaatgtcacagcatctcccacagcccctgcatgccccagtgacaagccagcaccagtccagaagcctccatccagtggcacctcctctgaatttgaagtggtcactcctgaggagcagaattcaccagagagcagcagccatgccaatgcgatggcgctgggccccctgccccgtgaggacggcaacctgatgctgcacctgcagcgcctggagaccacgctgagtgtgtgtgccgaggagccggaccacggccagctcttcacccacctgggccgcatggccctggagttcaaccgactggcatccaaggtgcacaagaatgagcagcgcacctccattctgcagaccctgtgtgagcagcttcggaaggagaacgaggctctgaaggccaagttggataagggcctggaacagcgggatcaggctgccgagaggctgcgggaggaaaatttggagctcaagaagttgttgatgagcaatggcaacaaagagggtgcgtctgggcggccaggctcaccgaagatggaagggacaggcaagaaggcagtggctggacagcagcaggctagtgtgacggcaggtaaggtcccagaggtggtggccttgggcgcagccgagaagaaggtgaagatgctggagcagcagcgcagtgagctgctggaagtgaacaagcagtgggaccagcatttccggtccatgaagcagcagtatgagcagaagatcactgagctgcgtcagaagctggctgatttgcagaagcaggtgactgacctggaggccgagcgggagcagaagcagcgtgactttgaccgcaagctcctcctggccaagtccaagattgaaatggaggagaccgacaaggagcagctgacagcagaggccaaggagctgcgccaaaaggtcaagtacctgcaggatcagctgagcccactcacccgacagcgtgagtaccaggaaaaggagatccagcggctcaacaaggccctggaggaagcactgagcatccaaaccccgccatcatctccaccaacagcatttgggagcccagaaggagcaggggccctcctaaggaaacaggagctggtcacgcagaatgagttgctgaaacagcaggtgaagatcttcgaggaggacttccagagggagcgcagtgatcgtgagcgcatgaatgaggagaaggaagagctgaagaagcaagtggagaagctgcaggcccaggtcaccctgtcaaatgcccagctaaaagcattcaaagatgaggagaaggcaagagaagccctcagacagcagaagaggaaagcaaaggcctcaggagagcgttaccatgtggagccccacccagaacatctctgcggggcctacccctacgcctacccgcccatgccagccatggtgccacaccatggcttcgaggactggtcccagatccgctacccccctccccccatggccatggagcacccgcccccactccccaactcgcgcctcttccatctgccggaatacacctggcgtctaccctgtggaggggttcgaaatccaaatcagagctcccaagtgatggaccctcccacagccaggcctacagaaccagagtctccaaaaaatgaccgtgaggggcctcagtgagaccagattgtgtcatttggctccaccttcatcttgcagagccagctgatctcagattgccaagaaactagaagccacttgcacggtgtggccagagcctcagctggatgagaggctgagatgggtggccagcttgtacaccagtccctgaactgagctgtttacaggactggggaggctccacccagaaggctttcatttgtactctgctgggagtgactgggaaaaactccttccctgctgctgagtggagagaggcctcatccggctttgacccaccatccgttgcagaagcctccaggagcagcaatcctaagagtgggaggcagccaagacccccttccttcaaaacctcccggaagtggtttcaggccctctagttgccatgaccaatttgtgtgtgtgtttaatttttgcttcaagctctgtagcaggacctgccccacgcacacccctacccctctgtgaggagctgtgggaagtgtgggtttgtctccagaacagaagagaatgatggatattctggctctggggccctctccaccaccactcacagtagccttgctgaagccatcacagatgggagaaggccatgccagccacgtccgccgaggggcgccagcctgaagctgccaggccctgaggttcagaccctggaccccatagctggaggcctgtggtgccagaagcccagattagggtggctgtccatccctggatagctatttgcacgaatcatggacataaatccaagttgaagaagatcaa

SEQ ID NO: 2833 - DNA, 2219 bp, Homo Sapiens
  NM_006061
gcacaaccagaatttgccaaaacaggaaataggtgtttcatatatacggctctaaccttctctctctgcaccttccttctgtcaatagatgaaacaaatacttcatcctgctctggaaaccactgcaatgacattattcccagtgctgttgttcctggttgctgggctgcttccatcttttccagcaaatgaagataaggatcccgcttttactgctttgttaaccacccaaacacaagtgcaaagggagattgtgaataagcacaatgaactgaggagagcagtatctccccctgccagaaacatgctgaagatggaatggaacaaagaggctgcagcaaatgcccaaaagtgggcaaaccagtgcaattacagacacagtaacccaaaggatcgaatgacaagtctaaaatgtggtgagaatctctacatgtcaagtgcctccagctcatggtcacaagcaatccaaagctggtttgatgagtacaatgattttgactttggtgtagggccaaagactcccaacgcagtggttggacattatacacaggttgtttggtactcttcatacctcgttggatgtggaaatgcctactgtcccaatcaaaaagttctaaaatactactatgtttgccaatattgtcctgctggtaattgggctaatagactatatgtcccttatgaacaaggagcaccttgtgccagttgcccagataactgtgacgatggactatgcaccaatggttgcaagtacgaagatctctatagtaactgtaaaagtttgaagctcacattaacctgtaaacatcagttggtcagggacagttgcaaggcctcctgcaattgttcaaacagcatttattaaatacgcattacacaccgagtagggctatgtagagaggagtcagattatctacttagatttggcatctacttagatttaacatatactagctgagaaattgtaggcatgtttgatacacatttgatttcaaatgtttttcttctggatctgctttttattttacaaaaatatttttcatacaaatggttaaaaagaaacaaaatctataacaacaactttggatttttatatataaactttgtgatttaaatttactgaatttaattagggtgaaaattttgaaagttgtattctcatatgactaagttcactaaaaccctggattgaaagtgaaaattatgttcctagaacaaaatgtacaaaaagaacaatataattttcacatgaacccttggctgtagttgcctttcctagctccactctaaggctaagcatcttcaaagacgttttcccatatgctgtcttaattcttttcactcattcacccttcttcccaatcatctggctggcatcctcacaattgagttgaagctgttcctcctaaaacaatcctgacttttattttgccaaaatcaatacaatcctttgaattttttatctgcataaattttacagtagaatatgatcaaaccttcatttttaaacctctcttctctttgacaaaacttccttaaaaaagaatacaagataatataggtaaataccctccactcaaggaggtagaactcagtcctctcccttgtgagtcttcactaaaatcagtgactcacttccaaagagtggagtatggaaagggaaacatagtaactttacaggggagaaaaatgacaaatgacgtcttcaccaagtgatcaaaattaacgtcaccagtgataagtcattcagatttgttctagataatctttctaaaaattcataatcccaatctaattatgagctaaaacatccagcaaactcaagttgaaggacattctacaaaatatccctggggtattttagagtattcctcaaaactgtaaaaatcatggaaaataagggaatcctgagaaacaatcacagaccacatgagactaaggagacatgtgagccaaatgcaatgtgcttcttggatcagatcctggaacagaaaaagatcagtaatgaaaaaactgatgaagtctgaatagaatctggagtatttttaacagtagtgttgatttcttaatcttgataaatatagcagggtaatgtaagatgataacgttagagaaactgaaactgggtgagggctatctaggaattctctgtactatcttaccaaattttcggtaagtctaagaaagcaatgcaaaataaaaagtgtcttgaaaaaaaa

SEQ ID NO: 2834 - DNA, 2143 bp, Homo Sapiens
  NM_006064
ctctatggtattcttcccagcccacccgtccctttggtagcggcagtcacgtgacagactccggggtaaggcagatgcccacgtgatcctggcctgcagttgggtggctgcggtgagatacctgggttcctgaagggcgggtggttaggtcgtaactactgcccccgccggctgactctccgagcggccgggctcggaagccacgagccagctgaggcgttctccgcttagtgcctacggcatgggtcagctctttctgccacctccgccttcgcggtcctcacctctttgcgggtgaagttacctttgggtttccagaccttgggggcctgaggcccaaactcgggacgaacccctaacccacctctcttttcctgtcattctccaactcttactttgtaccacggaatcacttggccttaaagctagccagctcggccgtgccttgaggccaggttcgagagataaaggtaaccgtggggaaagcggccccccagtggacaaaggcggaggcaagaatagagcaggcctgagggccataggcgatgagaataggcagttgaggggtgaaaaagaaaacaaacaaacaacaacaacaaaccctgaagagtactgaagatttagaagggactggaaaggacttgttgcgcaatggaagaatctgactctgagaaaacgacggagaaagaaaatctggggccgagaatggatccaccactaggggaaccggaaggatcgcttgggtgggtgctaccaaatacagccatgaagaaaaaggtgctgttgatgggtaaaagtgggtctggtaagaccagcatgaggtctattatctttgcaaattatattgccagagacacacgtcgccttggcgcaacaattgatgtagaacattctcatgttcgatttctgggaaacctggtattgaacctgtgggattgtggtgggcaagacaccttcatggaaaattatttcactagccaacgggacaacatcttccgaaatgtggaggttctgatttatgtctttgatgtggagagccgcgaactggaaaaggacatgcactattaccaatcatgcctggaggccattctgcagaattctccagatgccaaaatattttgcttggtacacaaaatggatctggtacaggaggatcaacgggacctgatttttaaagagcgagaagaagatttgaggcgtttgtctcgcccattggaatgttcttgtttccgaacatctatctgggatgaaaccctctataaggcttggtccagcatagtttatcagctgattcccaatgttcagcagctggaaatgaacctaaggaattttgctgaaattatcgaagctgatgaagtacttctttttgagagagctacttttctggtaatttctcactatcagtgtaaagagcagcgtgatgcccatagatttgagaaaataagcaacattattaagcagttcaagctgagctgcagcaagctggctgcctctttccagagtatggaagtcaggaactctaacttcgctgctttcattgacatctttacatccaacacttatgtgatggttgtgatgtctgatccgtccattccttctgcagctactctgatcaacatccgcaatgccaggaaacactttgaaaagctggaaagagtggatggaccaaagcagtgtcttctcatgcgctaaacattgatgaatattgtttcacacaaaaattaaaagtttcctaattaatgttgtattcatatatgtaggctctgaaatgttgtgatgcttattgcttctgtatttcttctctactccctagtcttaatgtttaaccttgaatgctattaacttaaatagccattgaggagttagaagatgaattgttcatgaagtcggtgttacataaaagtaggtgatatgtaagttttctgataacaaggttctaatagtgtttaaatgtactggtaacctggttccaatagttgtgtttgcccaagcctttctcggcatcatcttgtattccttatcagatagtaagtaacctgtaagtttggagtattactgttttctcagcatgcattaaaaatattccttaacttcaattgtaaataaacttttggtgttagggaaaaaaaaaaaaaaaaaaaaa

SEQ ID NO: 2835 - DNA, 2469 bp, Homo Sapiens
  NM_006065
gaactaagggaggcagggcttgtcttctctcctcagagcagagtctgcgatcttcccagcacagacgtttggacagagcaggctcctaaggtctccagaatgcccgtgccagcctcctggccccaccttcctagtcctttcctgctgatgacgctactgctggggagactcacaggagtggcaggtgaggacgagctacaggtgattcagcctgaaaagtccgtatcagttgcagctggagagtcggccactctgcgctgtgctatgacgtccctgatccctgtggggcccatcatgtggtttagaggagctggagcaggccgggaattaatctacaatcagaaagaaggccacttcccacgggtaacaactgtttcagaactcacaaagagaaacaacctggacttttccatcagcatcagtaacatcaccccagcagacgccggcacctactactgtgtgaagttccggaaagggagccctgacgacgtggagtttaagtctggagcaggcactgagctgtctgtgcgcgccaaaccctctgcccccgtggtatcgggccctgcggtgagggccacacctgagcacacagtgagcttcacctgcgagtcccatggcttctctcccagagacatcaccctgaaatggttcaaaaatgggaatgagctctcagacttccagaccaacgtggaccccgcaggagacagtgtgtcctacagcatccacagcacagccagggtggtgctgacccgtggggacgttcactctcaagtcatctgcgagatagcccacatcaccttgcagggggaccctcttcgtgggactgccaacttgtctgaggccatccgagttccacccaccttggaggttactcaacagcccatgagggcagagaaccaggcaaacgtcacctgccaggtgagcaatttctacccccggggactacagctgacctggttggagaatggaaatgtgtcccggacagaaacagcttcgaccctcatagagaacaaggatggcacctacaactggatgagctggctcctggtgaacacctgtgcccacagggacgatgtggtgctcacctgtcaggtggagcatgatgggcagcaagcagtcagcaaaagctatgccctggagatctcagcgcaccagaaggagcacggctcagatatcacccatgaagcagcgctggctcctactgctccactcctcgtagctctcctcctgggccccaagctgctactggtggttggtgtctctgccatctacatctgctggaaacagaaggcctgactgaccctcagtctctgctgcctcctcctttcttgagaagctcagcctgagagaaggagctggcgagaaccttccccacactcagctccaaacgcctcctctcccaggtcatctgcctgcccacacgctcctgttccaccttcacaagaccatgatgccccaaagcagtgtctctattcacggtcctgagcaggggccatgggattgggctctgggcactgactcatggcacctccctagaaggtgagaaacactccaaatctaaacacaccaggacttctcccatccgtcgccttgggactggccataaaccacagactctctccaggctctcaagagttatcctgtcttctggattcctgcctaccccaactcccccagccttgttgaggttctctactgcctcctgaatacacatgaacccctataccaattttaagaaaaaaatgattctctttcctctttgtccaagcatcctatccctcaaacccaaaaagaaagaagctctcccttctctctctgtgatggagacagtatttcttctagtatcctgcagccttcccagtcctgctgcttgtggtagaaatgctgccacagcccaacattgaggagccctcgatgactgccctttacaactcatattcagttctgcctccaaaatgcatgtgtccacttacatgagatggtaaatgtttaacaatggactttctgaaagggaaaaaccaaaagctgttttgcagtgcttgccaatttctctagtgtaataactcccaacctgaccaatttcacactgccaacagttaaacaaccagattgcaagattcctgaaatttaacaattggttttcagggcccagtccaagcctgctgctggaaacctcagagttaaatccctattctccacacctctcacctccaccacccctccctgtcccagccagcatcatctctttggggaccactcctctggctttcatttttcagccacagtgattctttggaaaagtcaaatcatatcacttctctgcttcttccccaacacagctgcatggctcccgctctccctccttcaagtctctgctcaatgtcacttcattaaaggcaccttctataaactaaaaaaaaaaaaaaaaaaaaaaaaaaaaaaaaaaaaaaaaaaaaaaaaaaaaaaaaa

SEQ ID NO: 2836 - DNA, 1597 bp, Homo Sapiens
  NM_006066
aaaaggcgaggctggccccgccccttgcaccgcccacgtggccagcgccacctgcctcattgtgcccaggagttctccaaacccgcgctgcggagtgagtgaccaagttccggccagttcgacctcgaggatccagaggtggagacggtactacctcccagctctgttttccatccccttcaggtccttcctcgggaggcggcgaaggcggtccaccctgcgcgtgatcctttatgcccggcccctgcccctccctccgggtggaacttccccctcaccgccagacttaagctgaggatcgttggatctctggcggggtgcagaactgagcccaggccacagtaccctattcacgctctgtgcttgtgccaaggtttcaagtgatcctcccgcctcagcctgcccaggtgctgagattacatgtatgagccactgcacctggaaaggagccagaaatgtgaagtgctagctgaaggatgagcagcagctagccaggcaaagggggcaatggcggcttcctgtgttctactgcacactgggcagaagatgcctctgattggtctgggtacctggaagagtgagcctggtcaggtaaaagcagctgttaagtatgcccttagcgtaggctaccgccacattgattgtgctgctatctacggcaatgagcctgagattggggaggccctgaaggaggacgtgggaccaggcaaggcggtgcctcgggaggagctgtttgtgacatccaagctgtggaacaccaagcaccaccccgaggatgtggagcctgccctccggaagactctggctgacctccagctggagtatctggacctgtacctgatgcactggccttatgcctttgagcggggagacaaccccttccccaagaatgctgatgggactatatgctacgactccacccactacaaggagacttggaaggctctggaggcactggtggctaaggggctggtgcaggcgctgggcctgtccaacttcaacagtcggcagattgatgacatactcagtgtggcctccgtgcgtccagctgtcttgcaggtggaatgccacccatacttggctcaaaatgagctaattgcccactgccaagcacgtggcctggaggtaactgcttatagccctttgggctcctctgatcgtgcatggcgtgatcctgatgagcctgtcctgctggaggaaccagtagtcctggcattggctgaaaagtatggccgatctccagctcagatcttgctcaggtggcaggtccagcggaaagtgatctgcatccccaaaagtatcactccttctcgaatccttcagaacatcaaggtgtttgacttcacctttagcccagaagagatgaagcagctaaatgccctgaacaaaaattggagatatattgtgcctatgcttacggtggatgggaagagagtcccaagggatgcagggcatcctctgtacccctttaatgacccgtactgagaccacagcttcttggcctcccttccagctctgcagctaatgaggtcctgccacaacggaaagagggagttaataaagccattggagcatccataaaaaaaaaaaaaaaaaa

SEQ ID NO: 2837 - DNA, 1964 bp, Homo Sapiens
  NM_006067
tttccggcggcgccgggcgagaagcgcgactggagtctggggctgcggcttcccagaggcgcgagtcgcttttccaggagccgaggcccaaacggggccgggcctgaagggtcccccgccagcccgcggccgcgccatcaatcgccgccgcctcgtcccgcttctcggctgaggcgccgcgcggccaggcagcgggtccaggcctcagccgcgcgcccaggggcctccggggccctcccgggtcagcatgcccggggtgaaactgaccacccaggcctactgcaagatggtgctgcacggcgccaagtacccgcactgcgccgtcaacgggctcctggtggccgagaagcagaagccgcgtaaggagcacctccccctgggcggccccggcgcccaccacaccctcttcgtggactgcatccccctcttccacggcaccctggccctcgcccccatgctggaggtggctctcaccctgattgattcatggtgcaaagatcatagctacgtgattgctggttattatcaagctaatgagcgagtaaaggatgccagtccaaaccaggttgcagagaaggtggcctccagaatcgccgagggcttcagcgacactgcgctcatcatggtagacaacaccaagtttacgatggactgcgtagcgcctacgatccacgtgtacgagcaccatgagaacagatggcggtgcagagacccacaccatgactactgtgaagactggccagaggcacagaggatctcagcctcgctcctggacagccggtcctacgagacgctcgtggatttcgataaccacctggatgacattcggaatgactggacaaacccagagatcaataaagctgtcctacacttgtgctaggcaggcaccgctgtgactgggctccgggcctttccactacgttgaagaagaaaacctatttttaaatgtaaataaaatatcttgtagcctgtgtggaaagctgaccgttttaagaagtggcatgtgccttgaaagggggcagaatgttcagtcggtcgtgtttttaacacagagtctctagaagaggtgcagacatcccgtctgactgtccctgtggactctctcagttgtatgttgctataatcctccaaatcaaagctctttctgcttgtgcaagattgttcctattaaacagttttaactaaccttttataatctggagagaatactttttaaggcttttgaactatctttttttaaaaaaaaaaaaaaaagcccacatcttatactccaatgagtgtgtttgtgagtttttatcctgtttgaattttgatgtcgtccaggcgtcctgggatcagggtagacacgtggagtgctggtgctgagctgtttgagaagctctgtgtgggtgtttctgtggtcaggtaggctgggctgtgaacagcactgctccacatggtgtcggctcacagagccaccgcaactctgcccagcgggagtgacaccactgatgccacagaagcctttatcgttaggggcaaaagcagacatctctggtagcaggagctcagtgtggtgctcttcagccacgcagaaagctcacgtgcctgcagggccaggaaagggaaatgatcgtttcttttgtattaggaaaaacaagacttagacttcccgagttgtgcagagtgacgtctgtactttttatacttagaacatttggtcaagttttgtaaccaaaccttagggaattgagagggaaactttatggtacgtttaccttttttcctttttatatgaattattttgtacaaagttcagagagcggtacctttcctactgtcttttctttgactccatggaggaatttgtaacgatcggtgtgacctgaaagggtttgtgatacagcggtcactattttctcttaacacataggaaaaaagttcagacatcgctacaataaatgtgctttatttgatccaccaaa

SEQ ID NO: 2838 - DNA, 5891 bp, Homo Sapiens
  NM_006068
aattgtatttccgttcatttacaagttattttctcttcttctgaaaaagagatcttgaatttggactcatatcaagatgctctgaagaagaacaaccctttaggatagccactgcaacatcatgaccaaagacaaagaacctattgttaaaagcttccattttgtttgccttatgatcataatagttggaaccagaatccagttctccgacggaaatgaatttgcagtagacaagtcaaaaagaggtcttattcatgttccaaaagacctaccgctgaaaaccaaagtcttagatatgtctcagaactacatcgctgagcttcaggtctctgacatgagctttctatcagagttgacagttttgagactttcccataacagaatccagctacttgatttaagtgttttcaagttcaaccaggatttagaatatttggatttatctcataatcagttgcaaaagatatcctgccatcctattgtgagtttcaggcatttagatctctcattcaatgatttcaaggccctgcccatctgtaaggaatttggcaacttatcacaactgaatttcttgggattgagtgctatgaagctgcaaaaattagatttgctgccaattgctcacttgcatctaagttatatccttctggatttaagaaattattatataaaagaaaatgagacagaaagtctacaaattctgaatgcaaaaacccttcaccttgtttttcacccaactagtttattcgctatccaagtgaacatatcagttaatactttagggtgcttacaactgactaatattaaattgaatgatgacaactgtcaagttttcattaaatttttatcagaactcaccagaggttcaaccttactgaattttaccctcaaccacatagaaacgacttggaaatgcctggtcagagtctttcaatttctttggcccaaacctgtggaatatctcaatatttacaatttaacaataattgaaagcattcgtgaagaagattttacttattctaaaacgacattgaaagcattgacaatagaacatatcacgaaccaagtttttctgttttcacagacagctttgtacaccgtgttttctgagatgaacattatgatgttaaccatttcagatacaccttttatacacatgctgtgtcctcatgcaccaagcacattcaagtttttgaactttacccagaacgttttcacagatagtatttttgaaaaatgttccacgttagttaaattggagacacttatcttacaaaagaatggattaaaagaccttttcaaagtaggtctcatgacgaaggatatgccttctttggaaatactggatgttagctggaattctttggaatctggtagacataaagaaaactgcacttgggttgagagtatagtggtgttaaatttgtcttcaaatatgcttactgactctgttttcagatgtttacctcccaggatcaaggtacttgatcttcacagcaataaaataaagagcgttcctaaacaagtcgtaaaactggaagctttgcaagaactcaatgttgctttcaattctttaactgaccttcctggatgtggcagctttagcagcctttctgtattgatcattgatcacaattcagtttcccacccatcggctgatttcttccagagctgccagaagatgaggtcaataaaagcaggggacaatccattccaatgtacctgtgagctaagagaatttgtcaaaaatatagaccaagtatcaagtgaagtgttagagggctggcctgattcttataagtgtgactacccagaaagttatagaggaagcccactaaaggactttcacatgtctgaattatcctgcaacataactctgctgatcgtcaccatcggtgccaccatgctggtgttggctgtgactgtgacctccctctgcatctacttggatctgccctggtatctcaggatggtgtgccagtggacccagactcggcgcagggccaggaacatacccttagaagaactccaaagaaacctccagtttcatgcttttatttcatatagtgaacatgattctgcctgggtgaaaagtgaattggtaccttacctagaaaaagaagatatacagatttgtcttcatgagagaaactttgtccctggcaagagcattgtggaaaatatcatcaactgcattgagaagagttacaagtccatctttgttttgtctcccaactttgtccagagtgagtggtgccattacgaactctattttgcccatcacaatctctttcatgaaggatctaataacttaatcctcatcttactggaacccattccacagaacagcattcccaacaagtaccacaagctgaaggctctcatgacgcagcggacttatttgcagtggcccaaggagaaaagcaaacgtgggctcttttgggctaacattagagccgcttttaatatgaaattaacactagtcactgaaaacaatgatgtgaaatcttaaaaaaatttaggaaattcaacttaagaaaccattatttacttggatgatggtgaatagtacagtcgtaagtaactgtctggaggtgcctccattatcctcatgccttcaggaaagacttaacaaaaacaatgtttcatctggggaactgagctaggcggtgaggttagcctgccagttagagacagcccagtctcttctggtttaatcattatgtttcaaattgaaacagtctcttttgagtaaatgctcagtttttcagctcctctccactctgctttcccaaatggattctgttgtgagcaagagtttatatggcttcatggcagcaagggaacagtcaacttcagcatcatatgcaccagtcctcggagtgccctgtgaatcatattggtctttgggtcagtgtcatcattctcttcaagtctggggcttggggaaaaaattagatcagctacggcatataaaaaagtcttttgtttcacatatgtgtaatagcttatttaattttttatcctgctacacaaatatgtaattaaccaatgaggactcatgacttgatagtgtatgtatgtaaagggatatatggacttaatcataagctgttgaggtgaaagacgtggatccacctgctttccaagaaaactcggccaaatttatttgcagctggatattgaatgggacttttctggttgtcttagaattctggctaaaggctcaaagctgacgaaagacagtaactgcaccaacatgatactagacacagccagtctggacttatcaaaagagcagaaagagaccaatgactcccagtccgtattatccatctctagaagactagagtcaaaagcgtgattaaagagtcattaagcggaggttctaggccatagggagattgctttgaatttcttgcagacaagtgtgagggactcagcatggtagaaggtagcctggcatcccactccaagactgaaagcttgcagagtaacaggagcacacaggttcagtgcagcagatgtggtgtggcttgagaattcttggaagagcttgatgagtgtttgctggagtccgagggtgggcactgggaacacagagactggtaaatagtgtttggcaaatacaagtgcttgatgaatatttgttgaatgaatagatgagttcttcccccctggggaattcaggaggtgaaaggttggcttgagcacccaaaatggcaggatgagagaagagaagcactgatagcaacctgccctcccattattgacatggtaaaaggatgtgaatttcttcacatggctttgactatggaagagtagctgggcttgcattgtcatgacgggatatcagccaacagggtagcctgttgtgcaaagaaactatagcagtaagaggacacggggttaggcagaagaggggtttggggtggaggttgctgcaagaggtcagccagataatgtggccctgcatcatggaactgtgcaatgtggggtacactcaaggccctccaataactcacagatgtgccctatgaaaaagccagcatttggactctgccatagcagctggcaggatcatgctggcctgtctgccttattcaatagttaactacaggaagatctgctcctctttgtgtaataccctcttcccttgcaatggcatagggacatctagaatatagagaagacagagacaatggaggaagagtaaagaaactgactatatgccttcgtcatttcactgcaaggaaggccaagcagatttttgaatgaggtgtgagattgctgttaaattggactggcctggacattttaatcccttaaatagaggtgcaatgactaaagtgagatttgtcactaaaatttatggtatctgcccaagattcaggagtgatgatgggaggagatccaacagaactttgttgtaaggcaatggttagagaaaaatgaagccctcgctttctggacttagttcattcaataaaccagtttcggccaggcacgttggctcacatctataatcccagtactgtgggaggctgaggcaggtggatcacttgaggtcaggagttcgagaccagcctggccaacatggtgaaaccctgtctgtactaaaaatacaaaaattagccgggtgtggtggtgtgcacctgtagtcccagctactcgggaggctgaggcaggaaaatcacttgaacctgggagacagaggctgtagtgagctgagacagcgctactgtactccccgctgggcaacagagtgagactccatctcaaaaaagttaaaagaaaaaaaatctggtttcataatagctgtaacgaaataagccttaatgatattttattagcatcatcttctgtctgcattagcccttccttgctcttcaggagaacaacatttgttttcctccctaggctctatcccaaacggcacattcttccacaacccctgttgaacagattttttaaactgttgcctaatctaaaaacaataaaaacaacaaacaaccacagtaacaacaacgacaaaaaaaactgccacagattctaaataatcagatctttttaaatggtatcaatgtttcccacaaaatattgttgacattgaaaatatagaattttagcattaattttgttaaacctacatcccctcggcagaggggcctccctgcatcccagtggaaagtaggttcctcacagtcctctccgtcacattcttcccatttcttttcttcacagaacacatcactgtctaaaattatcttgtttgcttagttgcttactcatcttcttcttctctcctctgaagtctaagctccaggaaaaagggagacttctccacctgttccctgcctctccccagtgccgaggggacactgtgcaccccattgtagatgcgcagtaaaaactcgtgggatgagcaaatgactctgaaacggtcccatgcgggaaatgtccatgaagtcctggattttatctaaaaagcccaggcaggggggggcgggggcggcggggctacagttccacgctgagctgcctcctggccgctcgtccccgccgcagtgcctgggcggcccgggcgcccgaccttggccgtggacaccttcgcggtgggtgctgctcctccccatctgccactggaagatgctggggcgacccggctccaggtttagcaggacactgagaaaagggaatggctgcctttcggaggctgggtgagcccttctctgtgcctcacctgcccgccccacagcggccctgcacctcgtcccacggggcccattgccccggtaggatgcgcgcttttgttttgagggtcaggcatcttccctgccgtcgtttctgggaggttgaaaaattgatccagaaagacctaaaacaaaaaa

SEQ ID NO: 2839 - DNA, 4821 bp, Homo Sapiens
  NM_006076
gcgaagtctcctgcggatgccgcccgctcccgagcttctgtcaggggagccgggcgtgcggaggcggctgaggaggcgggaaggcggcagtggttgaaggggtgattgctgactagcggggagggagtgggcagcgatggtgatggcggcgaagaagggcccgggcccgggcggcggggtcagcgggggcaaggcggaggcggaggcggcctcggaggtgtggtgccgtcgggtgcgggagctgggtggctgcagccaggccgggaaccgccactgcttcgagtgcgcccagcgcggggtcacctacgtggatatcaccgtgggcagcttcgtgtgcaccacctgctccggcctcctgagagggctgaacccccctcatcgtgtcaagtcaatctccatgacaactttcactgagcctgaagtagtattcctgcaatcccgtggaaatgaggtttgccggaagatttggttgggtctgtttgatgctcggacatctttagtaccagattccagggatcctcagaaagtgaaggagtttctccaggaaaaatatgagaagaagagatggtatgtccccccagaccaagtcaaggggcccacttataccaaaggcagtgcctccacccctgtgcagggctccatcccagaagggaagccccttcggacacttctgggtgatcctgcaccgtctctctcagttgctgcctccacctcgagccagcccgtcagtcagtctcacgctcggacatcccaggcccggagcactcagccacctccccactcctctgtcaaaaaagccagtactgacctgctggctgacatcggtggagacccctttgctgcaccccagatggcaccagcttttgctgcattccctgcctttgggggccagacaccttcccaaggaggctttgccaactttgatgcctttagcagtggccccagctcttctgtgtttggaagcctccctccagctggtcaagcctcgttccaggcccagccaactcctgcagggagcagccaggggactccatttggtgccactcccctggcacccgccagtcagccaaacagcctcgcagacgtgggcagcttcctgggacccggggtgcccgctgcaggtgttcctagcagcctcttcgggatggctggccaggtccccccgctccagtctgtcacgatgggcggcggcggcggcagcagcacagggctggcctttggagccttcactaaccctttcacagctcccgccgcccagtccccgctgccttccaccaacccgttccagcccaatggcttggcgccagggcccggctttgggatgagcagtgctgggcctggcttcccccaggcagtgccacccactggggcctttgccagctccttcccagcaccgctgttccccccgcagaccccgcttgttcagcagcagaatggctcttccttcggggacttaggatcagccaagttggggcagaggccactgagccagccagctgggatctccaccaaccccttcatgactggaccctcatcaagcccattcgcctccaaacctccaaccaccaaccccttcttgtagcactgtgtttttggggggcctcttccctgccttctggggcccctctgctccctagagctctggtgaccacttgcctgtgggcatttctatgggccttggggatggtggaggtgctaatgctttgcttggggcctacaggtgaaaggtggctgccctcagattccacaaagcctctctcccctccctcgtcccacccccacccaggcaggaagcccaggaggagtgcgggcagggcctgacctggaggagtgatggttgagggggagggatttttttcaaatgatcagtcccctgtggaacagctcttccctgggcctagctcgccagcgctgtgctcctcatggacgggagcgcagtggggaaggtaggggaaagatgaggcacagtgttgatggggcagtgaccagacagtcctgagacccagaaggcccaggtggcccaagtgctcttggtggcccagcttggccagcacacactttcctcctgcagcaccccctgctgaaggggtcccccattgttttgcttccccagcgcccaggatgagcggtttaccatcgagcttacccgggcccggctcctgtcaagcactttagttagctgttggtgtcatgtttggataccagtgttttatatttatacatagagaggattttctaatatagcctattatatataaatagatctatctatatgcacatacatacatatatacacacacccagccgatctcccgctcccagactgctctcgtatgtggggaatgggatgaatccccatctgtgcctcgaccatcaaagccggagctccagggctggagggggggcagccatgtgtcctgacccccaccatccccagagcctgggttttccagggaaaggctttgtgcaattgcctggtctttttttttttttttttttctccatgtgcctccctgtccccaaatctctgcaccaaagctcattgcaggcaatgttggaaaagaactgcatttgaacgaaagagaaaacggcgcctgtggttttgcttcaggccactttgaggggttgcaggtcagtcaacatgactgatccttgacctggctctgctgggctggactgcctgggccagtgataatgctgccattggccagagacagggcagagcccgtccctgtctgaacaagagtcccgcattagcaatgagaagaagcgtggcgggagaggagccaccactgccggggactggagtttgttggatgtgaggggaatgcccactggggccagggtgggcaaaggaggttggtgccaatgtggtgctggaagtagacccctcctgggtctggaacattctctgccccaggctctttccacctggggatgttgtgacaacatccagctgtggtgtctgggctatttgtgtggtgacaagacagacctggtcagggggtgggtggcaaacacctcacctggctgggcagaggccaccttgctgtttggcccaaggccaggtgaggcccctccctttccaccattgccctggccccgtggccattcattcttggggtttgtctgagtcttccacagagagcagcaaagagatatgggagttgggtgatcagtgtatttactttgcagatttttctggaaataacctctagctgctgctatttgcaaggctgggattggcctccctgtcttttccaacaatcaggaccccatcctgtctgttcctgttcttctcccagcctctgccctccttctgtctcctgggtggtctcccgcttcgctcctggcctttgcatgttccatctcttctctttctcccctcttcgccaccctagattatctctgtgtccctctacctaattctcttaccagttctttcctttctgcttagagccggagggagggaagctggaatctgttatggtgtattagggggaggagcctttctgttatttccccccagcttccatcacccttcccttaatgccaggagcgccgaggtttggaactgaggctaaaccgaagggctttctcctgcttctgtcaccctgtgctgtctcccggcatctcctcactatctgggtccaggcccgggtcctccctgcagactccctcccctccagcccacaaggactccagcctgctggctggtgagagctggatgagcagtaagaagttaacgccaggtcagcctcgggccccagggttccctgggcacaggctgacactaggagctgctctccttggccggggacagctccagcagctcaggctccagccctccagtgagccgcctctcctggagagtagcaaagaatggagaaaggcctggcttgagaggaaatggagaaaacattgcctggtagctgcagattcaaacccaccacacacaccacggggctagagtgactcacctgggctcacaccaacttctggccaatgcagggaccatgctctgcagacagcagtcctctagcatggccccagcattcagccagtcggtcacctgtgggccatccccatgtgtgaggaagcaggagtcagccaccaagtgtctccacatcggagcttgcgggtcagacctgtgggccaggggatgggagcagggctgagggtaggggctgaatgtgtggctctgtccctgtgttgccttccacagaggagcaaggcctcaggctgaggaaggaggggcacgctggaacagcctagtctcctccccgtggattcccccaaacccataacattcttccataggggctgagaacgcagtgccccgtccctgacagggatgaaaagtgaacccctcaggtcaggagaggcagagttgaggttctgccacttcctgtccctggggagccactcaagttaccagggctaccggctgaaataaatcttttccgggtagggtcaagggcagtgtgttgccaaggcaactgatgtaggccagttgcgtgactccaggtttgtcctggtactcagtgggtccaatcacctggcattgatcacctggcattgatcagcacccaccccacccctgaggcttgcccagcccccaggccctcagatccctgctcttcctgcctttcctgcccatgtgtcacccagcacccaaggttcagtgacacagggtggtttggagctggtcactgtcatagcagctgtgatttcacaaggaagggtgctgcagggggacctggttgatggggagtgggaaggggaaggaataaagagatcttcctcaggtaaaaaaaaaaa

SEQ ID NO: 2840 - DNA, 2506 bp, Homo Sapiens
  NM_006077
gttccttttcctctgtgcccctcccacacgcctgtctccacgatcccgacaggcccagcggctaggagagtcacgtgagagtgggcggagggggtggaggtttgtctccgctgtttcatctctatggctgtcagaggtgggcggctttgaccgagaggctgctggagctcgtgtttggacgcgatgtttcgtctgaactcactttctgctttggcagaactggctgtgggttctcgatggtaccatggaggatcacagcccatccagatccggcgaagactaatgatggtggctttcctgggagcatctgcagtaactgcaagtactggtcttttgtggaagagggcccatgcagaatctccaccatgtgtagacaacctaaaaagtgacatcggtgataaagggaagaataaagatgaaggggatgtttgtaaccatgagaaaaagactgcagatcttgcccctcacccagaagagaaaaagaagaaacgttctggattcagagacagaaaagtgatggaatatgagaataggattcgagcctactccacgccagacaaaatcttccgatattttgccaccttgaaagtcatcagtgagcctggtgaagcagaagtgtttatgacaccagaagattttgtgcgatccataacacccaatgaaaaacaaccagaacacttgggtctggatcaatatataataaaacgctttgatggaaagacagagaaaatttcccaggaacgagaaaaatttgctgatgaaggcagtatattttacacccttggagaatgtgggctcatatccttttcagactacattttcctcacaactgttctttccactcctcagagaaattttgaaattgccttcaagatgtttgatttgaatggagatggagaagtagatatggaagaatttgaacaggttcagagcatcattcgctcccaaaccagtatgggtatgcgccacagagatcgtccaactactggcaacaccctcaagtctggcttgtgttcagccctcacaacctacttttttggagctgatctgaagggaaagctgacaatcaaaaacttcctcgaatttcagcgtaaactgcagcatgatgttctgaagcttgagtttgaacgccatgaccctgtggatgggagaattactgagaggcagtttggtggcatgctacttgcctacagtggggtgcagtccaagaagctgaccgccatgcagaggcagctcaagaagcacttcaaagaaggaaagggtctgacatttcaggaggtggagaacttctttactttcctaaagaacattaatgatgtggacactgcattgagtttttaccatatggctggagcatctcttgataaagtgaccatgcagcaggtggccaggacagtggctaaagtggagctctcagaccacgtgtgtgatgtggtgtttgcactctttgactgtgatggcaatggcgaactgagcaataaggaatttgtttccatcatgaagcaacggctgatgagaggcctggaaaagcccaaagacatgggtttcactcgcctcatgcaggccatgtggaaatgtgcacaggaaactgcctgggacttcgctttacccaaacagtaaccccacactgcaagaggggacccctccacccccagtaccctggaccccctccgcagagtctcggcagagccctttgtgctgctgcttctggaagtagtcccccttcctcccgggatgacctcaggactctgtcggtttcccctctttacccttccccgtccccgtgttctgctgggctctgattctgcccaatgagtatccccataggttctcaaaaacatgaacaagtctgtaaagctcagacatttgtcagcctcaacagcaccacccattcaagcatcctgtggataaagaattcagggaaccatccacacacctgccaaccctgggaagcatccagttctcaaatcgtttttgctatggatttatactaacaagaacattccttgacttccctcctgctggtgttttaaagccacaagtagggaagatatctggcaggcagaaagaagtctgtgatgataaacaatgatgaggatgacctaggcaccctacgctagtgtgagaagcctgcgccccaggaaggatctgtgttagtccctgggatggctccaaggcctgctctaggaaggcagcatgctcagtgggaacacagcaagattcagaatttaaagtagttgcttcatggctctgtgcactcccttttcttcctcgcagcctccctaagatgactccagtgtgaccctgtgcttagtgagcaatagtgattgagctcatgttccctgcaagtgccatttcctctccaggatgggcctctaaagctgaggcctggctcagagcctgtttgccctctgtcttaaacaattgtaaatatcacttaaattataaccatttgcaataaacatccccaaagttccctgtctcctttaaaaaaaaaaaaaaaaaa

SEQ ID NO: 2841 - DNA, 1591 bp, Homo Sapiens
  NM_006088
atataagcgttggcggagcgtcggttgtagcactctgcgcgcccgctcttctgctgctgtttgtctacttcctcctgcttccccgccgccgccgccgccatcatgagggaaatcgtgcacttgcaggccgggcagtgcggcaaccaaatcggcgccaagttttgggaggtgatcagcgatgagcacggcatcgaccccacgggcacctaccacggggacagcgacctgcagctggaacgcatcaacgtgtactacaatgaggccaccggcggcaagtacgtgccccgcgccgtgctcgtggatctggagcccggcaccatggactccgtgcgctcggggcccttcgggcagatcttccggccggacaacttcgttttcggtcagagtggtgctgggaacaactgggccaaggggcactacacagaaggcgcggagctggtggactcggtgctggatgttgtgagaaaggaggctgagagctgtgactgcctgcagggtttccagctgacccactccctgggtggggggactgggtctgggatgggtaccctcctcatcagcaagatccgggaggagtacccagacaggatcatgaacacgtttagtgtggtgccttcgcccaaagtgtcagacacagtggtggagccctacaacgccaccctctcagtccaccagctcgtagaaaacacagacgagacctactgcattgataacgaagctctctacgacatttgcttcagaaccctaaagctgaccacgcccacctatggtgacctgaaccacctggtgtctgctaccatgagtggggtcaccacctgcctgcgcttcccaggccagctcaatgctgacctgcggaagctggctgtgaacatggtcccgtttccccggctgcacttcttcatgcccggctttgccccactgaccagccggggcagccagcagtaccgggcgctgaccgtgcccgagctcacccagcagatgtttgatgccaagaacatgatggctgcctgcgacccccgccatggccgctacctgacggttgccgccgtgttcaggggccgcatgtccatgaaggaggtggatgagcaaatgcttaatgtccaaaacaaaaacagcagctattttgttgagtggatccccaacaatgtgaaaacggctgtctgtgacatcccacctcgggggctaaaaatgtccgccaccttcattggcaacagcacggccatccaggagctgttcaagcgcatctccgagcagttcacggccatgttccggcgcaaggccttcctgcactggtacacgggcgagggcatggacgagatggagttcaccgaggccgagagcaacatgaatgacctggtgtccgagtaccagcagtaccaggatgccacagccgaggaggagggcgagttcgaggaggaggctgaggaggaggtggcctagagccttcagtcactggggaaagcagggaagcagtgtgaactctttattcactcccagcctgtcctgtggcctgtcccactgtgtgcacttgctgttttccctgtccacatccatgctgtacagacaccaccattaaagcattttcatagtg

SEQ ID NO: 2842 - DNA, 4506 bp, Homo Sapiens
  NM_006092
gttccgggcccgcgaggcagccgccccggtcctgcccctccctcgcgctactgcgggagcagcgtcctcccgggccacggcgcttcccggccccggcgtccccggaccatggcgctctccgggctcttctctagctctcagcggctgcgaagtctgtaaacctggtggccaagtgattgtaagtcaggagactttccttcggtttctgcctttgatggcaagaggtggagattgtggcggcgattacagaaaacatctgggaagacaagttgctgtttttatgggaatcgcaggcttggaagagacagaagcaattccagaaataaattggaaattgaagatttaaacaatgttgttttaaaatattctaacttcaaagaatgatgccagaaacttaaaaaggggctgcgcagagtagcaggggccctggagggcgcggcctgaatcctgattgcccttctgctgagaggacacacgcagctgaagatgaatttgggaaaagtagccgcttgctactttaactatggaagagcagggccacagtgagatggaaataatcccatcagagtctcacccccacattcaattactgaaaagcaatcgggaacttctggtcactcacatccgcaatactcagtgtctggtggacaacttgctgaagaatgactacttctcggccgaagatgcggagattgtgtgtgcctgccccacccagcctgacaaggtccgcaaaattctggacctggtacagagcaagggcgaggaggtgtccgagttcttcctctacttgctccagcaactcgcagatgcctacgtggacctcaggccttggctgctggagatcggcttctccccttccctgctcactcagagcaaagtcgtggtcaacactgacccagtgagcaggtatacccagcagctgcgacaccatctgggccgtgactccaagttcgtgctgtgctatgcccagaaggaggagctgctgctggaggagatctacatggacaccatcatggagctggttggcttcagcaatgagagcctgggcagcctgaacagcctggcctgcctcctggaccacaccaccggcatcctcaatgagcagggtgagaccatcttcatcctgggtgatgctggggtgggcaagtccatgctgctacagcggctgcagagcctctgggccacgggccggctagacgcaggggtcaaattcttcttccactttcgctgccgcatgttcagctgcttcaaggaaagtgacaggctgtgtctgcaggacctgctcttcaagcactactgctacccagagcgggaccccgaggaggtgtttgccttcctgctgcgcttcccccacgtggccctcttcaccttcgatggcctggacgagctgcactcggacttggacctgagccgcgtgcctgacagctcctgcccctgggagcctgcccaccccctggtcttgctggccaacctgctcagtgggaagctgctcaagggggctagcaagctgctcacagcccgcacaggcatcgaggtcccgcgccagttcctgcggaagaaggtgcttctccggggcttctcccccagccacctgcgcgcctatgccaggaggatgttccccgagcgggccctgcaggaccgcctgctgagccagctggaggccaaccccaacctctgcagcctgtgctctgtgcccctcttctgctggatcatcttccggtgcttccagcacttccgtgctgcctttgaaggctcaccacagctgcccgactgcacgatgaccctgacagatgtcttcctcctggtcactgaggtccatctgaacaggatgcagcccagcagcctggtgcagcggaacacacgcagcccagtggagaccctccacgccggccgggacactctgtgctcgctggggcaggtggcccaccggggcatggagaagagcctctttgtcttcacccaggaggaggtgcaggcctccgggctgcaggagagagacatgcagctgggcttcctgcgggctttgccggagctgggccccgggggtgaccagcagtcctatgagtttttccacctcaccctccaggccttctttacagccttcttcctcgtgctggacgacagggtgggcactcaggagctgctcaggttcttccaggagtggatgccccctgcgggggcagcgaccacgtcctgctatcctcccttcctcccgttccagtgcctgcagggcagtggtccggcgcgggaagacctcttcaagaacaaggatcacttccagttcaccaacctcttcctgtgcgggctgttgtccaaagccaaacagaaactcctgcggcatctggtgcccgcggcagccctgaggagaaagcgcaaggccctgtgggcacacctgttttccagcctgcggggctacctgaagagcctgccccgcgttcaggtcgaaagcttcaaccaggtgcaggccatgcccacgttcatctggatgctgcgctgcatctacgagacacagagccagaaggtggggcagctggcggccaggggcatctgcgccaactacctcaagctgacctactgcaacgcctgctcggccgactgcagcgccctctccttcgtcctgcatcacttccccaagcggctggccctagacctagacaacaacaatctcaacgactacggcgtgcgggagctgcagccctgcttcagccgcctcactgttctcagactcagcgtaaaccagatcactgacggtggggtaaaggtgctaagcgaagagctgaccaaatacaaaattgtgacctatttgggtttatacaacaaccagatcaccgatgtcggagccaggtacgtcaccaaaatcctggatgaatgcaaaggcctcacgcatcttaaactgggaaaaaacaaaataacaagtgaaggagggaagtatctcgccctggctgtgaagaacagcaaatcaatctctgaggttgggatgtggggcaatcaagttggggatgaaggagcaaaagccttcgcagaggctctgcggaaccaccccagcttgaccaccctgagtcttgcgtccaacggcatctccacagaaggaggaaagagccttgcgagggccctgcagcagaacacgtctctagaaatactgtggctgacccaaaatgaactcaacgatgaagtggcagagagtttggcagaaatgttgaaagtcaaccagacgttaaagcatttatggcttatccagaatcagatcacagctaaggggactgcccagctggcagatgcgttacagagcaacactggcataacagagatttgcctaaatggaaacctgataaaaccagaggaggccaaagtctatgaagatgagaagcggattatctgtttctgagaggatgctttcctgttcatggggtttttgccctggagcctcagcagcaaatgccactctgggcagtcttttgtgtcagtgtcttaaaggggcctgcgcaggcgggactatcaggagtccactgcctccatgatgcaagccagcttcctgtgcagaaggtctggtcggcaaactccctaagtacccgctacaattctgcagaaaaagaatgtgtcttgcgagctgttgtagttacagtaaatacactgtgaagagactttattgcctattataattatttttatctgaagctagaggaataaagctgtgagcaaacagaggaggccagcctcacctcattccaacacctgccatagggaccaacgggagcgagttggtcaccgctcttttcattgaagagttgaggatgtggcacaaagttggtgccaagcttcttgaataaaacgtgtttgatggattagtattatacctgaaatattttcttccttctcagcactttcccatgtattgatactggtcccacttcacagctggagacaccggagtatgtgcagtgtgggatttgactcctccaaggttttgtggaaagttaatgtcaaggaaaggatgcaccacgggcttttaattttaatcctggagtctcactgtctgctggcaaagatagagaatgccctcagctcttagctggtctaagaatgacgatgccttcaaaatgctgcttccactcagggcttctcctctgctaggctaccctcctctagaaggctgagtaccatgggctacagtgtctggccttgggaagaagtgattctgtccctccaaagaaatagggcatggcttgcccctgtggccctggcatccaaatggctgcttttgtctcccttacctcgtgaagaggggaagtctcttcctgcctcccaagcagctgaagggtgactaaacgggcgccaagactcaggggatcggctgggaactgggccagcagagcatgttggacaccccccaccatggtgggcttgtggtggctgctccatgagggtgggggtgatactactagatcacttgtcctcttgccagctcatttgttaataaaatactgaaaacactcttaaaaaaaaaaa

SEQ ID NO: 2843 - DNA, 8270 bp, Homo Sapiens
  NM_006095
aagagctcgcccagctctgcgggcgccgccaccttcgccgccaccgctgcctttctcctcctcctgtcggcgtgcgggggccgcgcccggcggcagctctgccctaggtgggcggcggcgcggcccaggctgcagctgagcgctctgcgcggcgcagccgggtctcccgcgtgtaccacgccgtgacaggtgcagagtccgggctgaggacccacctgcagccgccgccgcgatgcccaccatgcggaggaccgtgtcggagatccgctcgcgcgccgaaggttatgagaagacagatgatgtttcagagaagacctcactggctgaccaggaggaagtaaggactattttcatcaaccagccccagctgacaaaattctgcaataaccatgtcagcactgcaaaatacaacataatcacattccttccaagatttctctactctcagttcagaagagctgctaattcattttttctctttattgcactgctgcagcaaatacctgatgtgtcaccaacaggtcgttatacaacactggttcctctcttatttattttagctgtggcagctatcaaagagataatagaagatattaaacgacataaagctgataatgcagtgaacaagaaacaaacgcaagttttgagaaatggtgcttgggaaattgtccactgggaaaaggtggcagtaggggagatagtgaaagtgaccaatggggaacatctcccagcagatctcatcagtctgtcctcaagtgagccccaagccatgtgctacattgaaacatccaacttagatggtgaaacaaacttgaaaattagacagggcttaccagcaacatcagatatcaaagacgttgacagtttgatgaggatttctggcagaattgagtgtgaaagtccaaacagacatctctacgattttgttggaaacataaggcttgatggacatggcaccgttccactgggagcagatcagattcttcttcgaggagctcagttgagaaatacacagtgggttcatggaatagttgtctacactggacatgacaccaagctgatgcagaattcaacaagtccaccacttaagctctcaaatgtggaacggattacaaatgtacaaattttgattttattttgtatcttaattgccatgtctcttgtctgttctgtgggctcagccatttggaatcgaaggcattctggaaaagactggtatctcaatctaaactatggtggcgctagtaattttggactgaatttcttgaccttcatcatccttttcaacaatctcattcctatcagcttattggttacattagaagttgtgaaatttacccaggcatacttcataaattgggatcttgacatgcactatgaacccacagacactgctgctatggctcgaacatctaatctgaatgaggaacttggccaggttaaatacatattttctgacaaaactggtactctgacatgcaatgtaatgcagtttaagaagtgcaccatagcgggagttgcttatggccatgtccctgaacctgaggattatggctgctctcctgatgaatggcagaactcacagtttggagatgaaaaaacatttagtgattcatcattgctggaaaatctccaaaataatcatccaactgcacctataatatgtgaatttcttacaatgatggcagtctgtcacacagcagtgccagagcgagaaggtgacaagattatttatcaagcagcatctccagatgagggagcattggtcagagcagccaagcaattgaattttgttttcactggaagaacacccgactcggtgattatagattcactggggcaggaagaaagatatgaattgctcaatgtcttggagtttaccagtgctaggaaaagaatgtcagtgattgttcgcactccatctggaaagttacgactctactgcaaaggagctgacactgtaatttatgatcgactggcagagacgtcaaaatacaaagaaattaccctaaaacatttagagcagtttgctacagaagggttaagaactttatgttttgctgtggctgagatttcagagagcgactttcaggagtggcgagcagtctatcagcgagcatctacatctgtgcagaacaggctactcaaactcgaagagagttatgagttgattgaaaagaatcttcagctacttggagcaacagccattgaggataaattacaagatcaagtgcctgaaaccatagaaacgctaatgaaagcagacatcaaaatctggatccttacaggggacaagcaagaaactgccattaacatcggacactcctgcaaactgttgaagaagaacatgggaatgattgttataaatgaaggctctcttgatggaacaagggaaactctcagtcgtcactgtactacccttggtgatgctctccggaaagagaatgattttgctcttataattgatgggaaaaccctcaaatatgccttaacctttggagtacgacagtatttcctggacttagctttgtcatgcaaagctgtcatttgctgtcgggtttctcctcttcaaaaatctgaagttgttgagatggttaagaaacaagtcaaagtcgtaacgcttgcaatcggtgatggagcaaatgatgtcagcatgatacagacagcgcacgttggtgttggtatcagtggcaatgaaggcctgcaggcagctaattcctctgactactccatagctcagttcaaatatttgaagaatttactgatgattcatggtgcctggaactataacagagtctccaagtgcatcttatactgcttctacaagaatatagtgctctatattatcgagatctggtttgcctttgttaatggcttttctggacagatcctctttgaaagatggtgtataggtctctataacgtgatgtttacagcaatgcctcctttaactcttggaatatttgagagatcatgcagaaaagagaacatgttgaagtaccctgaattatacaaaacatctcagaatgccctggacttcaacaccaaggttttctgggttcattgtttaaatggcctcttccactcagttattctgttttggtttccactaaaagcccttcagtatggtactgcatttggaaatgggaaaacctcggattatctgctactgggaaactttgtgtacacttttgtggtgataactgtgtgtttgaaagctggattggagacatcatattggacatggttcagccacatagcgatatgggggagcatcgcactctgggtggtgttttttggaatctactcatctctgtggcctgccattccgatggcccctgatatgtcaggagaggcagccatgttgttcagttctggagtcttttggatgggcttgttattcatccctgtggcatctctgctccttgatgtggtgtacaaggttatcaagaggactgcttttaaaacattggtcgatgaagttcaggagctggaggcaaaatctcaagacccaggagcagttgtacttggaaaaagcctgaccgagagggcgcaactgctcaagaacgtctttaagaagaaccacgtgaacttgtaccgctctgaatccttgcaacaaaatctgctccatgggtatgcgttctctcaagatgaaaatggaatcgtttcacagtctgaagtgataagagcatatgataccacgaaacagaggcccgacgaatggtgatggggagagcctgaaaggcaggctctgttacctctctaaggagagctaccaggttgtcaccgcagtctgctaaccaattccagtctggtccatgaagaggaaaggtagatctgagctcatctcgctgatggacattcagattcatgtatattatagacataagcactgtgcaactgtactgtaacaccatctcttttggatttttttaaggtatttgctaagtctttgtaaacggaaattgaaaatgacctggtatcttgccagagggctttcttaaacggagaataagtcagtattcttatgccattactgtggggctgtaactgactgtcagtttattggctgtaccacaaggtaaccaaccattaaaaaactctaaatgatatttagttaaagggactcttggtatccagacttagatttcaggatatgctgaaacaaaccagcattcttaaggaactgactcaccttcctgagcaaaatttctaaacaagcatttgtgtccaaaattgtcttgataaatgtttgccaaagaggttcagtaagtgtttttctagttcagtagtcatatgcccagaaatgtaagagaaagtttacttccagttccgctgtaagatctgcatgcctgactttccaaatgtaagagtgatttacaaaaatgaatatttcaaggcatttgctactaaaatcggtgatgttgcacctttggccttacaaatgcttctttgttgtttgtcgtgtttatttgttagaggacacacgtgttaatgtgactctgttgttatgacactgatttttcaaactatgtatgtttcaggtatttctgatgaagtttcatcatcatttagatttttctaaaaatctggctaatgcagtagattgagtgatgtcattttgtcttaaagtttttcctcttaagaaacatatgctacgtatttacgtgggatttccaaagcttctgttgcaatatttggaataacatgtcagataaatgcatgggcttttgtcctgtgttccagttcccactagagatgcctgtgtcttgtgtagcacacccagtgttatggtgactgccccctatactgaagactgaaaattatttcacagttcactcatcaaatagttcccaaaattcgtcacatgctgcttattgggacaaataggtagtacattttccccatttaaaaaatgcggattttactcaggccggtaactttacagtcagaggacacgttcatcatgagtagcttttgttagtatgttttaaaatgtatcttcagttcaattattttcagcatttacaagacatctgaaaatggctattttgctaccaacagtaaatgaaggggctgtttaaaaaccacaaccagttttctacactattttttaaataatactttcatttgaaaaaaaggaattagttttcagatacacttcagagattgaagcaaactatttgccttttactcaaaagcctgcttgcctttacatggacttaccagcaaaataggtagaactttctcttttaaaaaaagtcaactagaattgagaagaggtgattttttttcagatcgcttctcgagtttaatattttcacattcttttcaccctttttctcaatctagatttaaaattaggatatatgtcatttccttgtctgtatttgtagctccttagttaccagtatgcctctccattttctacaaataagaggttataacacatatacataattctaaccttaagggaacacacgtttacatactttacttcccaagcccttcctgtttggggtacagattgagagagtcatgaatcaacacatctagcaagaccacaggtgtaagagtctaagatcgtcttcaaaattctgaagtcccagtctttacctgtccagtgaatgaatattcagagcagcttttcctgggcttcccagtggtgatagctgaggtcaaaccacaaaaaataagaaagcaagagtgaaatgcacccctccagagaaacactttgtagtgtttaattctgttaatagagaagagctgcttctgtttgcgctcacttcatcagtggcacccttctgcagaattttaatataaaaacattatggatataatagaactggattttctgacttaaaaatgtaagttttattttaatcttgaaacgtggattgtttctgtggagctcttaaacatgagaagaatacttacggttgataatgtgtaacatgatctgaaatgtgactaatttgagcctctttgtcccatcgtcctgtttttgaattattgacattgtcagtctctttgcttcctgggtgagacttggggtttgagggacagggaatgaccttcttggtgaaacttaaaatataacattgcaattgcagtgactttacagtgttaaattagagaaaatagtctgattttttaaaccttccttaactggaaaaaagtcacatggttttaccaggattgaaataaacagtcaatgtgacttttaacatgtgtttttttgaaataaagggcacgtactcttcaattaaaaagttccttatagggactctggcaaatgctaacacagttgctttacaatgtttacaattcagacaatacgacttataatagaaaatcctcattcatttagcattgaaaagctggaagttgcttctttaatgttgaatagtatacagtggtattgagcatggactttctaaatgttttatatatacatataaaaatatattggtgtctcacacccagaaagatgttatattgtagatattattaggaaaacagtgtttctcaggaacgttgtaaattttaaatgatatatgtacttcccgtcctcccacctccactctgtgctctaatgtgagactgcttcagcagtgttgctaagttaatggaaaactttttctaatcaagtcaggtgaatgtgtattctgctaaataatgttagccatttacatgaattgtatggtcattaaatggaatcagtgattcctctttaatttccagaggggaaatgaattatggaaatcagtcagcattctgatcattaaattttatactttaattttgccgttcagcattctaaatatccaatgtgaaagtcacatgataatttgttttgcattgcgtgcactgtacaacacttacaacttgtcatttaaaatgttttctcgggaaatgaatgctagtcagaaagtaatagattgtattattcatagttttaaaattatgacaatgtcataattactacaaagctaaataatcgtgtttatttttgtgcagttgccctttgatagttcctggttttaaaacctattaagtgtataatcttacaaatagtcatctacaaaatttatggagaaagtgcccagcccattcacatcacatggaccaggaattcttttgtaaatgacttaaggtaacatcatgcagttcagtgcctaataaatgctttttaatgatgaacatttctataatgactcgtaagataccatagtctgatttttctcacattaaaataactgaagtcacttgtgtaacgtagttatactttgctgcattttaattaaccttcaacagctattaaagtggaatgtaagttaaattttgaaggaaaggaaataaatgttttccatatttcgtcttgatttactttctgtatgagaacagctgtgtttttgataggtttatggtttgcatgagttcatatttaaagtgatccaggccaatgcatggctattgctgtaaatcttgatgtttatttctgccttgtaaagttctatcacggcctacctggaatttaaaattcagtagacaaattaattggtcctctgcacaacttttttaataagtagattattttacaaagaaatttgaacaaatttaattgaatcttttgtttagcttgcctctaagaacttttcttaataaagctcccaaaacttctcagcaaataaatctcccttaagtaggaaagctagatttcatatttgcttactttgaattaacagcaactttccacaggtaaatctgttcttgcaaagatgtgagcagaatagttaaaaataatatttttatgtttcatggttctaaatggaagccataaatgcagtaaatactatctgttgtttaactactttaatcgtcattttttacattttcaagtttattaggttaagaaaaacagggcagccttggaaggcagctactacagaaaactgcagttttgcgttaaagataaagtagtattttcagctccctgaaaaaccattcctgctgaaactgctgtagaaattgtgaagctgcatgagtggagagtattgaatctgtggttatagtagttttctcaggtttgtttatcttgatgtttgatgcactgtgttttatagttattaaaattgagtaatattatttctatgcagtgttatgtgtcattggccttttgtgaatgtgcatgttttaaactgcaaattttaaacattttgtcctctaattgttattaaaaatgaaataaactttaccattacttaaaa

SEQ ID NO: 2844 - DNA, 3123 bp, Homo Sapiens
  NM_006096
gcgggggcggggccgcggcgcctataaagtcgccctccgcccggacgtaaacaaacctcgcctggctcccagctggtgctgaagctcgtcagttcaccatccgccctcggcttccgcggggcgctgggccgccagcctcggcaccgtcctttcctttctccctcgcgttaggcaggtgacagcagggacatgtctcgggagatgcaggatgtagacctcgctgaggtgaagcctttggtggagaaaggggagaccatcaccggcctcctgcaagagtttgatgtccaggagcaggacatcgagactttacatggctctgttcacgtcacgctgtgtgggactcccaagggaaaccggcctgtcatcctcacctaccatgacatcggcatgaaccacaaaacctgctacaaccccctcttcaactacgaggacatgcaggagatcacccagcactttgccgtctgccacgtggacgcccctggccagcaggacggcgcagcctccttccccgcagggtacatgtacccctccatggatcagctggctgaaatgcttcctggagtccttcaacagtttgggctgaaaagcattattggcatgggaacaggagcaggcgcctacatcctaactcgatttgctctaaacaaccctgagatggtggagggccttgtccttatcaacgtgaacccttgtgcggaaggctggatggactgggccgcctccaagatctcaggatggacccaagctctgccggacatggtggtgtcccacctttttgggaaggaagaaatgcagagtaacgtggaagtggtccacacctaccgccagcacattgtgaatgacatgaaccccggcaacctgcacctgttcatcaatgcctacaacagccggcgcgacctggagattgagcgaccaatgccgggaacccacacagtcaccctgcagtgccctgctctgttggtggttggggacagctcgcctgcagtggatgccgtggtggagtgcaactcaaaattggacccaacaaagaccactctcctcaagatggcggactgtggcggcctcccgcagatctcccagccggccaagctcgctgaggccttcaagtacttcgtgcagggcatgggatacatgccctcggctagcatgacccgcctgatgcggtcccgcacagcctctggttccagcgtcacttctctggatggcacccgcagccgctcccacaccagcgagggcacccgaagccgctcccacaccagcgagggcacccgcagccgctcgcacaccagcgagggggcccacctggacatcacccccaactcgggtgctgctgggaacagcgccgggcccaagtccatggaggtctcctgctaggcggcctgcccagctgccgcccccggactctgatctctgtagtggccccctcctccccggccccttttcgccccctgcctgccatactgcgcctaactcggtattaatccaaagcttattttgtaagagtgagctctggtggagacaaatgaggtctattacgtgggtgccctctccaaaggcggggtggcggtggaccaaaggaaggaagcaagcatctccgcatcgcatcctcttccattaaccagtggccggttgccactctcctcccctccctcagagacaccaaactgccaaaaacaagacgcgtagcagcacacacttcacaaagccaagcctaggccgccctgagcatcctggttcaaacgggtgcctggtcagaaggccagccgcccacttcccgtttcctctttaactgaggagaagctgatccagtttccggaaacaaaatccttttctcatttggggaggggggtaatagtgacatgcaggcacctcttttaaacaggcaaaacaggaagggggaaaaggtgggattcatgtcgaggctagaggcatttggaacaacaaatctacgtagttaacttgaagaaaccgatttttaaagttggtgcatctagaaagctttgaatgcagaagcaaacaagcttgatttttctagcatcctcttaatgtgcagcaaaagcaggcgacaaaatctcctggctttacagacaaaaatatttcagcaaacgttgggcatcatggtttttgaaggctttagttctgctttctgcctctcctccacagccccaacctcccacccctgatacatgagccagtgattattcttgttcagggagaagatcatttagatttgttttgcattccttagaatggagggcaacattccacagctgccctggctgtgatgagtgtccttgcaggggccggagtaggagcactggggtgggggtggaattggggttactcgatgtaagggattccttgttgttgtgttgagatccagtgcagttgtgatttctgtggatcccagcttggttccaggaattttgtgtgattggcttaaatccagttttcaatcttcgacagctgggctggaacgtgaactcagtagctgaacctgtctgacccggtcacgttcttggatcctcagaactctttgctcttgtcggggtgggggtgggaactcacgtggggagcggtggctgagaaaatgtaaggattctggaatacatattccatgggactttccttccctctcctgcttcctcttttcctgctccctaacctttcgccgaatggggcagcaccactgacgtttctgggcggccagtgcggctgccaggttcctgtactactgccttgtacttttcattttggctcaccgtggattttctcataggaagtttggtcagagtgaattgaatattgtaagtcagccactgggacccgaggatttctgggaccccgcagttgggaggaggaagtagtccagccttccaggtggcgtgagaggcaatgactcgttacctgccgcccatcaccttggaggccttccctggccttgagtagaaaagtcggggatcggggcaagagaggctgagtacggatgggaaactattgtgcacaagtctttccagaggagtttcttaatgagatatttgtatttatttccagaccaataaatttgtaactttgcagcggaaaaaaaaaaaaaaaaaaaaaaaaaaaaaaaaaaaaaaaaaa

SEQ ID NO: 2845 - DNA, 1212 bp, Homo Sapiens
  NM_006097
ggagtccagacccgacggccggcccagttccacgcacccagcgagcccaagcgccttctccgcaccagggaagccccacccaccagaagccaagatgtccagcaagcgggccaaagccaagaccaccaagaagcggccacagcgggccacatccaatgtcttcgcaatgtttgaccagtcccagatccaggagtttaaggaggctttcaacatgattgaccagaaccgtgatggcttcattgacaaggaggacctgcacgacatgctggcctcgctggggaagaaccccacagacgaatacctggagggcatgatgagcgaggccccggggcccatcaacttcaccatgttcctcaccatgtttggggagaagctgaacggcacggaccccgaggatgtgattcgcaacgcctttgcctgcttcgacgaggaagcctcaggtttcatccatgaggaccacctccgggagctgctcaccaccatgggtgaccgcttcacagatgaggaagtggacgagatgtaccgggaggcacccattgataagaaaggcaacttcaactacgtggagttcacccgcatcctcaaacatggcgccaaggataaagacgactaggccaccccagccccctgacaccccagcccccgccagtcacccctccccgcacacacccgtccataccagctccctgcccatgaccctcgctcagggatccccctttgaggggttagggtcccagttcccagtggaagaaacaggccaggagaagtgcgtgccgagctgaggcagatgttcccacagtgaccccagagccctgggctatagtctctgacccctccaaggaaagaccaccttctggggacatgggctggagggcaggacctagaggcaccaagggaaggccccattccggggctgttccccgaggaggaagggaaggggctctgtgtgccccccaggaggaagaggccctgagtcctgggatcagacaccccttcacgtgtatccccacacaaatgcaagctcaccaaggtcccctctcagtccccttccctacaccctgaccggccactgccgcacacccacccagagcacgccacccgccatgggagtgtgctcaggagtcgcgggcagcgtggacatctgtcccagagggggcagaatctccaatagaggactgagcactgctaaaaaaaaaaaaaaaaaaaaaaaaa

SEQ ID NO: 2846 - DNA, 1125 bp, Homo Sapiens
  NM_006098
ctctctttcactgcaaggcggcggcaggagaggttgtggtgctagtttctctaagccatccagtgccatcctcgtcgctgcagcgacacacgctctcgccgccgccatgactgagcagatgacccttcgtggcaccctcaagggccacaacggctgggtaacccagatcgctactaccccgcagttcccggacatgatcctctccgcctctcgagataagaccatcatcatgtggaaactgaccagggatgagaccaactatggaattccacagcgtgctctgcggggtcactcccactttgttagtgatgtggttatctcctcagatggccagtttgccctctcaggctcctgggatggaaccctgcgcctctgggatctcacaacgggcaccaccacgaggcgatttgtgggccataccaaggatgtgctgagtgtggccttctcctctgacaaccggcagattgtctctggatctcgagataaaaccatcaagctatggaataccctgggtgtgtgcaaatacactgtccaggatgagagccactcagagtgggtgtcttgtgtccgcttctcgcccaacagcagcaaccctatcatcgtctcctgtggctgggacaagctggtcaaggtatggaacctggctaactgcaagctgaagaccaaccacattggccacacaggctatctgaacacggtgactgtctctccagatggatccctctgtgcttctggaggcaaggatggccaggccatgttatgggatctcaacgaaggcaaacacctttacacgctagatggtggggacatcatcaacgccctgtgcttcagccctaaccgctactggctgtgtgctgccacaggccccagcatcaagatctgggatttagagggaaagatcattgtagatgaactgaagcaagaagttatcagtaccagcagcaaggcagaaccaccccagtgcacctccctggcctggtctgctgatggccagactctgtttgctggctacacggacaacctggtgcgagtgtggcaggtgaccattggcacacgctagaagtttatggcagagctttacaaataaaaaaaaaactggcttttctgacaaaaaaaaaaaaaaaa

SEQ ID NO: 2847 - DNA, 5400 bp, Homo Sapiens
  NM_006108
ccgccaagcatattgctaggcacagagcaggtgtgcaacaaaagttatttctcaggctttccctcctctgagcgccgtcctccagagggtccggagtgtagctgggggttggagcagcagcctcctaggcgatgggacagagcccacagggtccggtatgccacggtttcttcgtcagaccctgggaatccaacgtcgcaaaataaacacggccgcgccgctaatcgccagttcggaggaaacaaaacagcgctgcgctgggggatctgggcaaaatcagccctccctcctcccgctccttcgccgcggccctcccctcctcgcgctgctctcgttcgcttggctcagctcagctcagctcagcgcagctccgcggccgccaagccgaggcgggcacggtctccgagtcgcggacgccagctccgagctccctctctccgccgcgcctccgccaggtcgcgccttcgtcgggaccacttcgggcaggagtcgcgtggcgaaggcctgcggccgcggcacaaagttgggggccgcgaagatgaggctgtccccggcgcccctgaagctgagccggactccggcactgctggccctggcgctgcccctggccgcggcgctggccttctccgacgagaccctggacaaagtgcccaagtcagagggctactgcagccgtatcctgcgcgcccagggcacgcggcgcgagggctacaccgagttcagcctccgcgtggagggcgaccccgacttctacaagccgggaaccagctaccgcgtaacactttcagctgctcctccctcctacttcagaggattcacattaattgccctcagagagaacagagagggtgataaggaagaagaccatgctgggaccttccagatcatagacgaagaagaaactcagtttatgagcaattgccctgttgcagtcactgaaagcactccacggaggaggacccggatccaggtgttttggatagcaccaccagcgggaacaggctgcgtgattctgaaggccagcatcgtacaaaaacgcattatttattttcaagatgagggctctctgaccaagaaactttgtgaacaagattccacatttgatggggtgactgacaaacccatcttagactgctgtgcctgcggaactgccaagtacagactcacattttatgggaattggtccgagaagacacacccaaaggattaccctcgtcgggccaaccactggtctgcgatcatcggaggatcccactccaagaattatgtactgtgggaatatggaggatatgccagcgaaggcgtcaaacaagttgcagaattgggctcacccgtgaaaatggaggaagaaattcgacaacagagtgatgaggtcctcaccgtcatcaaagccaaagcccaatggccagcctggcagcctctcaacgtgagagcagcaccttcagctgaattttccgtggacagaacgcgccatttaatgtccttcctgaccatgatgggccctagtcccgactggaacgtaggcttatctgcagaagatctgtgcaccaaggaatgtggctgggtccagaaggtggtgcaagacctgattccctgggacgctggcaccgacagcggggtgacctatgagtcacccaacaaacccaccattccccaggagaaaatccggcccctgaccagcctggaccatcctcagagtcctttctatgacccagagggtgggtccatcactcaagtagccagagttgtcatcgagagaatcgcacggaagggtgaacaatgcaatattgtacctgacaatgtcgatgatattgtagctgacctggctccagaagagaaagatgaagatgacacccctgaaacctgcatctactccaactggtccccatggtccgcctgcagctcctccacctgtgacaaaggcaagaggatgcgacagcgcatgctgaaagcacagctggacctcagcgtcccctgccctgacacccaggacttccagccctgcatgggccctggctgcagtgacgaagacggctccacctgcaccatgtccgagtggatcacctggtcgccctgcagcatctcctgcggcatgggcatgaggtcccgggagaggtatgtgaagcagttcccggaggacggctccgtgtgcacgctgcccactgaggaaacggagaagtgcacggtcaacgaggagtgctctcccagcagctgcctgatgaccgagtggggcgagtgggacgagtgcagcgccacctgcggcatgggcatgaagaagcggcaccgcatgatcaagatgaaccccgcagatggctccatgtgcaaagccgagacatcacaggcagagaagtgcatgatgccagagtgccacaccatcccatgcttgctgtccccatggtccgagtggagtgactgcagcgtgacctgcgggaagggcatgcgaacccgacagcggatgctcaagtctctggcagaacttggagactgcaatgaggatctggagcaggtggagaagtgcatgctccctgaatgccccattgactgtgagctcaccgagtggtcccagtggtcggaatgtaacaagtcatgtgggaaaggccacgtgattcgaacccggatgatccaaatggagcctcagtttggaggtgcaccctgcccagagactgtgcagcgaaaaaagtgccgcatccgaaaatgccttcgaaatccatccatccaaaagctacgctggagggaggcccgagagagccggcggagtgagcagctgaaggaagagtctgaaggggagcagttcccaggttgtaggatgcgcccatggacggcctggtcagaatgcaccaaactgtgcggaggtggaattcaggaacgttacatgactgtaaagaagagattcaaaagctcccagtttaccagctgcaaagacaagaaggagatcagagcatgcaatgttcatccttgttagcaagggtacgagttccccagggctgcactctagattccagagtcaccaatggctggattatttgcttgtttaagacaatttaaattgtgtacgctagttttcatttttgcagtgtggttcgcccagtagtcttgtggatgccagagacatcctttctgaatacttcttgatgggtacaggctgagtggggcgccctcacctccagccagcctcttcctgcagaggagtagtgtcagccaccttgtactaagctgaaacatgtccctctggagcttccacctggccagggaggacggagactttgacctactccacatggagaggcaaccatgtctggaagtgactatgcctgagtcccagggtgcggcaggtaggaaacattcacagatgaagacagcagattccccacattctcatctttggcctgttcaatgaaaccattgtttgcccatctcttcttagtggaactttaggtctcttttcaagtctcctcagtcatcaatagttcctggggaaaaacagagctggtagacttgaagaggagcattgatgttgggtggcttttgttctttcactgagaaattcggaatacatttgtctcacccctgatattggttcctgatgcccccccaacaaaaataaataaataaattatggctgctttatttaaatataaggtagctagtttttacacctgagataaataataagcttagagtgtatttttcccttgcttttgggggttcagaggagtatgtacaattcttctgggaagccagccttctgaactttttggtactaaatccttattggaaccaagacaaaggaagcaaaattggtctctttagagaccaatttgcctaaattttaaaatcttcctacacacatctagacgttcaagtttgcaaatcagtttttagcaagaaaacatttttgctatacaaacattttgctaagtctgcccaaagcccccccaatgcattccttcaacaaaatacaatctctgtactttaaagttattttagtcatgaaattttatatgcagagagaaaaagttaccgagacagaaaacaaatctaagggaaaggaatattatgggattaagctgagcaagcaattctggtggaaagtcaaacctgtcagtgctccacaccagggctgtggtcctcccagacatgcataggaatggccacaggtttacactgccttcccagcaattataagcacaccagattcagggagactgaccaccaagggatagtgtaaaaggacattttctcagttgggtccatcagcagtttttcttcctgcatttattgttgaaaactattgtttcatttcttcttttataggccttattactgcttaatccaaatgtgtaccattggtgagacacatacaatgctctgaatacactacgaatttgtattaaacacatcagaatatttccaaatacaacatagtatagtcctgaatatgtacttttaacacaagagagactattcaataaaaactcactgggtctttcatgtctttaagctaagtaagtgttcagaaggttcttttttatattgtcctccacctccatcattttcaataaaagatagggcttttgctcccttgttcttggagggaccattattacatctctgaactacctttgtatccaacatgttttaaatccttaaatgaattgctttctcccaaaaaaagcacaatataaagaaacacaagatttaattatttttctacttggggggaaaaaagtcctcatgtagaagcacccacttttgcaatgttgttctaagctatctatctaactctcagcccatgataaagttccttaagctggtgattcctaatcaaggacaagccaccctagtgtctcatgtttgtatttggtcccagttgggtacattttaaaatcctgattttggagacttaaaaccaggttaatggctaagaatgggtaacatgactcttgttggattgttattttttgtttgcaatggggaatttataagaagcatcaagtctctttcttaccaaagtcttgttaggtggtttatagttcttttggctaacaaatcattttggaaataaagattttttactacaaaaatgaaatttgtttggacttccacttgagacagtaaagagagtattagacacccagtaaaaactgccatataaagaagttgtaattgtttgttgtgtatgtatttttttcaatgccaaaccagctgtgatccaatttacatccacattttaggtccaacagcaagaagttcagagagagatttcccaaccagacattgggtcactcactggtcaccttgccagtgcattttattagaagggaatctgttgtagcaaatgggaataaacctgggtttctatagacccagaactgaaaaaataaaaaaaaaaaaaaaaaa

SEQ ID NO: 2848 - DNA, 3436 bp, Homo Sapiens
  NM_006110
agttagttccctaacccgagtgaagccacttccgggcttcccgggcgccttccgcagtcctcttccgggtgatggcggccgggtgccccggatgtagccctggcgcaagcatctcttcttttttccacctcgccttccgcggattcccagcttgagaaacacctctttgccccgtcatgccaaagaggaaagtgaccttccaaggcgtgggagatgaggaggatgaggatgaaatcattgtccccaagaagaagctggtggaccctgtggctgggtcagggggtcctgggagccgctttaaaggcaaacactctttggatagcgatgaggaggaggatgatgatgatggggggtccagcaaatatgacatcttggcctcagaggatgtagaaggtcaggaggcagccacactccccagcgaggggggtgttcggatcacaccctttaacctgcaggaggagatggaggaaggccactttgatgccgatggcaactacttcctgaaccgggatgctcagatccgagacagctggctggacaacattgactgggtgaagatccgggagcggccacctggccagcgccaggcctcagactcggaggaggaggacagcttgggccagacctcaatgagtgcccaagccctcttggagggacttttggagctcctattgcctagagagacagtggctggggcactgaggcgtctgggggcccgaggaggaggcaaagggagaaaggggcctgggcaacccagttcccctcagcgcctggaccggctctccgggttggccgaccagatggtggcccggggcaaccttggtgtgtaccaggaaacaagggaacggttggctatgcgtctgaagggtttggggtgtcagaccctaggaccccacaatcccacacccccaccctccctggacatgttcgctgaggagttggcggaggaggaactggagaccccaacccctacccagagaggagaagcagagtcgcggggagatggtctggtggatgtgatgtgggaatataagtgggagaacacgggggatgccgagctgtatgggcccttcaccagcgcccagatgcagacctgggtgagtgaaggctacttcccggacggtgtttattgccggaagctggacccccctggtggtcagttctacaactccaaacgcattgactttgacctctacacctgagcctgctgggggcccagtttggtgggcccttctttcctggactttgtggaggaggcaccaagtgtctcaggcagcgaggaaattggaggccatttttcagtcaatttccctttcccaataaaagcctttagttgtgtactggggccttggctgtgctgatggccagaagccaggggccttctccacagtccctttggacttgtcttggtccctgagtactcccatgaagatccttcttggaggtgcctgtcaggtatcctgtggcctccctgcctggactctgcttgccgtgtaaacacccccaactgcgctgctctgtgctcctctcccaggtttcttgttcgattcctcttaggtctttggctttcaggacctcagattctttatccttgtagccaccagaggacagagccccagaagtggatgttttaggcccagaaggaccagggcatcgagaagacattgggaccctgttgggggtgagcatggaaccctcttactctcgcttcaccctctcaagctccttagatgctgggcagaagtgggatgagtggcccaagaccgagatccctaaggttctgagagccagtgtcttccctaatctggctttcctctatccttgccgtcgttcccacagcccttcagtgaagtgcaaactcagtggccaagtgtgggccaagtgtgcattgtactggcacagagaggggcagtgactcactggagatcacaggaatcaaagggctggcccagacccagtgggctcctttcccagacctttcttggcacaaagcctttgctgcctggccttggaggccctgcggcctacattctctggaccccactatgtgcctggcacagggctagtgccttgaggaaactgaggtagctgggttggtccccttccaggaattcagagtctggtggcaggggcatgggaaatagacagatgtaattctatagcctgggcctggcaccctccacctccacgccccaccagcattgccttacgcctcccttgccccacgttagatggtttcttccggttttgcactctggctgccccttggagtctcctggggagctgtaatatctctttggagattcagattgagctggtctaggttgtggcccaggcattgggcattttggaagcccccaggtgttttcagcttgcagccaggccgagagagagcccctgagtcagatccccatggtttaggcacacctagcgggaggggtggctcctggaccccaccgtggttggagagctgagcatgtgtgtggctttagtggggtctgttagttatgggggtctgggcactggagctgcaggacacttgggatcccaggtcagaaagggccagatgagcaactaggaaagacttgggggccagggcggagtggggtcacctgacactcttgtgaggccccttctagtgcctgctcacaccggaatttcattcactccaagaagccatcaggggtaagataccttcctttaaacgtcactaagaaagaagaggcctgccggtgacacagtaagatgccattgatctaaagatgcgtcttgatttcagaaaggtccggaagtggaaagcaggtttcagggctgctgaggtacagggttctcctgtaggccccagggatggtctcaggggtgctgagtgcgtgcgtggtaaatggatggagcccaggggcgcctcctgccagtgtcctccaggcactcaaacctagcccttctgaagccgacctcacgtgacctcacagcccctcctgaaggcgcctcactgatgacggtgggtggaataacagcccccagagatgtccaggtttggaaccccaggacgtgggaaagtgttaccttgcgtggcaaaagggacccggcgcctgtgcttcagttcaggatttcgtggtggggagatgaccgtggatggttgaggtgggccctgagtaatcatgggggcccttataagggaaggggagtcacgagggtctgcgcatgaagcaaggaagcttctggctgtgaagatggcaagaaggcctggggccaggcgatgaggtggcccctggaggagctggaaaaggcattggattctgccccagagcctccgtggagaaacaaagccgcactgacaagacttcagcctggtgaaaaccattttggactcctgacctctagaactgtaagataataaattggtgtggttttcaacctctcaaaaaaaaaaaaaaaa

SEQ ID NO: 2849 - DNA, 4392 bp, Homo Sapiens
  NM_006112
agtggggaagaggacgggtcgagtgctggcttccggcggaaaagcgcgcgagcaagatggccaccaccaagcgcgtcttgtacgtgggtggactggcagaggaagtggacgacaaagttcttcatgctgcgttcattccttttggagacatcacagatattcagattcctctggattatgaaacagaaaagcaccgaggatttgcttttgttgaatttgagttggcagaggatgctgcagcagctatcgacaacatgaatgaatctgagctttttggacgtacaattcgtgtcaatttggccaaaccaatgagaattaaggaaggctcttccaggccagtttggtcagatgatgactggttgaagaagttttctgggaagacgcttgaagagaataaagaggaagaagggtcagagcctcccaaagcagagacccaggagggagagcccattgctaaaaaggcccgctcaaatcctcaggtgtacatggacatcaagattgggaacaagccggctggccgcatccagatgctcctgcgttctgatgtcgtgcccatgacagcagagaatttccgctgcctgtgcactcatgaaaagggctttggctttaagggaagcagcttccaccgcatcatcccccagttcatgtgccagggcggtgatttcacaaaccacaatggcactgggggcaagtccatctatgggaagaagttcgatgatgaaaactttatcctcaagcatacgggaccaggtctactatccatggccaactctggcccaaacaccaatggctctcagttcttcctgacatgtgacaagacagactggctggatggcaagcatgtggtgtttggagaggtcaccgaaggcctagatgtcttgcggcaaattgaggcccagggcagcaaggacgggaagccaaagcagaaggtgatcatcgccgactgtggggagtacgtgtgaggcggcactctctctgcttccccctccgctcttgaccctgcatatccaggaaggaactgccagcctcagaggaggcagcaccgagggtgcctgtttgaagcaagcagcatttgggatatgtgcccttcctcagggtctgcttggagcagctcctctgcaggcacagcctggactattcccaggcacagctgtgggcccaggagccagctcaggtgctcccctccaccatgggcaggctgtgcaaaaagccactggcttttctcagcatttgctgctgggcctctcctgggactaccagtgtggctcttacgtgttttctttgctaaaataaaccctagttcttatattgctcttcctgctagttcttgggagttgtcagagattgtgtctgtggctaagctggacctctgaggcaggctggtgagtggggagagcagagcatctttttcacagctttcatttcctcccttgggccgatccccttagatgtcaggtgatgtatcttcacaccaggcatcgatgtcagggcaacggaaattaaagactggaaagctccggtcttctgctgcctctgctcctaaacccagctgccggccttacagccagcaagtgtactctcagtggttcatttgtttatttgttcactttcaccctacagattttaaaaaatgaaatttttataactcaaagtgccttctctgtgccaagtactatgcctatttgtcaggagacaggaagccaacaaactacatgtgcctaatccagcccactgcctgtttttatgaatcaggttttattggaacacagccacgtccatttatttacatattgtccatggtggtttcttactgcagtggcagaggtgcgtaaggggctatagacacaatacaggctatggtccctgtattagggttttctagagaagcagaaccaatagggtgtgtatatatgtagaaagagatttattttaaggaactggctcaagcagtggtaggagctggcaagtctgcaatctgcacaacagaccagcaggctggagactcaggaaaaaaactgatgttgcagttcagctctgaggcagtttggaagcagaattcttcctccagtgatctcagtcttttttctcttaagaatttcaactgattggatgaggcctacccacattatggagggtaatctgctttactctctactgacttaaatattaatccatctaaaaaataggccaggcatggtggctcatgcctataattccaccactattgggaggctgaggcaggaggatcacttgagcccaggagttcaagaccagcctgggcaatgtagagacccccatctctagggggagaaaaaaaagccaggtatggtagtgcacacctatagtcccagctactcagaaggctgaggtgggaggatcgcttgaacctgggaggttgaggctgcagtcagccatggtcatgccactgtactccagcctgggtgacaagagggagaccctgtcttgaaaaaaagaaaccatcatcacagcaacatctagactagtgtttgactaaaaactggataccatggcctagccaaattgacacacaaaatagaccatcacagtcccaaggcctaaaatacttactatctgagcctttacaaaacaggattgccagccactgaagagaacaaatggtcccaccccctgctgagctcacagtctggctctcctgtgtgcagccacttcttggagctggcttctctccactccccctccagatgctggtcagccaggcggttataaagaatctcatctgctgaaggcttttagcagggactgagtcctgtagctgttggacacctcctgtgggttgggtcactcagaccattcagaatccactgagctgagcttttgcatcttggattgagatctggatgagccaggaggcaggagaggctaggtggtcctcatgaccctaggatagctcttgctgagggatggtggcattctgccctacctctggctcccatgtgccgactggactttgtgagctccagctgctacagttgactgagttcaggctccatgtagctgggatatactacatggttacccctcacccctatggagcttccaaaagagaccctccctcaaagcacagccccttctctgagtgcaaataatggccatcagaggtcagtcacaggtgttaggcaggcatctatgaagctggggatgatagcactgacttcagtgcttggacgagaaccaggagagagtgtgtagaaaaagcacagccagcctcccataaaaggacagactcctgtgacaaccttgtcactctgttcctccctgatactctggggaggtggaggccagtgggcagttctgaaagctcagcaggtttggagccattgggtgtggactcctctcccagtgttcctcctgggtgttcacagatgttattgaatgcacactggaaccctgcacaggtaaactgaggctttattggcgtgactgccaaaggtcacacagggtggtttggcagagctgggattagaagcccagcctgtctctcttcagtagtaatggagtcctgggaggtttactaggctttagcctcaatctgtggcggcagggtccacagccctggggagtgacacagtcatggtccccatgattggccaggacctgtgtggagagacacaggagacaagaccctgctcttccaggccagaagggaggggagccccagagctgggcagtggcatgccccacagcctggccacctgcttcggctacgcaccatgcagcagctgcacctggctgcctcgggaaaactctgacctctctgggaagtggagccagtggctctgtgggcgtcctttcctgcagcctggagagcaaagcggctttccctgggactgtgtggctcctgtcccaactggcctccccattccacattcccattgctggaccagcaccaggactgggcacagggcttccttttgctgattcatttcccccctaactcattcagagttgagccccatctgagtccccacatgctggccctgaaacggttacaaaggctgaaaccagggatggcaggcccaggatcagtgctgtggctgttggagtgtcctctccaacagcatgacagccgcctccaggtgctcccagcatctgttgcagtcatggcagcctcacggcaacctctgaagaaggaattatagaaccaactttttattgttgaaaatggagtcttgtagagttcagtgatgggaaactaaagtagaaaaagcacatcacaaagaaacatatatagtacagtgtgatcccaattttgtaaaaatatctgtaatatgtaagcataggtatttgtatatcttaagaaaaaaagcctagaaataaagccacaaaaatattaaaaaaaaaaaaaaaaaa

SEQ ID NO: 2850 - DNA, 4776 bp, Homo Sapiens
  NM_006113
cggccgcatccttgccgcccgccccggcccagccgcgtcccggagccgtcgggcatggagccgtggaagcagtgcgcgcagtggctcatccattgcaaggtgctgcccaccaaccaccgggtgacctgggactcggctcaggtgttcgaccttgcgcagaccctccgcgatggagtcctgctctgccagctgcttaacaacctccgggcgcactccatcaacctgaaggagatcaacctgaggccgcagatgtcccagtttctctgtttgaagaacataaggacatttctcacggcctgttgtgagacgtttggaatgaggaaaagtgaacttttcgaggcatttgacttgtttgatgttcgtgactttggaaaggttatagaaacattatcacgactttctcgaacacctatagcattggccacaggaatcaggcccttcccaacagaagaaagcattaatgatgaagacatctacaaaggccttcctgatttaatagatgaaacccttgtggaagatgaagaagatctctatgactgtgtttatggggaagatgaaggtggagaagtctatgaggacttaatgaaggcagaggaagcacatcagcccaaatgtccagaaaatgatatacgaagttgttgtctagcagaaattaagcagacagaagaaaaatatacagaaactttggagtcaatagaaaagtatttcatggcaccactaaaaagatttctgacagcagcagaatttgattcagtattcatcaacattcctgaacttgtaaaacttcatcggaacctaatgcaagagattcatgattccattgtaaataaaaatgaccagaacttgtaccaagtttttattaactacaaggaaagattggttatttacgggcagtactgcagtggagtggagtcagccatctctagtttagactacatttctaagacaaaagaagatgtcaaactgaaattagaggaatgttccaaaagagcaaataatgggaaatttactcttcgagacttgcttgtggttcctatgcaacgtgttttaaagtaccaccttctcctccaggaactggtcaaacataccactgatccgactgagaaggcaaatctgaaactggctcttgatgccatgaaggacttggcacaatatgtgaatgaagtgaaaagagataatgagacccttcgtgaaattaaacagtttcagctatctatagagaatttgaaccaaccagttttgctttttggacgacctcagggagatggtgaaattcgaataaccactctagacaagcataccaaacaagaaaggcatatcttcttatttgatttggcagtgatcgtatgtaagagaaaaggtgataactatgaaatgaaggaaataatagatcttcagcagtacaagatagccaataatcctacaaccgataaagaaaacaaaaagtggtcttatggcttctacctcatccatacccaaggacaaaatgggttagaattttattgcaaaacaaaagatttaaagaagaaatggctagaacagtttgaaatggctttgtctaacataagaccagactatgcagactccaatttccacgacttcaagatgcataccttcactcgagtcacatcctgcaaagtctgccagatgctcctgaggggaacattttatcaaggctatttatgttttaagtgtggagcgagagcacacaaagaatgtttgggaagagtagacaattgtggcagagttaattctggtgaacaagggacactcaaactaccagagaaacggaccaatggactgcgaagaactcctaaacaggtggatccaggtttaccaaagatgcaggtcattaggaactattctggaacaccacccccagctctgcatgaaggaccccctttacagctccaggccggggataccgttgaacttctgaaaggagatgcacacagtctgttttggcagggcagaaatttagcatctggagaggttggattttttccaagtgatgcagtcaagccttgcccatgtgtgcccaaaccagtagattattcttgccaaccctggtatgctggagcaatggaaagattgcaagcagagaccgaacttattaatagggtaaatagtacttaccttgtgaggcacaggaccaaagagtcaggagaatatgcaattagcattaagtacaataatgaagcaaagcacatcaagattttaacaagagatggcttttttcacattgcagaaaatagaaaatttaaaagtttaatggaacttgtggagtactacaagcatcattctctcaaggaagggttcagaaccttagatacaactctgcagtttccatacaaggagccagaacattcagctggacagaggggtaatagagcaggcaacagcttgttaagtccaaaagtgctgggcattgccatcgctcggtatgacttctgtgcaagagatatgagagagttgtccttgttgaaaggagatgtggtgaagatttacacaaagatgagtgcaaatggctggtggagaggagaagtaaatggcagggtgggctggtttccatccacatatgtggaagaggatgaataaattcaaatcccgtgttgcaccctgcaccaaaaatttcagagaagggataaatagaagcctgcacagcatcgtgaattaactgaagtgtttaaaaagctgcatttctggctgttcaacatcctccctccttagcccctcctaagtcttaatgctgagatttctaaagatgctggtactgacagattaatggcttgcctagagctgtgcaagaaacagcctgccagtctgtcattgtcagggaccagggcaaaaccaagagctgttcttcccagaagagccctgcaaacacattggttcgtgcttccctttacttcttctggtcagataccatgaatgccagtcatcagtaaatcttaatacacttttgctttattctcacatgccattcaccagattatttgatggtacaaagaagcagaagtgtaattttccttttcccagcatgacgaaaaattggagttctgccatttgagcagcttactggaaagatccagccttacttgtcttaaattgtccaacaaggtgactcattgcccggcaaacacttttaccctcagatgttactcatgatattataaaatatgaggccagtgctcaggtttgcatcataagtgagctatccctgaagggttttaattacttatttggtgtcctgattatatttgcaaacttctttataaaaggtgaaaaaagcacacaaaagagagggtgtcttcatattaaaccttcacaaccttcatgatttcataggattattttggaaatatagcacttgactttatgaaaggatctgggctaggtatattaagggtagttgccaataacctgaagaagctggcattgtttacagaaacagatcaagggctataatttatgtcattttatagcagcagtatctattaatacatgccttttcctcccatccacctcccccgcacacacacaaagatgacctgggacatgatttttttattcccacattttcttggagcacaaacaactttgttgaggattttggaaggaaagcacaactgggtcctttattcatttctgggacagaaagagggtcagtggacttttgtgggcctccagcttctctcagagtctccccctctgcagcccatcctgggagtgtattaactggagggaagatgggtcttgcagtacatttgttttgcccagccatcactcttttttgtgaggagcctaaatacattcttcctggggtccagagtccccattcaaggcagtcaagttaagacactaacttggccctttcctgatggaaatatttcctccatagcagaagttgtgttctgacaagactgagagagttacatgttgggaaaaaaaagaagcattaacttagtagaactgaaccaggagcattaagttctgaaattttgaatcatctctgaaatgaagcaggtgtagcctgccctctcatcaatccgtctgggtgccagaactcaaggttcagtggacacatccccctgttagagaccctcatgggctaggacttttcatctaggatagattcaagacctttacctcagaattatgtaaactgtgattgtgttttagaaaaattattatttgctaaaaccatttaagtctttgtatatgtgtaaatgatcacaaaaatgtattttataaaatgttctgtacaataaagttacacctcaaagtgtactcttggaatggattctttcctgtaaagtcttatctgcgactctgtctcgggaatgttttgtctgttgccgtcagccgaactttgttatggagggagcagcctcacacaagcagaaacactcctgtggatggtattgtagcatgtattgtttattttagtcaatagaccctctccttataaatggtgtttagtcttcctgttgcatttcatgggcctgggggtttcctagcagaggatattggagcccctttttgtgacattaccaattacatctttgtccacgtttaatactttgttttggaaaatttaaatgctgcagatttgtgtagagttctaataccaaagacagaagtaaatgttttccatatactttgtcttgcctgtatgcagccctcgtgtaatacggtgaattagagtggtatttcactttgtattattttgtaaatatgtcaatataataaatagtgactaaattgataaaaaaa

SEQ ID NO: 2851 - DNA, 1724 bp, Homo Sapiens
  NM_006114
ggggcgacggtggtggcggcggcggcagcgggttcggttgcgcgtggcgcacggggtgggagcggagcccaggccgggagcaggcgccgccgccagcgaccatggggaacgtgttggctgccagctcgccgcccgcagggccgccaccgccgcctgcgccggccctcgtggggctgccgccacctccgccctcgccgccgggcttcacgctgccgccgctgggaggcagcctgggcgccggcaccagtacgagtcgaagttcggaacggacccccggggctgcaaccgccagcgcctcaggggccgccgaggatggggcctgcggctgcctgcccaacccgggcacattcgaggagtgccaccggaagtgcaaggagctgtttcccattcagatggagggtgtcaagctcacagtcaacaaagggttgagtaaccattttcaggtcaaccacacagtagccctcagcacaatcggggagtccaactaccacttcggggtcacatatgtggggacaaagcagctgagtcccacagaggcgttccctgtactggtgggtgacatggacaacagtggcagtctcaacgctcaggtcattcaccagctgggccccggtctcaggtccaagatggccatccagacccagcagtcgaagtttgtgaactggcaggtggacggggagtatcggggctctgacttcacagcagccgtcaccctggggaacccagacgtcctcgtgggttcaggaatcctcgtagcccactacctccagagcatcacgccttgcctggccctgggtggagagctggtctaccaccggcggcctggagaggagggcactgtcatgtctctagctgggaaatacacattgaacaactggttggcaacggtaacgttgggccaggcgggcatgcacgcaacatactaccacaaagccagtgaccagctgcaggtgggtgtggagtttgaggccagcacaaggatgcaggacaccagcgtctccttcgggtaccagctggacctgcccaaggccaacctcctcttcaaaggctctgtggatagcaactggatcgtgggtgccacgctggagaagaagctcccacccctgcccctgacactggcccttggggccttcctgaatcaccgcaagaacaagtttcagtgtggctttggcctcaccatcggctgagccctcctggcccccgccttccacgcccttccgattccacctccacctccacctccccctgccacagaggggagacctgagcccccctcccttccctccccccttgggggtcgggggggacattggaaaggagggaccccgccaccccagcagctgaggaggggattctggaactgaatggcgcttcgggattctgagtagcaggggcagcatgcccagtgggcctggggtcccgggagggattccggaattgaggggcacgcaggattctgagcaccaggggcagaggcggccagacaacctcagggaggagtgtcctggcgtccccatcctccaaagggcctgggcccgccccgagggggcagcgagaggagcttccccatccccggtcagtccaccctgccccgtccactttcccatctcctcggtataaatcatgtttataagttatggaagaaccgggacattttacagaaaaaaaacaaaaaacaacaaaaaatatacgtgggaaaaaaaacgaaaaaaaaaaaaaaaaaa

SEQ ID NO: 2852 - DNA, 3240 bp, Homo Sapiens
  NM_006116
actcgctgctctgcggggaggcgggcgctcccgcaggggttcctccaagatggcggcgcagaggaggagcttgctgcagagtgagcagcagccaagctggacagatgacctgcctctctgccacctctctggggttggctcagcctccaaccgcagctactctgctgatggcaagggcactgagagccacccgccagaggacagctggctcaagttcaggagtgagaacaactgcttcctgtatggggtcttcaacggctatgatggcaaccgagtgaccaacttcgtggcccagcggctgtccgcagagctcctgctgggccagctgaatgccgagcacgccgaggccgatgtgcggcgtgtgctgctgcaggccttcgatgtggtggagaggagcttcctggagtccattgacgacgccttggctgagaaggcaagcctccagtcgcaattgccagagggagtccctcagcaccagctgcctcctcagtatcagaagatccttgagagactcaagacgttagagagggaaatttcgggaggggccatggccgttgtggcggtccttctcaacaacaagctctacgtcgccaatgtcggtacaaaccgtgcacttttatgcaaatcgacagtggatgggttgcaggtgacacagctgaacgtggaccacaccacagagaacgaggatgagctcttccgtctttcgcagctgggcttggatgctggaaagatcaagcaggtggggatcatctgtgggcaggagagcacccggcggatcggggattacaaggttaaatatggctacacggacattgaccttctcagcgctgccaagtccaaaccaatcatcgcagagccagaaatccatggggcacagccgctggatggggtgacgggcttcttggtgctgatgtcggaggggttgtacaaggccctagaggcagcccatgggcctgggcaggccaaccaggagattgctgcgatgattgacactgagtttgccaagcagacctccctggacgcagtggcccaggccgtcgtggaccgggtgaagcgcatccacagcgacaccttcgccagtggtggggagcgtgccaggttctgcccccggcacgaggacatgaccctgctagtgaggaactttggctacccgctgggcgaaatgagccagcccacaccgagcccagccccagctgcaggaggacgagtgtaccctgtgtctgtgccatactccagcgcccagagcaccagcaagaccagcgtgaccctctcccttgtcatgccctcccagggccagatggtcaacggggctcacagtgcttccaccctggacgaagccacccccaccctcaccaaccaaagcccgaccttaaccctgcagtccaccaacacgcacacgcagagcagcagctccagctctgacggaggcctcttccgctcccggcccgcccactcgctcccgcctggcgaggacggtcgtgttgagccctatgtggactttgctgagttttaccgcctctggagcgtggaccatggcgagcagagcgtggtgacagcaccgtagggcagccggagaatgcagcccaagcagggcctggcatggggcaggacagggtccagccttttcctaacatctgcctgtgccacaacggccagcaggtgccccatcctctgcccacagcagactctgtcccatggctctccgggcagtagagtgtgtgagtgcagactggacctgtggttcataccttgtcaccacccgggaagctgaaggccacttcctcccagatggcctcagccaggaccatcgccctttctcagagcagagggccaggtatagaaaccgcagtgggcctgcaagccgcccgagcctccccagcagcctcctacagagcaggaagaggcgccctgtgaaccctgagtgttgcaggcccagcagaccctgctgtcccaagcccacccctcctcccaccatcacctccctcacctcgggacagtagccctccacttctccagcctctcagccctgtgctcctgcatccagagtggaacccaggctggtgtccgcatctgtccctgggccccacccctggacctgccttggttgtgtcatctgttgtaaacgttcaggaggaccagggcagcatctggggcctgggatggccacagaaggggcaggccaggtggaaaggagccagggggaagtggtctaagagacctggaactgccagaggatggcggcctgggcttccccagagccaggcgtgcgggagaggtgaggactggccccggtgggctgaggcaggggccgctgtcgtcaggcctgagccagggtgagctggtgcctgccttgcattttccttctggtgctgtgaagaccataggctggcaggcagctgagatgaactgtctttaccactgatgaggggcctctgccggctgagggtagcaagcaggggttgtgagtcaggctgggggacttgtttgaaagaaagaggagtggaaaatggttccaggagggaagaggttctttgagacacagtaccctgggaggcataggagaagggtcgggccagcccagcccagggcctgagttagactatttcccacatgttctctgccttcagtggggagggggtgccaccagggctgtcggccaggattgccactcctgtttcagaggaagcaggccgagagacttgcaccttggccaagccacacaatcagtggggcagccagagctcagacctgagccattttgtcagtatccaggaccccccggattctccacgccctccccatctcccagtctccctgccccccatgccccagaccggcccaccagggactagccgctgtcgcacagcctctggggtgcttggtctctgcgaagtcaaaggcctgacagctctgtggcctgggaatccattttcctgcggcagagcagggcctggtgtggaaccagggagctgtgggaagccacagcagaaatggaagaaaaacaggtctcagcccagggtcctcgctcactccctcactccccactttgaagccatctctgttctgcaggtgagaggatttaaagtcagtcacaaaggcttgggaacaaaaggaattctcttccaagaatgcctctgtggtgctgtttggtctctagaaacagggtcacttttttaatgtagtaaagaagtaataaatggtggcattacacattgtgatattaaaaaaaaaaaaaaaaaa

SEQ ID NO: 2853 - DNA, 1410 bp, Homo Sapiens
  NM_006117
acccccgagcccccgcagccctagagccgcccaagggatggcgatggcgtacttggcttggagactggcgcggcgttcgtgtccgaggtcactagtttcccggtagttcagctgcacatgaatagaacagcaatgagagccagtcagaaggactttgaaaattcaatgaatcaagtgaaactcttgaaaaaggatccaggaaacgaagtgaagctaaaactctacgcgctatataagcaggccactgaaggaccttgtaacatgcccaaaccaggtgtatttgacttgatcaacaaggccaaatgggacgcatggaatgcccttggcagcctgcccaaggaagctgccaggcagaactatgtggatttggtgtccagtttgagtccttcattggaatcctctagtcaggtggagcctggaacagacaggaaatcaactgggtttgaaactctggtggtgacctccgaagatggcatcacaaagatcatgttcaaccggcccaaaaagaaaaatgccataaacactgagatgtatcatgaaattatgcgtgcacttaaagctgccagcaaggatgactcaatcatcactgttttaacaggaaatggtgactattacagtagtgggaatgatctgactaacttcactgatattccccctggtggagtagaggagaaagctaaaaataatgccgttttactgagggaatttgtgggctgttttatagattttcctaagcctctgattgcagtggtcaatggtccagctgtgggcatctccgtcaccctccttgggctattcgatgccgtgtatgcatctgacagggcaacatttcatacaccatttagtcacctaggccaaagtccggaaggatgctcctcttacacttttccgaagataatgagcccagccaaggcaacagagatgcttatttttggaaagaagttaacagcgggagaggcatgtgctcaaggacttgttactgaagttttccctgatagcacttttcagaaagaagtctggaccaggctgaaggcatttgcaaagcttcccccaaatgccttgagaatttcaaaagaggtaatcaggaaaagagagagagaaaaactacacgctgttaatgctgaagaatgcaatgtccttcagggaagatggctatcagatgaatgcacaaatgctgtggtgaacttcttatccagaaaatcaaaactgtgatgaccactacagcagagtaaagcatgtccaaggaaggatgtgctgttacctctgatttccagtactggaactaaataagcttcattgtgccttttgtagtgctagaatatcaattacaatgatgatatttcactacagctctgatgaataaaaagttttgtaaaacaagcttaagaattcaaaaaaaaaaaaaaaaaa

SEQ ID NO: 2854 - DNA, 1196 bp, Homo Sapiens
  NM_006118
acgtccggcttaccgtcgtttacgacagtgtcaggatcgcgggcttgctttccggtagcgtgggctgacgcctcgctcaatttctcacagggctgcgcaggtttcccccgtctgcgaatggaccactggaggggttcaaaggttcgcgtcccagtacgggaatgagcctctttgatctcttccggggctttttcggctttcctggacctcggagccacagagatcccttttttggagggatgactcgagatgaagatgatgatgaggaagaagaagaagaagggggctcatggggccgtgggaacccaaggttccatagtcctcagcacccccctgaggaatttggcttcggcttcagcttcagcccaggaggagggatacgtttccacgataacttcggctttgatgacctagtacgagatttcaatagcatcttcagcgatatgggggcctggaccttgccttcccatcctcctgaacttccaggtcctgagtcagagacacctggtgagagactacgggagggacagacacttcgggactcaatgcttaagtatccagatagtcaccagcccaggatctttgggggggtcttggagagtgatgcaagaagtgaatccccccaaccagcaccagactggggctcccagaggccatttcataggtttgatgatgtatggcctatggacccccatcctagaaccagagaggacaatgatcttgattcccaggtttcccaggagggtcttggcccggttctacagccccagcccaaatcctatttcaagagcatctctgtgaccaagatcactaaaccagatgggatagtggaggagcgccggactgtggtggacagtgagggccggacagagactacagtaacccgacacgaagcagatagcagtcctaggggtgatccagaatcaccaagacctccagccctggatgatgccttttccatcctggacttattcctgggacgttggttccggtcccggtagccttgttaaccctcagaggccttcaagtcctttccacctctcacccattgcccaccattaataagcttagcttctcttgccacctcaggggcttggatatgtggaatagtgaactggggccatgtcagtttgtcactcacccaaactgaccaataaaacctttatttatgctaaaaaaaaaaaaaaaaaaaaaaa

SEQ ID NO: 2855 - DNA, 1122 bp, Homo Sapiens
  NM_006120
gatctaaggccaccctctcggggagggagttggggaagctgggttggctgggttggtagctcctacctactgtgtggcaagaaggtatgggtcatgaacagaaccaaggagctgcgctgctacagatgttaccacttctgtggctgctaccccactcctgggccgtccctgaagctcctactccaatgtggccagatgacctgcaaaaccacacattcctgcacacagtgtactgccaggatgggagtcccagtgtgggactctctgaggcctacgacgaggaccagcttttcttcttcgacttttcccagaacactcgggtgcctcgcctgcccgaatttgctgactgggctcaggaacagggagatgctcctgccattttatttgacaaagagttctgcgagtggatgatccagcaaatagggccaaaacttgatgggaaaatcccggtgtccagagggtttcctatcgctgaagtgttcacgctgaagcccctggagtttggcaagcccaacactttggtctgttttgtcagtaatctcttcccacccatgctgacagtgaactggcagcatcattccgtccctgtggaaggatttgggcctacttttgtctcagctgtcgatggactcagcttccaggccttttcttacttaaacttcacaccagaaccttctgacattttctcctgcattgtgactcacgaaattgaccgctacacagcaattgcctattgggtaccccggaacgcactgccctcagatctgctggagaatgtgctgtgtggcgtggcctttggcctgggtgtgctgggcatcatcgtgggcattgttctcatcatctacttccggaagccttgctcaggtgactgattcttccagaccagagtttgatgccagcagcttcggccatccaaacagaggatgctcagatttctcacatcctgcccaggatctcctcttagggtagaagtctctgggacatccctggggtgtgtgtgtagatttcccacctggggactctgctgtccctgggcttgcatcccagggatcccagagtggcctgcctatcacaaccacatcccttccccccacaaggcaataaatctcatttctttatatc

SEQ ID NO: 2856 - DNA, 2350 bp, Homo Sapiens
  NM_006134
gctctatcctcgcgtctgctcccagctccgggctcccggggctgaggtggagccgcgggacgccggcagggttgtggcgcagcagtctccttcctgcgcgcgcgcctgaagtcggcgtgggcgtttgaggaagctgggatacagcatttaatgaaaaatttatgcttaagaagtaaaaatggcaggcttcctagataattttcgttggccagaatgtgaatgtattgactggagtgagagaagaaatgctgtggcatctgttgtcgcaggtatattgttttttacaggctggtggataatgattgatgcagctgtggtgtatcctaagccagaacagttgaaccatgcctttcacacatgtggtgtattttccacattggctttcttcatgataaatgctgtatccaatgctcaggtgagaggtgatagctatgaaagcggctgtttaggaagaacaggtgctcgagtttggcttttcattggtttcatgttgatgtttgggtcacttattgcttccatgtggattctttttggtgcatatgttacccaaaatactgatgtttatccgggactagctgtgttttttcaaaatgcacttatattttttagcactctgatctacaaatttggaagaaccgaagagctatggacctgagatcacttcttaagtcacattttccttttgttatattctgtttgtagataggttttttatctctcagtacacattgccaaatggagtagattgtacattaaatgttttgtttctttacatttttatgttctgagttttgaaatagttttatgaaatttctttatttttcattgcatagactgttaatatgtatataatacaagactatatgaattggataatgagtatcagttttttattcctgagatttagaacttgatctactccctgagccagggttacatcatcttgtcattttagaagtaaccactcttgtctctctggctgggcacggtggctcatgcctgtaatcccagcactttgggaggccgaggcgggccgattgcttgaggtcaagtgtttgagaccagcctggccaacatggcgaaaccccatctactaaaaatacaaaaattagccaggcatggtggtgggtgcctgtaatcccaactacctaggaggctgaggcaggagaatcgcttgaacccggggggcagaggttgtagtgagctgagtttgcgccactgcactctagcctgggggagaaagtgaaactccctctcaaaaaaaagaaggaccactctcagtatctgatttctgaagatgtacaaaaaaatatagcttcatatatctagaatgagcactgagccataaaaggttttcagcaagttgtaacttattttggcctaaaaatgaggtttttttggtaaagaaaaaatatttgttcttatgtattgaagaagtgtacttttatataatgattttttaaatgcccaaaggactagtttgaaagcttcttttaaaaagaattcctctaatatgactttatgtgagaagggataatacatgatcaaataaactcagttttttatggttactgtaaaaagactgtgtaaggcagctcagcaccatgcttctcgtaaaagcagcttcaaatatccactggggttatcttttgacaacttgccattatctgatgttacacaattcaatagcaagcaagtttgagacaatcgcagtttaaaagcatgaaccatttaacaaaaagtggaataattaaagataaagcacttcttcccaaagggaattatcacctagtgaaaaattatgcatttcatctactcagttaccgactgcaagtctctcctcgctctagctctcaagctttgggtgaatattcctgtgaaatatatcttcaacttgaaagttcatactccaatcaaaaactccttttactgagtttgcagtactgtatttgcactgtttgtattcctctgggcccttattgctacttttgctttcctttgttacacagattttgtgttgcactttttctccagaggggtgttgtagagccttggttgtatgaataataccagtggtagtgtccacggctctaatgtaagcccatttggcatcactcctctcctctctcttgagaggatttcttgtgcacagagtatgaagcagttgtggagcgctgtgcctttgtcaagataccatcttgtttgatgacttctttctttgctgttttttcttcaaaatgttagtaagctctgtcatgcttctagcaaattgtaagactaattatttgtttccacctcataacctgttgcaataaatattacttctcatacaaaaaaaaaaaaaaaaaaa

SEQ ID NO: 2857 - DNA, 2758 bp, Homo Sapiens
  NM_006135
agcagctcttaaagctttggattcggctgtcgtggagataacgggcaccagaaaaacttgtaggagtagcaacagctatttggtcggatggaggccagaagccaagaataatcgaaacacgctgccagcgcccattagatggatgggaaatgagtgtaactcattgggaaagatattagacttcaaatcacctaaggcaaaccctacttcctggggcgcgggcgcgggcgctggcgttaggagacgtcactcccgcgcataactgacatggggccctcttggtcggcgtttccgggcgggtccttccgacggccgccgcggtgattccatcactcggctttcttcccggcctgcctcgcgcccgtagccgggctgggccagaacagcccaagatggccgacttcgatgatcgtgtgtcggatgaggagaaggtacgcatagctgctaaattcatcactcatgcacccccaggggaatttaatgaagtattcaatgacgttcggctactacttaataatgacaatctcctcagggaaggggcagcacatgcatttgcccagtataacatggatcagttcacgcctgtgaagatagaaggatatgaagatcaggtcttaattacagagcacggtgacctgggtaatagcagatttttagatccaagaaacaaaatttcctttaaatttgaccacttacggaaagaagcaagtgacccccagccagaagaagcagatggaggtctgaagtcttggagagaatcctgtgacagtgctttaagagcctatgtgaaagaccattattccaacggcttctgtactgtttatgctaaaactatcgatgggcaacagactattattgcatgtattgaaagccaccagtttcagcctaaaaacttctggaatggtcgttggagatcagagtggaagttcaccatcacaccacctacagcccaggtggttggcgtgcttaagattcaggttcactattatgaagatggcaatgttcagttggttagtcataaagatgtacaggattcactaactgtttcgaatgaagcccaaactgccaaggagtttattaaaatcatagagaatgcagaaaatgagtatcagacagcaattagtgaaaactatcaaacaatgtcagataccacattcaaggccttgcgccggcagcttccagttacccgcaccaaaatcgactggaacaagatactcagctacaagattggcaaagaaatgcagaatgcttaaaggctgaatgtaggattcttcagtatgtggaaagacaaggattcaacgtgtggtcatatgataaataagtgatttataaacaagagtgatattttgctagggctttcaaagttaaccggttttctagcctcatggaatactgttgaacctatagcgttgtcttgattcttttgtgttctctgccttgtaattttctgttactgctatatctacgtgtaaatctttttttctttttttttttttttttttggttaattctgccacatttaatgttggtgagagagtgatctatcctaatgacattttactgtttaaaaaagtttcctagccatgaagccctgctactgatttagacaaggtattatggtcattactttgtacccctatccttccaagcacttctggtacttcagtcgtttttactgatccaccaacacctaaagaggctatgctacagtctctagctaaatggaagacacattcatccttctccctctgactgctttgatcatcatttattgcatctcataactaattttctaaagtttggattgggacttttcaggtcctttttggagggcaaaggaagtgccagcttctctggggaacttgtttttaaatccaaagacttgaaccacattccctgcacatgaacatgtttgcttttatcccttctctcattgtctccttcccatcttagtaccattgtagttataaacatctgcattttttagaagcattttacccatttatttttttaaacattcaagaactgctgacgtactgtggatgtagagtataaaacttgaaaaatgcagatgttgaaggaataataggtatcttgtgctttaatactttatggcaggattgtactataagcaaatgaattaaacagctatgtaaatcataaagaaaaactaaaaatgaaccaaagtgaaaggataacttccaggcagtatctttctattgtaacctgttatttaaggaaatactagtgatttcttctaaataggatgtaaaacttctttcaaattactcttcctcagtcctgcctgccaagaactcaagtgtaactgtgataaaataacctttcccaggtatattggcaggtatgtgtgtaatctcagaatacacaggtgacatagatatgatatgacaactggtaatggtggattcatttacattgtttacacttctatgaccaggccttaagggaaggtcagttttttaaaaaaccaagtagtgtcttcctacctatctccagatacatgtcaaaaaaagaaaggtgtttgtgcttccgttttgtttctgctcagtaatatagtcaagcaagtttgttccaggtgacccattgagctgtgtatgcatttttgtttatttcaataaaatatatttgtattatttgtccttcatactatccatccataccacactatcttctgtatcaggtagtctaatagaaatatacctgttttgttctaaaattgaaaaaaaaaaaaaaaaaa

SEQ ID NO: 2858 - DNA, 2373 bp, Homo Sapiens
  NM_006136
cccctcccttagcgggggcgcgcggcgctgaggaccgcacggaaacggggaagtcaggtggccgctgccgccgccgccgccgcggtttgtcgccagaaggaagatggcggatctggaggagcagttgtctgatgaagagaaggtgcgtatagcagcaaaattcatcattcatgcccctcctggagaatttaatgaggttttcaatgatgttcggttactgcttaataatgacaatcttctcagggaaggagcagcccatgcatttgcacagtataacttggaccagtttactccagtaaaaattgaaggttatgaagatcaggtattgataacagaacatggcgacttgggaaatggaaagtttttggatccaaagaacagaatctgttttaaatttgatcacttaaggaaggaggcaactgatccaagaccctgtgaagtagaaaatgcagttgaatcatggagaacttcagtagaaactgctctgagagcttacgtaaaagaacattacccgaatggagtctgcactgtgtatggcaaaaaaatagatggacagcaaaccattattgcatgcatagaaagccatcagttccaagcaaaaaatttttggaatggtcgttggaggtcagaatggaagtttacaatcactccttcaaccactcaagtggttggcatcttgaaaattcaggttcattattatgaagatggtaatgttcagctagtgagtcataaagatatacaagattccctaacagtgtctaatgaagtgcaaacagcaaaagaatttataaagattgtagaagctgcagaaaatgaataccagactgccatcagtgagaattatcagacaatgtcggacactactttcaaagccttacgtcgacagttgccagttacacgcactaagattgattggaacaagatccttagctacaagattggcaaagagatgcagaatgcataagatgaacattgcatgaccggatcattttagtgtctttgcgttaaaaaatcattgcaaaagtattctgaactgtcaagctgcccagtcagatgggctgttgccatttaaaatcactgtaattaattagtttgattagagcacaaagcttagctaatcaaccattatttttcattttgtttgttctaagaggattgaaaatcagtttagtttaaatgtctttctgttaggcctttctttcttacaatgaagagatgattcttctagtttatggttaaaagtttttgaagtgtctcaaaaatattttactaactgtaaccctaaaattgatgtcttttggtttatgaaatcagtaatttttgatatttccccagttctttttaatggggtcaataatggacattctagtttaaggtggttgatggatttagccatatatgctgctaaagaaattgtctaccttttcttcctcacctgttccatttatgtaaagttgagattagagggaaagcattttctatatcaattgtgtttaaacctttcaagaaggttatttagctagcttagtgttgaactaaattttttttaaacaaggcaaggtctaatgctgttttgagattctgaaattaatgaaaatacttatttcagaaatgcatttaatgctttttttcttgtgacagttacgcaaatcagcttgaattccatatgtccctgagttatttttatcataaagccacaaatgtattataacaaggcaaattgtaatatatataatcctgaactcatgaccatgtctcggtttattttttttttcttggattgaaaagtactgaaattcaatgtgacattaaaatgcaaattttcctatttatttgagtagaaaatcacttaccagtgagcatatatattttaaaatactttctttggatattgtaattcttaactggttgtaaattagaaaagctgggattacatatggtgtgcggttacagtctaaattttttcatcctcctatgcatcataagcatgtttgtaatattttcaaaaatagttctactgatgctacaggaatttcaagcctgtggtgaatgttagtatttaccatagggagtgaagtggagttatggtttcattcaatagagtattgctgattatacttgagtggaatcctttcctcacgtactcccacagacgtctgggcctggaaattttttttttattttattttattgtttttttttttagaaaaacaccacttttattatgtacaataaaatatttcattagcttgaattgtatagatttttaaaaattcaatgaaagcatgttgtttaatttctttttaaaatcactgttgggctttgaaagcattgagaatataatatgaaattatgaaaaaaaaaaaaaaaaaa

SEQ ID NO: 2859 - DNA, 1318 bp, Homo Sapiens
  NM_006137
ctgagctctgagcgcctgcggtctcctgtgtgctgctctctgtggggtcctgtagacccagagaggctcagctgcactcgcccggctgggagagctgggtgtggggaacatggccgggcctccgaggctcctgctgctgcccctgcttctggcgctggctcgcggcctgcctggggccctggctgcccaagaggtgcagcagtctccccactgcacgactgtccccgtgggagcctccgtcaacatcacctgctccaccagcgggggcctgcgtgggatctacctgaggcagctcgggccacagccccaagacatcatttactacgaggacggggtggtgcccactacggacagacggttccggggccgcatcgacttctcagggtcccaggacaacctgactatcaccatgcaccgcctgcagctgtcggacactggcacctacacctgccaggccatcacggaggtcaatgtctacggctccggcaccctggtcctggtgacagaggaacagtcccaaggatggcacagatgctcggacgccccaccaagggcctctgccctccctgccccaccgacaggctccgccctccctgacccgcagacagcctctgccctccctgacccgccagcagcctctgccctccctgcggccctggcggtgatctccttcctcctcgggctgggcctgggggtggcgtgtgtgctggcgaggacacagataaagaaactgtgctcgtggcgggataagaattcggcggcatgtgtggtgtacgaggacatgtcgcacagccgctgcaacacgctgtcctcccccaaccagtaccagtgacccagtgggcccctgcacgtcccgcctgtggtccccccagcaccttccctgccccaccatgccccccaccctgccacacccctcaccctgctgtcctcccacggctgcagcagagtttgaagggcccagccgtgcccagctccaagcagacacacaggcagtggccaggccccacggtgcttctcagtggacaatgatgcctcctccgggaagccttccctgcccagcccacgccgccaccgggaggaagcctgactgtcctttggctgcatctcccgaccatggccaaggagggcttttctgtgggatgggcctgggcacgcggccctctcctgtcagtgccggcccacccaccagcaggcccccaacccccaggcagcccggcagaggacgggaggagaccagtcccccacccagccgtaccagaaataaaggcttctgtgcttcctttaaaaaaaaaaaaaaaaaaaaaaaaaaaaaaaaaaa

SEQ ID NO: 2860 - DNA, 1665 bp, Homo Sapiens
  NM_006138
ggaggcttccgttatcgggaaaagatgctgtagtgatcttttctgagtgtctcctacttgcgacaaggtggacttgggaggaaagccgtctgccaaagcctgaagcctccaagccataaacaaccccaatggcctcccacgaagttgataatgcagagctggggtcagcctctgcccatggtaccccaggcagtgaggcgggaccagaagagctgaatacttctgtctaccagcccatagatggatcaccagattatcagaaagcaaaattacaagttcttggggccatccagatcctgaatgcagcaatgattctggctttgggtgtctttctgggttccttgcaatacccataccacttccaaaagcacttctttttcttcaccttctacacaggctacccgatttggggtgctgtgtttttctgtagttcaggaaccttgtctgttgtagcagggataaaacccacaagaacatggatacagaacagttttggaatgaacattgccagtgctacaattgcactagtggggactgcttttctctcactaaatatagcagttaatatccagtcattaaggagttgtcactcttcatcagagtcaccggacctatgcaattacatgggctccatatcaaatggcatggtgtctctactgctgattctcaccttgctggaattatgcgtaaccatctctaccatagccatgtggtgcaatgcaaactgctgtaattcaagagaggaaatttcctcacctcccaattctgtgtaatcaagaatacctccttaattctgagagcatgaatatttgaccttaaatctccagtgactcagagcttcacccacaaactcaggagaacataagcctgctcgtaaagctcaatccttctatcatggcaccaatcacaagaaccttggacgtttgactgactctatcctttctctcctaactataaatcctatttgtgtgtcgtgggtatggaaggacagatatatttctttaggcattcttggatatctgtaacttctatgatcattactccaaagttgtttccagaaattggttctatttcttcttatccacctactccattgctttatgaggtttaaggaaggaaggcggtataatccctattcaatatattttttctaaaatccaacttctgaccgcccagtaggaagaaaaatgagacattttttccattacagagaaatgcttcttgactttaacatcagcattataaaaagtgtcaaataaaaaattaccatcattatcattaaaataaattttcactgtatttgagatgggagggttaaggctcagggattttatttcagtgaactgctggaactcacacatgccctgatatgtaaatgatgatttatgttggcgagtctgagagcaagcccaaatgtgttcttcaaaggacaatgggaaactgtaaagtagagaactaaagaataaggcctttagaatctgacacatctgggttcaaattctgaaactgtcacttattacctgtatgaacatgggcaaattatctaatctctctgatctatttttcctcatctgtaaaataggtgtaataataacaactactttgtcggttgctctgagggttaaatgaaaataaaaagaaaatgtgaaacagcaaaaaaaaaaa

SEQ ID NO: 2861 - DNA, 3807 bp, Homo Sapiens
  NM_006139
taaagtcatcaaaacaacgttatatcctgtgtgaaatgctgcagtcaggatgccttgtggtttgagtgccttgatcatgtgccctaaggggatggtggcggtggtggtggccgtggatgacggagactctcaggccttggcaggtgcgtctttcagttcccctcacacttcgggttcctcggggaggaggggctggaaccctagcccatcgtcaggacaaagatgctcaggctgctcttggctctcaacttattcccttcaattcaagtaacaggaaacaagattttggtgaagcagtcgcccatgcttgtagcgtacgacaatgcggtcaaccttagctgcaagtattcctacaatctcttctcaagggagttccgggcatcccttcacaaaggactggatagtgctgtggaagtctgtgttgtatatgggaattactcccagcagcttcaggtttactcaaaaacggggttcaactgtgatgggaaattgggcaatgaatcagtgacattctacctccagaatttgtatgttaaccaaacagatatttacttctgcaaaattgaagttatgtatcctcctccttacctagacaatgagaagagcaatggaaccattatccatgtgaaagggaaacacctttgtccaagtcccctatttcccggaccttctaagcccttttgggtgctggtggtggttggtggagtcctggcttgctatagcttgctagtaacagtggcctttattattttctgggtgaggagtaagaggagcaggctcctgcacagtgactacatgaacatgactccccgccgccccgggcccacccgcaagcattaccagccctatgccccaccacgcgacttcgcagcctatcgctcctgacacggacgcctatccagaagccagccggctggcagcccccatctgctcaatatcactgctctggataggaaatgaccgccatctccagccggccacctcaggcccctgttgggccaccaatgccaatttttctcgagtgactagaccaaatatcaagatcattttgagactctgaaatgaagtaaaagagatttcctgtgacaggccaagtcttacagtgccatggcccacattccaacttaccatgtacttagtgacttgactgagaagttagggtagaaaacaaaaagggagtggattctgggagcctcttccctttctcactcacctgcacatctcagtcaagcaaagtgtggtatccacagacattttagttgcagaagaaaggctaggaaatcattccttttggttaaatgggtgtttaatcttttggttagtgggttaaacggggtaagttagagtagggggagggataggaagacatatttaaaaaccattaaaacactgtctcccactcatgaaatgagccacgtagttcctatttaatgctgttttcctttagtttagaaatacatagacattgtcttttatgaattctgatcatatttagtcattttgaccaaatgagggatttggtcaaatgagggattccctcaaagcaatatcaggtaaaccaagttgctttcctcactccctgtcatgagacttcagtgttaatgttcacaatatactttcgaaagaataaaatagttctcctacatgaagaaagaatatgtcaggaaataaggtcactttatgtcaaaattatttgagtactatgggacctggcgcagtggctcatgcttgtaatcccagcactttgggaggccgaggtgggcagatcacttgagatcaggaccagcctggtcaagatggtgaaactccgtctgtactaaaaatacaaaatttagcttggcctggtggcaggcacctgtaatcccagctgcccaagaggctgaggcatgagaatcgcttgaacctggcaggcggaggttgcagtgagccgagatagtgccacagctctccagcctgggcgacagagtgagactccatctcaaacaacaacaacaacaacaacaacaacaacaaaccacaaaattatttgagtactgtgaaggattatttgtctaacagttcattccaatcagaccaggtaggagctttcctgtttcatatgtttcagggttgcacagttggtctctttaatgtcggtgtggagatccaaagtgggttgtggaaagagcgtccataggagaagtgagaatactgtgaaaaagggatgttagcattcattagagtatgaggatgagtcccaagaaggttctttggaaggaggacgaatagaatggagtaatgaaattcttgccatgtgctgaggagatagccagcattaggtgacaatcttccagaagtggtcaggcagaaggtgccctggtgagagctcctttacagggactttatgtggtttagggctcagagctccaaaactctgggctcagctgctcctgtaccttggaggtccattcacatgggaaagtattttggaatgtgtcttttgaagagagcatcagagttcttaagggactgggtaaggcctgaccctgaaatgaccatggatatttttctacctacagtttgagtcaactagaatatgcctggggaccttgaagaatggcccttcagtggccctcaccatttgttcatgcttcagttaattcaggtgttgaaggagcttaggttttagaggcacgtagacttggttcaagtctcgttagtagttgaatagcctcaggcaagtcactgcccacctaagatgatggttcttcaactataaaatggagataatggttacaaatgtctcttcctatagtataatctccataagggcatggcccaagtctgtctttgactctgcctatccctgacatttagtagcatgcccgacatacaatgttagctattggtattattgccatatagataaattatgtataaaaattaaactgggcaatagcctaagaaggggggaatattgtaacacaaatttaaacccactacgcagggatgaggtgctataatatgaggaccttttaacttccatcattttcctgtttcttgaaatagtttatcttgtaatgaaatataaggcacctcccacttttatgtatagaaagaggtcttttaatttttttttaatgtgagaaggaagggaggagtaggaatcttgagattccagatcgaaaatactgtactttggttgatttttaagtgggcttccattccatggatttaatcagtcccaagaagatcaaactcagcagtacttgggtgctgaagaactgttggatttaccctggcacgtgtgccacttgccagcttcttgggcacacagagttcttcaatccaagttatcagattgtatttgaaaatgacagagctggagagttttttgaaatggcagtggcaaataaataaatacttttttttaaatggaaagacttgatctatggtaataaatgattttgttttctgactggaaaaataggcctactaaagatgaatcacacttgagatgtttcttactcactctgcacagaaacaaagaagaaatgttatacagggaagtccgttttcactattagtatgaaccaagaaatggttcaaaaacagtggtaggagcaatgctttcatagtttcagatatggtagttatgaagaaaacaatgtcatttgctgctattattgtaagagtcttataattaatggtactcctataatttttgattgtgagctcacctatttgggttaagcatgccaatttaaagagaccaagtgtatgtacattatgttctacatattcagtgataaaattactaaactacta

SEQ ID NO: 2862 - DNA, 1743 bp, Homo Sapiens
  NM_006143
ctttccgcctagtgagaggcggtccgatttggcccttggggagtgtccgtcgcgttgatctgatggattcacgtacacaacaccacattctatgagattttgcaggcaaaagtccacaagctcgatatatgggacacctgcaccggcattggatttggccccgcaacatcttaaaggaagcaggctgtgagccaaggggaaggcagaggacagaaatgaatgtgtttccaggctttcctggtggtttatggcattctccaaactcctatgcaagggctattcctgaccaagaagatctaaagagaacgtctctgaaatcaagtccggatgaagaattaagagaaaaaaagtgaatatggtttttgctcacagaatggataacagcaagccacatttgattattcctacacttctggtgcccctccaaaaccgcagctgcactgaaacagccacacctctgccaagccaatacctgatggaattaagtgaggagcacagttggatgagcaaccaaacagaccttcactatgtgctgaaacccggggaagtggccacagccagcatcttctttgggattctgtggttgttttctatcttcggcaattccctggtttgtttggtcatccataggagtaggaggactcagtctaccaccaactactttgtggtctccatggcatgtgctgaccttctcatcagcgttgccagcacgcctttcgtcctgctccagttcaccactggaaggtggacgctgggtagtgcaacgtgcaaggttgtgcgatattttcaatatctcactccaggtgtccagatctacgttctcctctccatctgcatagaccggttctacaccatcgtctatcctctgagcttcaaggtgtccagagaaaaagccaagaaaatgattgcggcatcgtggatctttgatgcaggctttgtgacccctgtgctctttttctatggctccaactgggacagtcattgtaactatttcctcccctcctcttgggaaggcactgcctacactgtcatccacttcttggtgggctttgtgattccatctgtcctcataattttattttaccaaaaggtcataaaatatatttggagaataggcacagatggccgaacggtgaggaggacaatgaacattgtccctcggacaaaagtgaaaactatcaagatgttcctcattttaaatctgttgtttttgctctcctggctgccttttcatgtagctcagctatggcacccccatgaacaagactataagaaaagttcccttgttttcacagctatcacatggatatcctttagttcttcagcctctaaacctactctgtattcaatttataatgccaattttcggagagggatgaaagagactttttgcatgtcctctatgaaatgttaccgaagcaatgcctatactatcacaacaagttcaaggatggccaaaaaaaactacgttggcatttcagaaatcccttccatggccaaaactattaccaaagactcgatctatgactcatttgacagagaagccaaggaaaaaaagcttgcttggcccattaactcaaatccaccaaatacttttgtctaagttctcattctttcaattgttatgcaccagagattaaaaagctttaactataaaaacagaagctatttacatatttgttttcactcaactttccaagggaaatgttttattttgtaaaatgcattcatttgtttactgta

SEQ ID NO: 2863 - DNA, 913 bp, Homo Sapiens
  NM_006144
agattttcaggttgattgatgtgggacagcagccacaatgaggaactcctatagatttctggcatcctctctctcagttgtcgtttctctcctgctaattcctgaagatgtctgtgaaaaaattattggaggaaatgaagtaactcctcattcaagaccctacatggtcctacttagtcttgacagaaaaaccatctgtgctggggctttgattgcaaaagactgggtgttgactgcagctcactgtaacttgaacaaaaggtcccaggtcattcttggggctcactcaataaccagggaagagccaacaaaacagataatgcttgttaagaaagagtttccctatccatgctatgacccagccacacgcgaaggtgaccttaaacttttacagctgacggaaaaagcaaaaattaacaaatatgtgactatccttcatctacctaaaaagggggatgatgtgaaaccaggaaccatgtgccaagttgcagggtggggcaggactcacaatagtgcatcttggtccgatactctgagagaagtcaatatcaccatcatagacagaaaagtctgcaatgatcgaaatcactataattttaaccctgtgattggaatgaatatggtttgtgctggaagcctccgaggtggaagagactcgtgcaatggagattctggaagccctttgttgtgcgagggtgttttccgaggggtcacttcctttggccttgaaaataaatgcggagaccctcgtgggcctggtgtctatattcttctctcaaagaaacacctcaactggataattatgactatcaagggagcagtttaaataaccgtttcctttcatttactgtggcttcttaatcttttcacaaataaaatcaatttgcatgactgtaaaaaaaaaaaaaaaaaa

SEQ ID NO: 2864 - DNA, 5760 bp, Homo Sapiens
  NM_006154
ctcccgcttctcctcctcctcctccacagttgcctgccctgggcgggggcgagcgcgtccggtttgctggaagcgttcggaaatggcaacttgcgcggtggaggtgttcgggctcctggaggacgaggaaaattcacgaattgtgagagtaagagttatagccggaataggccttgccaagaaggatatattgggagctagtgatccttacgtgagagtgacgttatatgacccaatgaatggagttcttacaagtgtgcaaacaaaaaccattaaaaagagtttgaatccaaagtggaatgaagaaatattattcagagttcatcctcagcagcaccggcttctttttgaagtgtttgacgaaaaccgattgacaagagatgatttcctaggtcaagtggatgttccactttatccattaccgacagaaaatccaagattggagagaccatatacatttaaggattttgttcttcatccaagaagtcacaaatcaagagttaaaggttatctgagactaaaaatgacttatttacctaaaaccagtggctcagaagatgataatgcagaacaggctgaggaattagagcctggctgggttgttttggaccaaccagatgctgcttgccatttgcagcaacaacaagaaccttctcctctacctccagggtgggaagagaggcaggatatccttggaaggacctattatgtaaaccatgaatctagaagaacacagtggaaaagaccaacccctcaggacaacctaacagatgctgagaatggcaacattcaactgcaagcacaacgtgcatttaccaccaggcggcagatatccgaggaaacagaaagtgttgacaaccgagagtcttccgagaactgggaaattataagagaagatgaagccaccatgtatagcaaccaggccttcccatcacctccaccgtcaagtaacttggatgttccaactcatcttgcagaagaattgaatgccagactcaccatttttggaaattcagccgtgagccagccagcatcgagctcaaatcattccagcagaagaggcagcttacaagcctatacttttgaggaacaacctacacttcctgtgcttttgcctacttcatctggattaccaccaggttgggaagaaaaacaagatgaaagaggaagatcatattatgtagatcacaattccagaacgactacttggacaaagcccactgtacaggccacagtggagaccagtcagctgacctcaagccagagttctgcaggccctcaatcacaagcctccaccagtgattcaggccagcaggtgacccagccatctgaaattgagcaaggattccttcctaaaggctgggaagtccggcatgcaccaaatgggaggcctttctttattgaccacaacactaaaaccaccacctgggaagatccaagattgaaaattccagcccatctgagaggaaagacatcacttgatacttccaatgatctagggcctttacctccaggatgggaagagagaactcacacagatggaagaatcttctacataaatcacaatataaaaagaacacaatgggaagatcctcggttggagaatgtagcaataactggaccagcagtgccctactccagggattacaaaagaaagtatgagttcttccgaagaaagttgaagaagcagaatgacattccaaacaaatttgaaatgaaacttcgccgagcaactgttcttgaagactcttaccggagaattatgggtgtcaagagagcagacttcctgaaggctcgactgtggattgagtttgatggtgaaaagggattggattatggaggagttgccagagaatggttcttcctgatctcaaaggaaatgtttaacccttattatgggttgtttgaatattctgctacggacaattataccctacagataaatccaaactctggattgtgtaacgaagatcacctctcttacttcaagtttattggtcgggtagctggaatggcagtttatcatggcaaactgttggatggttttttcatccgcccattttacaagatgatgcttcacaaaccaataacccttcatgatatggaatctgtggatagtgaatattacaattccctaagatggattcttgaaaatgacccaacagaattggacctcaggtttatcatagatgaagaactttttggacagacacatcaacatgagctgaaaaatggtggatcagaaatagttgtcaccaataagaacaaaaaggaatatatttatcttgtaatacaatggcgatttgtaaaccgaatccagaagcaaatggctgcttttaaagagggattctttgaactaataccacaggatctcatcaaaatttttgatgaaaatgaactagagcttcttatgtgtggactgggagatgttgatgtgaatgactggagggaacatacaaagtataaaaatggctacagtgcaaatcatcaggttatacagtggttttggaaggctgttttaatgatggattcagaaaaaagaataagattacttcagtttgtcactggcacatctcgggtgcctatgaatggatttgctgaactatacggttcaaatggaccacagtcatttacagttgaacagtggggtactcctgaaaagctgccaagagctcatacctgttttaatcgcctggacttgccaccttatgaatcatttgaagaattatgggataaacttcagatggcaattgaaaacacccagggctttgatggagttgattagattacaaataacaatctgtagtgtttttactgccatagttttataaccaaaatcttgacttaaaattttccggggaactactaaaatgtggccactgagtcttcccagatcttgaagaaaatcatataaaaagcatttgaagaaatagtacgacaacttatttttaatcacttttaaataatgtgttgcatttacacagttgtttcatgctgtctttagagttaggtgcctgcctaaagccaggcaccaccacacctggctttagagttcacacaataggatataagtcctgtatgacttaaatagtgaattttgtccttaacatttacctcttgtatagtatctgccaggcagttttttcttaaactactgagatgataactgtgaaatatttgtgatacgtgtcatgtgtgaaaagtttgatgcattttgagatggaaaactgaaatttggaaaaagaaatactttactattgagtaaactacaatatatttagtgctactcgcagctatttattattttgtagacctgccttatgcaccttactgcctagatttttgggaaaaaactttggaaagtgtgttacctatatttctagccaactaactcacagaaaaactgtttacttcttcactttcgaagtatttggcttttgttaatatgcagttttactaaacagatggttcataagacatgtgaagcaaattcatatttgcaatgggtaaaaagtattaaagcctttctcttgcctgcatatcctattgaccattggtatagtcatcactttttcatattttagtgtagttagaagaattccttcttcaaacattaaagatccacaaagcagtatttctaaatatgccttgaagaactaaatgaagtgtatagcacttgcctttactagatattctttacacttgtacaattatgtagtaaatgtatgtttacagggtttatcatgtttacagattaagctaatttctgtagtcgcatttttatatttttagtatcactctagtaaaaaaaccaaataatttgtttaaaataaccaaagagttgttataatgcataatttgtattaaatttattactatttcttatgccttttaaaatactgtttactatgaagacaatgtttttaattacaaatccagaattctgtaggcaaaatgctacagttcatatcttcctttaaccaaactgaagtacataaagaccatgtacatgtattcatcaaacgtttattgaatgctgcgtgcctagcgctgtgctatgctctggggtaagagttgtcagcttcagagaagctgagtcctgatcctcaaggaacttgcaaatgtgtctatgaatttgtaaaacaatcaaaagtaggcgtaagcagaataaggcaaaagggaaagtgttctaggttccagcacacctgcaaagataaagtgtgccaagactgtatttatatttcatacttatattgtttcatccttatattggaatgattatatagaaaatgctcttaaaaagattaaacctatttctcagtatggtatcttggtgatttaggaataattgtaaatatatgttacgaatcttcttaaatatatatatatacacaccctgtgagaactgtaaaaagtacctctggttcttggtttaagtttgttggggtataacatgatgagtactcattagcacctgatagaaatctgaaatgtgacagtagcaaaaccactttctactttccaaacaccacagcatcagcatggtttaggggaagcaattcacagattaatgtaccctgcgttttgtcttcaccattgtcaaccagcagtcaaggatgagcaccaggtatagtcctggtttgatatctcaccagccatgtgaactgaagcagcttacttaacctctctggattcatatttcttcatctgtcaaatgagagtaatcatgcccaccctcattgtcatgccagattgtcagaagttccagacagatgagaaagcaaaaagtactttgtaaagtgttatacaatcagaaggtgctttgtgctgaccgtcagattgtgtcaagtcaggtgtgcaaattgaccacactcccaaagaatcatttaaaagtaaagtgacttctaagagacaaggaagtaggaacatttctgatattaaatatataaataatatggatacacatgtgtatatctgtatatggatcttaccatcataattcattttcttcatatcagcaaagtaatagtaatgtgggccaatgcattttggaaatgtcctcattatgtagaatggaatgtgaaaattatttttgttaaaacaggattttgccacaattatttaaatattatgtttgtgaactatctaagcatgagaaaatacaaagctttctttgtatctggctgatactcatttggatgattctgtgactcatagaacatgatgttaaatgagaccagactcaactgccaccagtccccagctgcagaccttcatccccttcatctcccactaggggctcgtggtctggaagaaacatctatcaagcaacacagccccttatcccagatagaaaagtgtctcaaatgcattctactgcgggacagtcagtaggatcattttcataaagcaaggacatcatatgtttctagaaattacaagcatataactttagcctacaatctcttattaaaaatttttaacaaaattgtattacaaatgcatttcatcagaactcaaatttaaatggtgtttgttttgggtttttatttataatgctgaagttattccatataagtatcaagttaaacacaattcattttgattataaactatttgactttttaaaatcttctgacacagtaaatatatatatcaagattgatgtatcaaaatttattgcacactttaaagtgtaaaatcattttttaaaatcttgaatccacaaataaagttctattctgattttaaaaaacaaaa

SEQ ID NO: 2865 - DNA, 3312 bp, Homo Sapiens
  NM_006159
tttggcatccaggagaccgtgcgggagaccgacgctgagcgccggcctcgccctcggcggcccctccctcctccttaccccgcctcccccggcccgcccctccctccccggaggagcagtctctccgcgcgtctcccggagctttctccattgtctctgcctttacaacagagggagacgatggactgagctgatccgcaccatggagtctcgggtcttactgagaacattctgtttgatcttcggtctcggagcagtttgggggcttggtgtggacccttccctacagattgacgtcttaacagagttagaacttggggagtccacgaccggagtgcgtcaggtcccggggctgcataatgggacgaaagcctttctctttcaagatactcccagaagcataaaagcatccactgctacagctgaacagttttttcagaagctgagaaataaacatgaatttactattttggtgaccctaaaacagacccacttaaattcaggagttattctctcaattcaccacttggatcacaggtacctggaactggaaagtagtggccatcggaatgaagtcagactgcattaccgctcaggcagtcaccgccctcacacagaagtgtttccttacattttggctgatgacaagtggcacaagctctccttagccatcagtgcttcccatttgattttacacattgactgcaataaaatttatgaaagggtagtagaaaagccctccacagacttgcctctaggcacaacattttggctaggacagagaaataatgcgcatggatattttaagggtataatgcaagatgtccaattacttgtcatgccccagggatttattgctcagtgcccagatcttaatcgcacctgtccaacttgcaatgacttccatggacttgtgcagaaaatcatggagctacaggatattttagccaaaacatcagccaagctgtctcgagctgaacagcgaatgaatagattggatcagtgctattgtgaaaggacttgcaccatgaagggaaccacctaccgagaatttgagtcctggatagacggctgtaagaactgcacatgcctgaatggaaccatccagtgtgaaactctaatctgcccaaatcctgactgcccacttaagtcggctcttgcgtatgtggatggcaaatgctgtaaggaatgcaaatcgatatgccaatttcaaggacgaacctactttgaaggagaaagaaatacagtctattcctcttctggagtatgtgttctctatgagtgcaaggaccagaccatgaaacttgttgagagttcaggctgtccagctttggattgtccagagtctcatcagataaccttgtctcacagctgttgcaaagtttgtaaaggttatgacttttgttctgaaaggcataactgcatggagaattccatctgcagaaatctgaatgacagggctgtttgtagctgtcgagatggttttagggctcttcgagaggataatgcctactgtgaagacatcgatgagtgtgctgaagggcgccattactgtcgtgaaaatacaatgtgtgtcaacaccccgggttcttttatgtgcatctgcaaaactggatacatcagaattgatgattattcatgtacagaacatgatgagtgtatcacaaatcagcacaactgtgatgaaaatgctttatgcttcaacactgttggaggacacaactgtgtttgcaagccgggctatacagggaatggaacgacatgcaaagcattttgcaaagatggctgtaggaatggaggagcctgtattgccgctaatgtgtgtgcctgcccacaaggcttcactggacccagctgtgaaacggacattgatgaatgctctgatggttttgttcaatgtgacagtcgtgctaattgcattaacctgcctggatggtaccactgtgagtgcagagatggctaccatgacaatgggatgttttcaccaagtggagaatcgtgtgaagatattgatgagtgtgggaccgggaggcacagctgtgccaatgataccatttgcttcaatttggatggcggatatgattgtcgatgtcctcatggaaagaattgcacaggggactgcatccatgatggaaaagttaagcacaatggtcagatttgggtgttggaaaatgacaggtgctctgtgtgctcatgtcagaatggattcgttatgtgtcgacggatggtctgtgactgtgagaatcccacagttgatcttttttgctgccctgaatgtgacccaaggcttagtagtcagtgcctccatcaaaatggggaaactttgtataacagtggtgacacctgggtccagaattgtcaacagtgccgctgcttgcaaggggaagttgattgttggcccctgccttgcccagatgtggagtgtgaattcagcattctcccagagaatgagtgctgcccgcgctgtgtcacagacccttgccaggctgacaccatccgcaatgacatcaccaagacttgcctggacgaaatgaatgtggttcgcttcaccgggtcctcttggatcaaacatggcactgagtgtactctctgccagtgcaagaatggccacatctgttgctcagtggatccacagtgccttcaggaactgtgaagttaactgtctcatgggagatttctgttaaaagaatgttctttcattaaaagaccaaaaagaagttaaaacttaaattgggtgatttgtgggcagctaaatgcagctttgttaatagctgagtgaactttcaattatgaaatttgtggagcttgacaaaatcacaaaaggaaaattactggggcaaaattagacctcaagtctgcctctactgtgtctcacatcaccatgtagaagaatgggcgtacagtatataccgtgacatcctgaaccctggatagaaagcctgagcccattggatctgtgaaagcctctagcttcactggtgcagaaaattttcctctagatcagaatcttcaagaatcagttaggttcctcactgcaagaaataaaatgtcaggcagtgaatgaattatattttcagaagtaaagcaaagaagctataacatgttatgtacagtacactctgaaaagaaatctgaaacaagttattgtaatgataaaaataatgcacaggcatggttacttaatattttctaacaggaaaagtcatccctatttccttgttttactgcacttaatattatttggttgaatttgttcagtataagctcgttcttgtgcaaaattaaataaatatttctcttaccttataacac

SEQ ID NO: 2866 - DNA, 1678 bp, Homo Sapiens
  NM_006163
gcatatactgtcatcatcttggaaagaaaaggctgagaacgtaaaactgaggacagaggaggaaagcagggtgacccctgatgttgccctagaaaatggaaaacaaaacacagcaaaacagaaaaacagaagatctgactctgcctttagccaggaaaacagtttgggggagtaaaaagtattagggaaaagagtgggcattttgcctggaaaaaaggtttctagagccatctgggctttccgggaacctggaccagactctggcccagtaggatgtccccgtgtcctccccagcagagcaggaacagggtgatacagctgtccacttcagagctaggagagatggaactgacttggcaggagatcatgtccatcaccgagctgcagggtctgaatgctccaagtgagccatcatttgagccccaagccccagctccataccttggacctccaccacccacaacttactgcccctgctcaatccacccagattctggcttcccacttcctccaccaccttatgagctcccagcatccacatcccatgtcccagatcccccatactcctatggcaacatggccataccagtctccaagccactgagcctctcaggcctgctcagtgagccgctccaagaccccttagccctcctggacattgggctgccagcagggccacctaagccccaagaagacccagaatccgactcaggattatccctcaactatagcgatgctgaatctcttgagctggaggggacagaggctggtcggcggcgcagcgaatatgtagagatgtacccagtggagtacccctactcactcatgcccaactccttggcccactccaactataccttgccagctgctgagacccccttggccttagagccctcctcaggccctgtgcgggctaagcccactgcacggggggaggcagggagtcgggatgaacgtcgggccttggccatgaagattccttttcctacggacaagattgtcaacttgccggtagatgactttaatgagctattggcaaggtacccgctgacagagagccagctagcgctagtccgggacatccgacgacggggcaaaaacaaggtggcagcccagaactgccgcaagaggaagctggaaaccattgtgcagctggagcgggagctggagcggctgaccaatgaacgggagcggcttctcagggcccgcggggaggcagaccggaccctggaggtcatgcgccaacagctgacagagctgtaccgtgacattttccagcaccttcgggatgaatcaggcaacagctactctcctgaagagtacgcgctgcaacaggctgccgatgggaccatcttccttgtgccccgggggaccaagatggaggccacagactgagctggcccagaggggtggaactgctgatgggatttccttcattcccttctgataaaggtactccccaaccctgagtcccagaaggagctgagttctctagaccagaagaggatgacaatggcaacaagtgtttggaagttccaaggtgtgttcaaagaggcttgccttgagggagggctggaatctgtcttccctgactcggctcctcaggtctttagcctccaccttgtctaagctttggtctataaagtgcgctacagaaaaaaaaaaaaaaaaaaaaaaa

SEQ ID NO: 2867 - DNA, 2884 bp, Homo Sapiens
  NM_006164
aaatcagggaggcgcagctcctacaccaacgcctttccggggctccgggtgtgtttgttccaactgtttaaactgtttcaaagcgtccgaactccagcgaccttcgcaaacaactctttatctcgcgggcgagagcgctgcccttatttgcgggggagggcaaactgaacgccggcaccggggagctaacggagacctcctctaggtcccccgcctgctgggaccccagctggcagtcccttcccgcccccggaccgcgagcttcttgcgtcagccccggcgcgggtgggggattttcggaagctcagcccgcgcggccggcgggggaaggaagggcccggactcttgccccgcccttgtggggcgggaggcggagcggggcaggggcccgccggcgtgtagccgattaccgagtgccggggagcccggaggagccgccgacgcagccgccaccgccgccgccgccgccaccagagccgccctgtccgcgccgcgcctcggcagccggaacagggccgccgtcggggagccccaacacacggtccacagctcatcatgatggacttggagctgccgccgccgggactcccgtcccagcaggacatggatttgattgacatactttggaggcaagatatagatcttggagtaagtcgagaagtatttgacttcagtcagcgacggaaagagtatgagctggaaaaacagaaaaaacttgaaaaggaaagacaagaacaactccaaaaggagcaagagaaagcctttttcgctcagttacaactagatgaagagacaggtgaatttctcccaattcagccagcccagcacatccagtcagaaaccagtggatctgccaactactcccaggttgcccacattcccaaatcagatgctttgtactttgatgactgcatgcagcttttggcgcagacattcccgtttgtagatgacaatgaggtttcttcggctacgtttcagtcacttgttcctgatattcccggtcacatcgagagcccagtcttcattgctactaatcaggctcagtcacctgaaacttctgttgctcaggtagcccctgttgatttagacggtatgcaacaggacattgagcaagtttgggaggagctattatccattcctgagttacagtgtcttaatattgaaaatgacaagctggttgagactaccatggttccaagtccagaagccaaactgacagaagttgacaattatcatttttactcatctataccctcaatggaaaaagaagtaggtaactgtagtccacattttcttaatgcttttgaggattccttcagcagcatcctctccacagaagaccccaaccagttgacagtgaactcattaaattcagatgccacagtcaacacagattttggtgatgaattttattctgctttcatagctgagcccagtatcagcaacagcatgccctcacctgctactttaagccattcactctctgaacttctaaatgggcccattgatgtttctgatctatcactttgcaaagctttcaaccaaaaccaccctgaaagcacagcagaattcaatgattctgactccggcatttcactaaacacaagtcccagtgtggcatcaccagaacactcagtggaatcttccagctatggagacacactacttggcctcagtgattctgaagtggaagagctagatagtgcccctggaagtgtcaaacagaatggtcctaaaacaccagtacattcttctggggatatggtacaacccttgtcaccatctcaggggcagagcactcacgtgcatgatgcccaatgtgagaacacaccagagaaagaattgcctgtaagtcctggtcatcggaaaaccccattcacaaaagacaaacattcaagccgcttggaggctcatctcacaagagatgaacttagggcaaaagctctccatatcccattccctgtagaaaaaatcattaacctccctgttgttgacttcaacgaaatgatgtccaaagagcagttcaatgaagctcaacttgcattaattcgggatatacgtaggaggggtaagaataaagtggctgctcagaattgcagaaaaagaaaactggaaaatatagtagaactagagcaagatttagatcatttgaaagatgaaaaagaaaaattgctcaaagaaaaaggagaaaatgacaaaagccttcacctactgaaaaaacaactcagcaccttatatctcgaagttttcagcatgctacgtgatgaagatggaaaaccttattctcctagtgaatactccctgcagcaaacaagagatggcaatgttttccttgttcccaaaagtaagaagccagatgttaagaaaaactagatttaggaggatttgaccttttctgagctagtttttttgtactattatactaaaagctcctactgtgatgtgaaatgctcatactttataagtaattctatgcaaaatcatagccaaaactagtatagaaaataatacgaaactttaaaaagcattggagtgtcagtatgttgaatcagtagtttcactttaactgtaaacaatttcttaggacaccatttgggctagtttctgtgtaagtgtaaatactacaaaaacttatttatactgttcttatgtcatttgttatattcatagatttatatgatgatatgacatctggctaaaaagaaattattgcaaaactaaccactatgtacttttttataaatactgtatggacaaaaaatggcattttttatattaaattgtttagctctggcaaaaaaaaaaaattttaagagctggtactaataaaggattattatgactgttaaattaaaaaaaaaaaaaaaaaaaaaaaaaaaaaaaa

SEQ ID NO: 2868 - DNA, 1579 bp, Homo Sapiens
  NM_006169
gaggaggtgcttgccagacactgggtcatggcagtggtcggtgaagctgcagttgcctagggcagggatggagagagagtctgggcatgaggagagggtctcgggatgtttggctggactagattttacagaaagccttatccaggcttttaaaattactctttccagacttcatctgagactccttcttcagccaacattccttagccctgaatacatttcctatcctcatctttcccttcttttttttcctttcttttacatgtttaaatttaaaccattcttcgtgaccccttttcttgggagattcatggcaagaacgagaagaatgatggtgcttgttaggggatgtcctgtctctctgaactttggggtcctatgcattaaataattttcctgacgagctcaagtgctccctctggtctacaatccctggcggctggccttcatcccttgggcaagcattgcatacagctcatggccctccctctaccataccctccacccccgttcgcctaagctcccttctccgggaatttcatcatttcctagaacagccagaacatttgtggtctatttctctgttagtgtttaaccaaccatctgttctaaaagaagggctgaactgatggaaggaatgctgttagcctgagactcaggaagacaacttctgcagggtcactccctggcttctggaggaaagagaaggagggcagtgctccagtggtacagaagtgagacataatggaatcaggcttcacctccaaggacacctatctaagccattttaaccctcgggattacctagaaaaatattacaagtttggttctaggcactctgcagaaagccagattcttaagcaccttctgaaaaatcttttcaagatattctgcctagacggtgtgaagggagacctgctgattgacatcggctctggccccactatctatcagctcctctctgcttgtgaatcctttaaggagatcgtcgtcactgactactcagaccagaacctgcaggagctggagaagtggctgaagaaagagccagaggcctttgactggtccccagtggtgacctatgtgtgtgatcttgaagggaacagagtcaagggtccagagaaggaggagaagttgagacaggcggtcaagcaggtgctgaagtgtgatgtgactcagagccagccactgggggccgtccccttacccccggctgactgcgtgctcagcacactgtgtctggatgccgcctgcccagacctccccacctactgcagggcgctcaggaacctcggcagcctactgaagccagggggcttcctggtgatcatggatgcgctcaagagcagctactacatgattggtgagcagaagttctccagcctccccctgggccgggaggcagtagaggctgctgtgaaagaggctggctacacaatcgaatggtttgaggtgatctcgcaaagttattcttccaccatggccaacaacgaaggacttttctccctggtggcgaggaagctgagcagacccctgtgatgcctgtgacctcaattaaagcaattcctttgacctgtca

SEQ ID NO: 2869 - DNA, 2661 bp, Homo Sapiens
  NM_006170
gtgcgcctgcgtggaacgattctgtggcgagtgccggccgaaagctaggtccggattgcacgtggagggccgcccgaagggcactctcggacattaacccgcattctgtaccatggggcgcaagttggaccctacgaaggagaagcgggggccaggccgaaaggcccggaagcagaagggtgccgagacagaactcgtcagattcttgcctgcagtaagtgacgaaaattccaagaggctgtctagtcgtgctcgaaagagggcagccaagaggagattgggctctgttgaagcccctaagacaaataagtctcctgaggccaaaccattgcctggaaagctaccaaaaggagctgtccagacagctggtaagaagggaccccagtccctatttaatgctcctcgaggcaagaagcgcccagcacctggcagtgatgaggaagaggaggaggaagactctgaagaagatggtatggtgaaccacggggacctctggggctccgaggacgatgctgatacggtagatgactatggagctgactccaactctgaggatgaggaggaaggtgaagcgttgctgcccattgaaagagctgctcggaagcagaaggcccgggaagctgctgctgggatccagtggagtgaagaggagaccgaggacgaggaggaagagaaagaagtgacccctgagtcaggccccccaaaggtggaagaggcagatgggggcctgcagatcaatgtggatgaggaaccatttgtgctgccccctgctggggagatggagcaggatgcccaggctccagacctgcaacgagttcacaagcggatccaggatattgtgggaattctgcgtgattttggggctcagcgggaggaagggcggtctcgttctgaatacctgaaccggctcaagaaggatctggccatttactactcctatggagacttcctgcttggcaagctcatggacctcttccctctgtctgagctggtggagttcttagaagctaatgaggtgcctcggcccgtcaccctccggaccaataccttgaaaacccgacgccgagaccttgcacaggctctaatcaatcgtggggttaacctggatcccctgggcaagtggtcaaagactggactagtggtgtatgattcttctgtgcccattggtgctacccccgagtacctggctgggcactacatgctgcagggagcctccagcatgttgcccgtcatggccttggcaccccaggaacatgagcggatcctggacatgtgttgtgcccctggaggaaagaccagctacatggcccagctgatgaagaacacgggtgtgatccttgccaatgacgccaatgctgagcggctcaagagtgttgtgggcaacttgcatcggctgggagtcaccaacaccattatcagccactatgatgggcgccagttccccaaggtggtggggggctttgaccgagtactgctggatgctccctgcagtggcactggggtcatctccaaggatccagccgtgaagactaacaaggatgagaaggacatcctgcgctgtgctcacctccagaaggagttgctcctgagtgctattgactctgtcaatgcgacctccaagacaggaggctacctggtttactgcacctgttctatcacagtagaagagaatgagtgggtggtagactatgctctgaaaaagaggaatgtgcgactggtgcccacgggcctagactttggccaggaaggttttacccgctttcgagaaaggcgcttccaccccagtctgcgttctacccgacgcttctaccctcatacccacaatatggatgggttcttcattgccaagttcaagaaattttccaattctatccctcagtcccagacaggaaattctgaaacagccacacctacaaatgtagacttgcctcaggtcatccccaagtctgagaacagcagccagccagccaagaaagccaagggggctgcaaagacaaagcagcagctgcagaaacagcaacatcccaagaaggcctccttccagaagctgaatggcatctccaaaggggcagactcagaattgtccactgtaccttctgtcacaaagacccaagcttcctccagcttccaggatagcagtcagccagctggaaaagccgaagggatcagggagccaaaggtgactgggaagctaaagcaacgatcacctaaattacagtcctccaagaaagttgctttcctcaggcagaatgcccctcccaagggcacagacacacaaacaccggctgtgttatccccatccaagactcaggccaccctgaaacctaaggaccatcatcagccccttggaagggccaagggggttgagaagcagcagttgccagagcagccttttgagaaagctgccttccagaaacagaatgatacccccaaggggcctcagcctcccactgtgtctcccatccgttccagccgccccccaccagcaaagaggaagaaatctcagtccaggggcaacagccagctgctgctatcttagatggttgaaaactagacgggtggctcactgccattgtcaccaggttggaactcttgcctctgtgaggatgccttctctactgtgcatacccatgaaatttaatacacattttaaaacctctg

SEQ ID NO: 2870 - DNA, 3983 bp, Homo Sapiens
  NM_006178
ggttgcacgcctgcgcgagggcgggcggcgggggcgcgcgcgcggcgggggcgggctttgccgagcgcagagctgcagccgccgagccggacgtgtccgcgaagatggcgggccggagcatgcaagcggcaagatgtcctacagatgaattatctttaaccaattgtgcagttgtgaatgaaaaggatttccagtctggccagcatgtgattgtgaggacctctcccaatcacaggtacacatttacactgaagacacatccatcggtggttccagggagcattgcattcagtttacctcagagaaaatgggctgggctttctattgggcaagaaatagaagtctccttatatacatttgacaaagccaaacagtgtattggcacaatgaccatcgagattgatttcctgcagaaaaaaagcattgactccaacccttatgacaccgacaagatggcagcagaatttattcagcaattcaacaaccaggccttctcagtgggacaacagcttgtctttagcttcaatgaaaagctttttggcttactggtgaaggacattgaagccatggatcctagcatcctgaagggagagcctgcgacagggaaaaggcagaagattgaagtaggactggttgttggaaacagtcaagttgcatttgaaaaagcagaaaattcgtcacttaatcttattggcaaagctaaaaccaaggaaaatcgccaatcaattatcaatcctgactggaactttgaaaaaatgggaataggaggtctagacaaggaattttcagatattttccgacgagcatttgcttcccgagtatttcctccagagattgtggagcagatgggttgtaaacatgttaaaggcatcctgttatatggacccccaggttgtggtaagactctcttggctcgacagattggcaagatgttgaatgcaagagagcccaaagtggtcaatgggccagaaatccttaacaaatatgtgggagaatcagaggctaacattcgcaaactttttgctgatgctgaagaggagcaaaggaggcttggtgctaacagtggtttgcacatcatcatctttgatgaaattgatgccatctgcaagcagagagggagcatggctggtagcacgggagttcatgacactgttgtcaaccagttgctgtccaaaattgatggcgtggagcagctaaacaacatcctagtcattggaatgaccaatagaccagatctgatagatgaggctcttcttagacctggaagactggaagttaaaatggagataggcttgccagatgagaaaggccgactacagattcttcacatccacacagcaagaatgagagggcatcagttactctctgctgatgtagacattaaagaactggccgtggagaccaagaatttcagtggtgctgaattggagggtctggtgcgagcagcccagtccactgctatgaatagacacataaaggccagtactaaagtggaagtggacatggagaaagcagaaagcctgcaagtgacgagaggagacttccttgcttctttggagaatgatatcaaaccagcctttggcacaaaccaagaagattatgcaagttacattatgaacggtatcatcaaatggggtgacccagttactcgagttctagatgatggggagctgctggtgcagcagactaagaacagtgaccgcacaccattggtcagcgtgcttctggaaggccctcctcacagtgggaagactgctttagctgcaaaaattgcagaggaatccaacttcccgttcatcaagatctgttctcctgataaaatgattggcttttctgaaacagccaaatgtcaggccatgaagaagatctttgatgatgcgtacaaatcccagctcagttgtgtggttgtggatgacattgagagattgcttgattacgtccctattggccctcgattttcaaatcttgtattacaggctcttctcgttttactgaaaaaggcacctcctcagggccgcaagcttcttatcattgggaccactagccgcaaagatgtccttcaggagatggaaatgcttaacgctttcagcaccaccatccacgtgcccaacattgccacaggagagcagctgttggaagctttggagcttttgggcaacttcaaggataaggaacgcaccacaattgcacagcaagtcaaagggaagaaggtctggataggaatcaagaagttactaatgctgatcgagatgtccctacagatggatcctgaataccgtgtgagaaaattcttggccctcttaagagaagaaggagctagcccccttgattttgattgaaaatgaactatttgaaacacacagtgaccaagggaagtgaccaaggtgaagatggcctaggatcttcactgtcttactcaagatactggactaagtggaacgttctctaccttcaacatgtgctcgctctgcatgattagtgcaataaaactcccttccttatgcatactgagatagcttagtgtctcgtggaaggtgtcaatttggtttagaatgctgcgcttaccttcccatgcaggctaaagtgattccttcttgctcagtccctctgggtgggaaccatccagtacttgtggacactacacgtttcaacctctctactagcaccatcacccttgaaaactctcagtcagtgtcatgaatgttgcatgacaacagttggccgattagaaggcagactttctacatgcaaatctggcttagtaaatcgaggtgtgggccagagatcctctgacagctgtcctgagctaacactaaaagtcactgggtatttggttaaaggtctcccacaagactggtattctctttgcctgaagaaacaaggcattgaatctctaaaatgctgttctcaatcattgtcagagatgttttcaagttgcagtcagaagatctttcttaatagaaagtcagatgactaccgtgttggttgtgacttccccttaagtataactaatttgctctgtggtaagagatatgctcattattaccacttagaagatgttgttaaaaacatgtgaaagataggtatggaaaaagcatacacccccaaacagaaaggagttattaaagtaatttacaaacctctcagcactaattagtgtccaactccaagtgggtcaattccttagtataatattaaggcttactagtatcactgctttttccttagcttaatgacttacttagaatttatcctttattttaaatgatctgtactatctagtgtctaaaacactattctccagaaaaatcaatcattttctagccctctccctcagtcctttattgtccattccaatacattgaacacatttcctttaccctccacacacttcttccaaaaggaagcacccgttgagtccttttgagggtgatttgtcttacaactgactgacttagcaggaatttaattaggtcatatttggtgatgagacttatggagtgtgcctctctctcccaactgctgcttaaaatgcaaggacaagcaattagaagccatcctaaggtgcttacctcacacgccacccatgaggcttgtggccacagtggcacttgggtgtggctcctctgttatttgtcctcatgtgagaaagcagatcatctccaaatcttgccatttgtatacttttggtggagacttggatgtcatatcttctttgttttgggttttcttccctagcttattttgtggcttttaaagaagtggattgtattgtgagatcctgtgattcctggtggccagtatcctggattcctctaagatcttgcctctttcctcctcatgaaagcagcacacattgtgttaacttatgtctcttgttaaatgagcttaatgtctttgtgttttgtccaaaactgtattgaaaaaatattgtttaatgcaaatgaaggaatgcaataaagagtaaatatacttgaaaatgt

SEQ ID NO: 2871 - DNA, 2585 bp, Homo Sapiens
  NM_006184
gcggaagttatttttcccccggccggcagggagttgtagttatctttgaaagccttctctctcttttggcataggcgggaaatgtggcgtcaagaggctgggattccgagaaagaagcgaggctttcacgaaaatgcgagcggcttcggcaaggggcggggccgctggacgtggatgaaagctacagagccagcgtggaccaatcagacctctttggggcggggcctctgtggataagtgggcgtggtctaggggggaagtcaccaagaacgcaccggaggtccttgcccgccctggaaaacgccctctgcggtgaaggagagaccacactgccatgcctccctctgggccccgaggaaccctccttctgttgccgctgctgctgctgctcctgcttcgcgccgtgctggctgtccccctggagcgaggggcgcccaacaaggaggagacccctgcgactgagagtcccgacacaggcctgtactaccaccggtacctccaggaggtcatcgatgtactggagacggatgggcatttccgagagaagctgcaggctgccaatgcggaggacatcaagagcgggaagctgagccgagagctggactttgtcagccaccacgtccgcaccaagctggatgagctcaagcgacaggaggtgtcacggctgcggatgctgctcaaggccaagatggacgccgagcaggatcccaatgtacaggtggatcatctgaatctcctgaaacagtttgaacacctggaccctcagaaccagcatacattcgaggcccgcgacctggagctgctgatccagacggccacccgggaccttgcccagtacgacgcagcccatcatgaagagttcaagcgctacgagatgcttaaggaacacgagagacggcgttatctggagtcactgggagaggagcagagaaaggaggcggagaggaagctggaagagcaacagcgccggcaccgcgagcaccctaaagtcaacgtgcctggcagccaagcccagttgaaggaggtgtgggaggagctggatggactggaccccaacaggtttaaccccaagaccttcttcatactgcatgatatcaacagtgatggtgtcctggatgagcaggagctggaggcactcttcaccaaggagctggagaaagtgtacgacccaaagaatgaggaggacgacatgcgggagatggaggaggagcgactgcgcatgcgggagcatgtgatgaagaatgtggacaccaaccaggaccgcctcgtgaccctggaggagttcctcgcatccactcagaggaaggagtttggggacaccggggagggctgggagacagtggagatgcaccctgcctacaccgaggaagagctgaggcgctttgaagaggagctggctgcccgggaggcagagctgaatgccaaggcccagcgcctcagccaggagacagaggctctagggcggtcccagggccgcctggaggcccagaagagagagctgcagcaggctgtgctgcacatggagcagcggaagcagcagcagcagcagcagcaaggccacaaggccccggctgcccaccctgaggggcagctcaagttccacccagacacagacgatgtacctgtcccagctccagccggtgaccagaaggaggtggacacttcagaaaagaaacttctcgagcggctccctgaggttgaggtgccccagcatctgtgatcctccgggaccccagccctcaggattcctgatgctccaaggcgactgatgggcgctggatgaagtggcacagtcagcttccctgggggctggtgtcatgttgggctcctggggcgggggcacggcctggcatttcacgcattgctgccaccccaggtccacctgtctccactttcacagcctccaagtctgtggctcttcccttctgtcctccgaggggcttgccttctctcgtgtccagtgaggtgctcagtgatcggcttaacttagagaagcccgccccctccccttctccgtctgtcccaagagggtctgctctgagcctgcgttcctaggtggctcggcctcagctgcctgggttgtggccgccctagcatcctgtatgcccacagctactggaatccccgctgctgctccgggccaagcttctggttgattaatgagggcatggggtggtccctcaagaccttcccctaccttttgtggaaccagtgatgcctcaaagacagtgtcccctccacagctgggtgccaggggcaggggatcctcagtatagccggtgaaccctgataccaggagcctgggcctccctgaacccctggcttccagccatctcatcgccagcctcctcctggacctcttggcccccagccccttccccacacagccccagaagggtcccagagctgaccccactccaggacctaggcccagcccctcagcctcatctggagcccctgaagaccagtcccacccacctttctggcctcatctgacactgctccgcatcctgctgtgtgtcctgttccatgttccggttccatccaaatacactttctggaacaaatgcatggctccaaaaaaa

SEQ ID NO: 2872 - DNA, 7182 bp, Homo Sapiens
  NM_006185
gcgctggcgcgagcccacgaagaggtacgattccggagaatcgcgaggcagagcgggagcgcgcagccaggtggaaactaattctaagccagactgctggagatcaccctgttctagtgtgtggaggcttccaccaggaggcgcattggagtgactgtctggcatcaccaagatgacactccacgccacccggggggctgcactcctctcttgggtgaacagtctacacgtggctgaccctgtggaggctgtgctgcagctccaggactgcagcatcttcatcaagatcattgacagaatccatggcactgaagagggacagcaaatcttgaagcagccggtgtcagagagactggactttgtgtgcagttttctgcagaaaaatcgaaaacatccctcttccccagaatgcctggtatctgcacagaaggtgctagagggatcagagctggaactggcgaagatgaccatgctgctcttataccactctaccatgagctccaaaagtcccagggactgggaacagtttgaatataaaattcaggctgagttggctgtcattcttaaatttgtgctggaccatgaggacgggctaaaccttaatgaggacctagagaacttcctacagaaagctcctgtgccttctacctgttctagcacattccctgaagagctctccccacctagccaccaggccaagagggagattcgcttcctagagctacagaaggttgcctcctcttccagtgggaacaactttctctcaggttctccagcttctcccatgggtgatatcctgcagaccccacagttccagatgagacggctgaagaagcagcttgctgatgagagaagtaatagggatgagctggagctggagctagctgagaaccgcaagctcctcaccgagaaggatgcacagatagccatgatgcagcagcgcattgaccgcctagccctgctgaatgagaagcaggcggccagcccactggagcccaaggagcttgaggagctgcgtgacaagaatgagagccttaccatgcggctgcatgaaaccctgaagcagtgccaggacctgaagacagagaagagccagatggatcgcaaaatcaaccagctttcggaggagaatggagacctttcctttaagctgcgggagtttgccagtcatctgcagcagctacaggatgccctcaatgagctgacggaggagcacagcaaggccactcaggagtggctagagaagcaggcccagctggagaaggagctcagcgcagccctgcaggacaagaaatgccttgaagagaagaacgaaatccttcagggaaaactttcacagctggaagaacacttgtcccagctgcaggataacccaccccaggagaagggcgaggtgctgggtgatgtcttgcagctggaaaccttgaagcaagaggcagccactcttgctgcaaacaacacacagctccaagccagggtagagatgctggagactgagcgaggccagcaggaagccaagctgcttgctgagcggggccacttcgaagaagaaaagcagcagctgtctagcctgatcactgacctgcagagctccatctccaacctcagccaggccaaggaagagctggagcaggcctcccaggctcatggggcccggttgactgcccaggtggcctctctgacctctgagctcaccacactcaatgccaccatccagcaacaggatcaagaactggctggcctgaagcagcaggccaaagagaagcaggcccagctagcacagaccctccaacagcaagaacaggcctcccagggcctccgccaccaggtggagcagctaagcagtagcctgaagcagaaggagcagcagttgaaggaggtagcggagaagcaggaggcaactaggcaggaccatgcccagcaactggccactgctgcagaggagcgagaggcctccttaagggagcgggatgcggctctcaagcagctggaggcactggagaaggagaaggctgccaagctggagattctgcagcagcaacttcaggtggctaatgaagcccgggacagtgcccagacctcagtgacacaggcccagcgggagaaggcagagctgagccggaaggtggaggaactccaggcctgtgttgagacagcccgccaggaacagcatgaggcccaggcccaggttgcagagctagagttgcagctgcggtctgagcagcaaaaagcaactgagaaagaaagggtggcccaggagaaggaccagctccaggagcagctccaggccctcaaagagtccttgaaggtcaccaagggcagccttgaagaggagaagcgcagggctgcagatgccctggaagagcagcagcgttgtatctctgagctgaaggcagagacccgaagcctggtggagcagcataagcgggaacgaaaggagctggaagaagagagggctgggcgcaaggggctggaggctcgattacagcagcttggggaggcccatcaggctgagactgaagtcctgcggcgggagctggcagaggccatggctgcccagcacacagctgagagtgagtgtgagcagctcgtcaaagaagtagctgcctggcgtgagcggtatgaggatagccagcaagaggaggcacagtatggcgccatgttccaggaacagctgatgactttgaaggaggaatgtgagaaggcccgccaggagctgcaggaggcaaaggagaaggtggcaggcatagaatcccacagcgagctccagataagccggcagcagaacgaactagctgagctccatgccaacctggccagagcactccagcaggtccaagagaaggaagtcagggcccagaagcttgcagatgacctctccactctgcaggaaaagatggctgccaccagcaaagaggtggcccgcttggagaccttggtgcgcaaggcaggtgagcagcaggaaacagcctcccgggagttagtcaaggagcctgcgagggcaggagacagacagcccgagtggctggaagagcaacagggacgccagttctgcagcacacaggcagcgctgcaggctatggagcgggaggcagagcagatgggcaatgagctggaacggctgcgggccgcgctgatggagagccaggggcagcagcaggaggagcgtgggcagcaggaaagggaggtggcgcggctgacccaggagcggggccgtgcccaggctgaccttgccctggagaaggcggccagagcagagcttgagatgcggctgcagaacgccctcaacgagcagcgtgtggagttcgctaccctgcaagaggcactggctcatgccctgacggaaaaggaaggcaaggaccaggagttggccaagcttcgtggtctggaggcagcccagataaaagagctggaggaacttcggcaaaccgtgaagcaactgaaggaacagctggctaagaaagaaaaggagcacgcatctggctcaggagcccaatctgaggctgctggcaggacagagccaacaggccccaagctggaggcactgcgggcagaggtgagcaagctggaacagcaatgccagaagcagcaggagcaggctgacagcctggaacgcagcctcgaggctgagcgggcctcccgggctgagcgggacagtgctctggagactctgcagggccagttagaggagaaggcccaggagctagggcacagtcagagtgccttagcctcggcccaacgggagttggctgccttccgcaccaaggtacaagaccacagcaaggctgaagatgagtggaaggcccaggtggcccggggccggcaagaggctgagaggaaaaatagcctcatcagcagcttggaggaggaggtgtccatcctgaatcgccaggtcctggagaaggagggggagagcaaggagttgaagcggctggtgatggccgagtcagagaagagccagaagctggaggagaggctgcgcctgctgcaggcagagacagccagcaacagtgccagagctgcagaacgcagctctgctctgcgggaggaggtgcagagcctccgggaggaggctgagaaacagcgggtggcttcagagaacctgcggcaggagctgacctcacaggctgagcgtgcggaggagctgggccaagaattgaaggcgtggcaggagaagttcttccagaaagagcaggccctctccaccctgcagctcgagcacaccagcacacaggccctggtgagtgagctgctgccagctaagcacctctgccagcagctgcaggccgagcaggccgctgccgagaaacgccaccgtgaggagctggagcagagcaagcaggccgctgggggactgcgggcagagctgctgcgggcccagcgggagcttggggagctgattcctctgcggcagaaggtggcagagcaggagcgaacagctcagcagctgcgggcagagaaggccagctatgcagagcagctgagcatgctgaagaaggcgcatggcctgctggcagaggagaaccgggggctgggtgagcgggccaaccttggccggcagtttctggaagtggagttggaccaggcccgggagaagtatgtccaagagttggcagccgtacgtgctgatgctgagacccgtctggctgaggtgcagcgagaagcacagagcactgcccgggagctggaggtgatgactgccaagtatgagggtgccaaggtcaaggtcctggaggagaggcagcggttccaggaagagaggcagaaactcactgcccaggtggagcagctagaggtatttcagagagagcaaactaagcaggtggaagaactgagtaagaaactggctgactctgaccaagccagcaaggtgcagcagcagaagctgaaggctgtccaggctcagggaggcgagagccagcaggaggcccagcgcctccaggcccagctgaatgaactgcaagcccagttgagccagaaggagcaggcagctgagcactataagctgcagatggagaaagccaaaacacattatgatgccaagaagcagcagaaccaagagctgcaggagcagctgcggagcctggagcagctgcagaaggaaaacaaagagctgcgagctgaagctgaacggctgggccatgagctacagcaggctgggctgaagaccaaggaggctgaacagacctgccgccaccttactgcccaggtgcgcagcctggaggcacaggttgcccatgcagaccagcagcttcgagacctgggcaaattccaggtggcaactgatgctttaaagagccgtgagccccaggctaagccccagctggacttgagtattgacagcctggatctgagctgcgaggaggggaccccactcagtatcaccagcaagctgcctcgtacccagccagacggcaccagcgtccctggagaaccagcctcacctatctcccagcgcctgccccccaaggtagaatccctggagagtctctacttcactcccatccctgctcggagtcaggcccccctggagagcagcctggactccctgggagacgtcttcctggactcgggtcgtaagacccgctccgctcgtcggcgcaccacgcagatcatcaacatcaccatgaccaagaagctagatgtggaagagccagacagcgccaactcatcgttctacagcacgcggtctgctcctgcttcccaggctagcctgcgagccacctcctctactcagtctctagctcgcctgggttctcccgattatggcaactcagccctgctcagcttgcctggctaccgccccaccactcgcagttctgctcgtcgttcccaggccggggtgtccagtggggcccctccaggaaggaacagcttctacatgggcacttgccaggatgagcctgagcagctggatgactggaaccgcattgcagagctgcagcagcgcaatcgagtgtgccccccacatctgaagacctgctatcccctggagtccaggccttccctgagcctgggcaccatcacagatgaggagatgaaaactggagacccccaagagaccctgcgccgagccagcatgcagccaatccagatagccgagggcactggcatcaccacccggcagcagcgcaaacgggtctccctagagccccaccagggccctggaactcctgagtctaagaaggccaccagctgtttcccacgccccatgactccccgagaccgacatgaagggcgcaaacagagcactactgaggcccagaagaaagcagctccagcttctactaaacaggctgaccggcgccagtcgatggccttcagcatcctcaacacacccaagaagctagggaacagccttctgcggcggggagcctcaaagaaggccctgtccaaggcttcccccaacactcgcagtggaacccgccgttctccgcgcattgccaccaccacagccagcgccgccactgctgccgccattggtgccacccctcgagccaagggcaaggcaaagcactaaagggccagtaccagtgagtggccccacctgtgtccccgatgctgacctcacctggtcctccgcctactgtccctctcagtgccttctctcagctcccaggccaacagtagccaaacccctagagacagtgatgcctgcccgcaccctggcctggtccctggtccttcactggcgccttctcggagctggcccagggggcctggagcatggacagtgtgggcgctctccctaccttgcctccttttttcttaaagcaaagtcacttctccatcacaaccagatttgaggctggttttgatggctgggtccttgggcctggccagtcttcctcttagcctctggatctagaagggaccataagaggagtaggccctggttcctgctgtcctggtggctgggcccagcaggggccctcactcttgaagtccaggactgggtctgacctggtgggagcacctgccagaggatgctctttcccaggacggatgggccctatgtctcaggagtggggttgggggacagccttcagcagcagctcacaccctaccttccccagacttgcactggggtgggatttggagtgatgggaaggtttttaagggccggggatggatcttttctaaatgttattacttgtaaataaagtctatttttctcccgtg

SEQ ID NO: 2873 - DNA, 8788 bp, Homo Sapiens
  NM_006197
ctccagtctagctcgcattgcggctcccgcccgggcgagttctcgcccccgcgcggccgttgccgaggagacggcgcatgtcccgccgcgcgttgccccctctgcagtacccccgcccctcttctcccaccacaatgagatcctaagatggcggtggctgcggcggttggcgctgcgtagctgaggtcgaaaaggcggccactggggccgaggcagccaggaaacgtgtgggcctctctgctgcggtctccgagggccgaccgctgccggcggcgggtcgtgggggctgactgtcgctctgcctttgacaggagaggctgcttcttgtagaggaaacagctttgaagtgtggagcgggaaaggagcagtttctgagctgcaaaaactagtttctaaacagagagttaattgttaaatccagtatggccacaggaggaggtccctttgaagatggcatgaatgatcaggatttaccaaactggagtaatgagaatgttgatgacaggctcaacaatatggattggggtgcccaacagaagaaagcaaatagatcatcagaaaagaataagaaaaagtttggtgtagaaagtgataaaagagtaaccaatgatatttctccggagtcgtcaccaggagttggaaggcgaagaacaaagactccacatacgttcccacacagtagatacatgagtcagatgtctgtcccagagcaggcagaattagagaaactgaaacagcggataaacttcagtgatttagatcagagaagcattggaagtgattcccaaggtagagcaacagctgctaacaacaaacgtcagcttagtgaaaaccgaaagcccttcaactttttgcctatgcagattaatactaacaagagcaaagatgcatctacaagtcccccaaacagagaaacgattggatcagcacagtgtaaagagttgtttgcttctgctttaagtaatgacctcttgcaaaactgtcaggtgtctgaagaagatgggaggggagaacctgcaatggagagcagccagattgtaagcaggcttgttcaaattcgcgattatattactaaagctagttccatgcgggaagatcttgtagagaaaaatgagagatctgctaatgttgagcgccttactcatctaatagatcaccttaaagaacaagagaagtcatatatgaaatttcttaaaaaaatccttgccagagatcctcagcaggagcctatggaagagatagaaaatttgaagaaacaacatgatttattaaaaagaatgttacaacagcaggagcaactaagagctctacagggacggcaggctgcacttctagctctgcaacataaagcagagcaagctattgcagtgatggatgattctgttgttgcagaaactgcaggtagcttatctggcgtcagtatcacatctgaactaaatgaagaattgaatgacttaattcagcgttttcataatcagcttcgtgattctcagcctccagctgttccagacaatagaagacaggcagaaagtctttcattaactagggaggtttcccagagcaggaaaccatcagcttcagaacgtttacctgatgagaaagtcgaactttttagcaaaatgagagtgctacaggaaaagaaacaaaaaatggacaaattgcttggagaacttcatacacttcgagatcagcatcttaacaattcatcatcctctccacaaaggagtgtcgatcagagaagtacttcagctccctctgcttctgtaggcttggcaccggttgtcaatggagaatccaatagcctcacatcatctgttccttatcctactgcttctctagtatctcagaatgagagtgaaaacgaaggccacctcaatccatctgaaaaactccagaagttaaatgaagttcgaaagagattgaatgagctaagagaattagttcattattatgaacaaacgtcagacatgatgacagatgctgtgaatgaaaacaggaaagatgaagaaactgaagagtcagaatatgattctgagcatgaaaattccgagcctgttactaacattcgaaatccacaagtagcttccacttggaatgaagtaaatagtcatagtaatgcacagtgtgtttctaataatagagatgggcgaacagttaattctaattgtgaaattaacaacagatctgctgccaacataagggctctaaacatgcctccttctttagattgtcgatataatagagaaggggaacaggagattcatgttgcacaaggtgaagatgatgaggaggaggaggaagaagcagaagaggagggagtcagtggagcttcattatctagtcacaggagcagtctggttgatgagcatccagaagatgctgaatttgaacagaagatcaaccgacttatggctgcaaaacagaaacttagacagttacaagatcttgttgctatggtacaggatgatgatgcagctcaaggagttatctctgccagtgcatcaaatttggatgatttctacccagcagaagaagacaccaagcaaaattcaaataacactagaggaaatgccaataaaacacagaaagatactggagtaaatgaaaaggcaagagagaaattttatgaggctaaactacagcagcaacagagagagctaaaacaattgcaggaagaaagaaagaaactgattgacattcaggagaaaattcaagcattgcaaacggcatgccctgacttacagctgtcagctgctagtgtgggtaactgtcccaccaaaaaatatatgccagctgttacttcaaccccaactgttaatcaacacgagaccagtacaagcaaatctgtttttgagcctgaagattcttcaatagtagataatgagttgtggtcagaaatgagaagacatgaaatgttgagggaggagctgcgacagagaagaaagcagcttgaagctctgatggctgaacatcagaggaggcaaggtctagctgaaactgcatctccagtggctgtgtcattgagaagtgatggatctgagaacctatgtactcctcagcaaagtagaacagaaaaaacgatggcaacttggggagggtctacccagtgtgcactagatgaagaaggagatgaagacggttacctttctgaaggaattgttcggacagatgaagaggaggaagaagagcaagatgccagttccaatgataacttttctgtgtgtccttctaacagtgtgaatcataactcctacaatggaaaggaaactaaaaataggtggaagaacaattgccctttttcggcagatgaaaattatcgtcctttagccaagacaaggcaacagaatatcagcatgcaacggcaagaaaaccttcgttgggtgtcagagctctcttacgtagaagagaaagaacaatggcaagaacaaatcaatcagctaaagaaacagcttgattttagtgtcagtatttgtcagactttgatgcaagaccagcagactctatcttgtctgctacaaactcttctcacgggtccttacagtgttatgcccagcaatgttgcatctcctcaagtacacttcataatgcaccagttgaaccagtgctatactcagctaacatggcaacagaataatgttcagaggttgaaacaaatgctaaatgaacttatgcgccagcaaaatcagcatccagaaaaacctggaggcaaggaaagaggcagtagtgcatcgcaccctccttctcccagtttattttgtcctttcagctttccaacacagcctgtaaatctcttcaatatacctggatttactaacttttcatcatttgcaccaggtatgaatttcagccctttatttccttctaattttggagatttttctcagaatatctctacacccagtgaacagcagcaacccttagcccagaattcttcaggaaaaacagaatatatggcttttccaaaaccttttgaaagcagttcctctattggagcagagaaaccaaggaataaaaaactgcctgaagaggaggtggaaagcagtaggacaccatggttatatgaacaagaaggtgaagtagagaaaccatttatcaagactggattttcagtgtctgtagaaaaatctacaagtagtaaccgcaaaaatcaattagatacaaacggaagaagacgccagtttgatgaagaatcactggaaagctttagcagtatgcctgatccagtagatccaacaacagtgactaaaacattcaagacaagaaaagcgtctgcacaggccagcctggcatctaaagataaaactcccaagtcaaaaagtaagaagaggaattctactcagctgaaaagcagagttaaaaacatcaggtatgaaagtgccagtatgtctagcacatgtgaaccttgcaaaagtaggaacagacattcagcccagactgaagagcctgttcaagcaaaagtattcagcagaaagaatcatgagcaactggaaaaaataataaaatgtaataggtctacagaaatatcttcagaaactgggagtgatttttccatgtttgaagctttgcgagatactatttattctgaagtagctacattaatttctcaaaatgaatctcgtccacattttcttattgaactcttccatgagctgcagctactaaacacagactacttgagacagagggctttatatgcattgcaggacatagtatccagacatatttctgagagccatgaaaaaggagaaaatgtaaagtcagtaaactctggtacttggatagcatcaaactcagaacttactcctagtgagagccttgctactactgatgatgaaacttttgagaagaactttgaaagagaaacccataaaataagtgagcaaaatgatgctgataatgctagtgtcctgtctgtatcatcaaattttgagccttttgcaacagatgatctaggtaacaccgtgattcacttagatcaagcattagccagaatgagagaatatgagcgtatgaagactgaggctgaaagtaactcaaatatgagatgcacctgcaggattattgaggatggagatggtgctggtgcaggtactacagttaataatttagaagaaactcccgttattgaaaatcgtagttcacaacaacctgtaagtgaagtttctaccatcccatgtcctagaattgatactcagcagctggaccggcaaattaaagcaattatgaaagaagtcattccttttttgaaggagcacatggatgaagtatgctcctcgcagcttctaacttcagtaaggcgcatggttttgacccttacccagcaaaatgatgagagcaaagagtttgtaaagttctttcataaacaacttggaagtatattacaggattcactggcaaaatttgctggcagaaaactgaaagactgtggagaagatcttcttgtagagatatctgaagtgttgttcaatgaattggctttctttaagcttatgcaagatttggataataatagtataactgttaaacagagatgcaaaaggaaaatagaagcaactggagtgatacaatcttgtgccaaagaggctaaaaggattcttgaagatcatggctcacctgctggagagattgatgatgaagacaaagacaaggatgaaactgaaacagttaagcagactcaaacatctgaggtgtatgatggtcccaaaaatgtaagatctgatatttctgatcaagaggaagatgaagaaagtgaaggatgtccagtgtctattaatttgtctaaagctgaaactcaggctttaactaattatggaagtggagaagatgaaaatgaggatgaagaaatggaagaatttgaagaaggccctgtggatgtccagacttccctccaggctaacactgaagctactgaagaaaatgaacatgatgaacaggtcctacaacgtgactttaaaaagacagcagaaagcaaaaatgtcccattggaacgagaagccactagtaaaaatgaccaaaataactgtcctgtgaaaccctgttacctcaatatcttggaagatgagcaacctttaaatagtgctgcccataaggagtcacctcctactgttgattcaactcaacagcctaaccctttgccgttacgtttacctgaaatggaacccttagtgcctagagtcaaagaagttaaatctgctcaggaaactcctgaaagctctctggctggaagtcctgatactgaatctccagtgttagtgaatgactatgaagcagaatctggtaatataagtcaaaagtctgatgaagaagattttgtaaaagttgaagatttaccactgaaactgacaatatattcagaggcagatctaagaaagaaaatggtagaagaagaacagaaaaaccatttatctggtgaaatatgtgaaatgcagaccgaagaattagctggaaattctgagacactaaaagaacctgaaacggtgggagcccagagtatatgagatgtcttcagaggctcatctaactctgtccttacatactcaatgcatatatgaaaacaatactaaataaacatctgatctgtataaaaatgtaaattagtttgacactgcttttttgataggtgtggtcatttctccccatggtagtttaaaacatcagaaactgaattctggacagatttaagccttgacacactgtgtttttttttttttcccccttcttttttgggtcttcatttttttccccattgtgatgtttggtaacgaatttaaaatgtagttttaaataaagtttggacttatctataaagtatcttttttggaaattatattgaattctatacagcaagtcaatgttttatataactttaggctgctcagagaagagcaatggttaagagttagttagagaaatatattatttgttataaagcccatccattaggccagtcttccaactaatgccagtgttgctgctgttgggtctgatgttcttcttttagatacctgcaggtcctattcctgtgcaagaatagggcagattatcaagatatccaggatacctatgaagttattatagaatatttattaatccattgaaattggataataagtttagaacataggttctcagtatctagaacttacatcattatcatctgtttgttaggatttgaaattctggaaaatatttatctacatcgcctcagactaaaagtaaaaaaaataagctttatataattagggagatttctgcacagagaagtaacattgtggttaattttaaatgaaaaacttaactttttcaagtggggataaataatacaactaaatttctgtaatagtaagattctgtatgccttcagataaacttgcctattgagatggtaatttaaagccaaagcatagcagtttcttttgtgtgtagtgaggttgaagcagatttgcaggtgaagtattgaaagtttatgtgactttaagtcagcttttgaaaagtgattgatttgctttttatcccaaactgtccatatacccagtaaggcttcaaaaaaccagtcaacaatgagtaagtcaatcttatagattcttcttcctcgaataaaatacaaagaattagttccaataagtattttaactttgttaacaactgaaataccccataaaaaaagaacttgttgagagtatttctttaaaatggttacttgctgcccaggcaccatggctcactcctgtaatcccagcaccttgggaggccgaggcgggcagatcacgaggtcaagagattgagaccatcctgcccaacatgggggaaaccccgtctctactaaaaataaaaaaattagctgggagaggtggcacgtgcctgtagtcctagctacttgggaggctaaggcaggagaatagcctgaacccgggaggtggaggttgcaggttgcagtgagccgagatcatgccactgcactccagcctggcaacagagcgagactctgtctcaaaaaaaaaaaaaaaaaaaaaaaaaagttaacttgctgtatacctcagtgtaatgtccattcaaggagtattaaatgaggatttccctgcgaggacatttactgtattgctacttaaattatggaagacaatatatcttcaactttaataaaacctattcagaaaattaccaattcagaattcggagttcttatccaggtgctctaactaacttcagggaaattggaacaataagttatgttacatgcacactcaaattctttattttctccactttaagcaggaaagggtaaaaactgttttggtactcaagcccagccttacatactgtgtttctctctctgtctgcatgcatattaaagtggaaaaattgtatttatatcttagttattaccatagtacctatgaaccttatcaaaattgcttatttgactggtgttacagctgctattaatctaagtctattgtttttctattttagtagataatttagttttaaaatacgtagggtttgagagcagatatatttatttaatctgttttctctagtaactattgctgaagggttaggcattcagtattcctatttgtcctaattttgaagttaaaaattttggttacagatagatagagggagaaaagttcaaaatgagtgagagagaactttatgcaggttgagataatgcctaaaataatgagctggccagactgtggaggtactctttgtattttgtaacattgactttgggtaaatgctttttcactgttaataaatatatatcctgtatacaaaaaaa

SEQ ID NO: 2874 - DNA, 3369 bp, Homo Sapiens
  NM_006200
atttatgcagagcaggagctgctgccattgccactcagaatcctcgcgcgctgctcggagccggagggagcgctgggagcgagcaagcgagcgtttggagcccgggccagcagagggggcgcccggtcgctgcctgtaccgctcccgctggtcatctccgccgcgctcgggggccccgggaggagcgagaccgagtcggagagtccgggagccaagccgggcgaaacccaactgcggaggacgcccgccccactcagcctcctcctgcgtccgagccggggagcatcgccgagcgccccacgggccggagagctgggagcacaggtcccggcagccccagggatggtctaggagccggcgtaaggctcgctgctctgctccctgccggggctagccgcctcctgccgatcgcccggggctgcgagctgcggcggcccggggctgctcgccgggcggcgcaggccggagaagttagttgtgcgcgcccttagtgcgcggaaccagccagcgagcgagggagcagcgaggcgccgggaccatgggctgggggagccgctgctgctgcccgggacgtttggacctgctgtgcgtgctggcgctgctcgggggctgcctgctccccgtgtgtcggacgcgcgtctacaccaaccactgggcagtcaaaatcgccgggggcttcccggaggccaaccgtatcgccagcaagtacggattcatcaacataggacagataggggccctgaaggactactaccacttctaccatagcaggacgattaaaaggtcagttatctcgagcagagggacccacagtttcatttcaatggaaccaaaggtggaatggatccaacagcaagtggtaaaaaagcggacaaagagggattatgacttcagtcgtgcccagtctacctatttcaatgatcccaagtggcccagcatgtggtatatgcactgcagtgacaatacacatccctgccagtctgacatgaatatcgaaggagcctggaagagaggctacacgggaaagaacattgtggtcactatcctggatgacggaattgagagaacccatccagatctgatgcaaaactacgatgctctggcaagttgcgacgtgaatgggaatgacttggacccaatgcctcgttatgatgcaagcaacgagaacaagcatgggactcgctgtgctggagaagtggcagccgctgcaaacaattcgcactgcacagtcggaattgctttcaacgccaagatcggaggagtgcgaatgctggacggagatgtcacggacatggttgaagcaaaatcagttagcttcaacccccagcacgtgcacatttacagcgccagctggggcccggatgatgatggcaagactgtggacggaccagcccccctcacccggcaagcctttgaaaacggcgttagaatggggcggagaggcctcggctctgtgtttgtttgggcatctggaaatggtggaaggagcaaagaccactgctcctgtgatggctacaccaacagcatctacaccatctccatcagcagcactgcagaaagcggaaagaaaccttggtacctggaagagtgttcatccacgctggccacaacctacagcagcggggagtcctacgataagaaaatcatcactacagatctgaggcagcgttgcacggacaaccacactgggacgtcagcctcagcccccatggctgcaggcatcattgcgctggccctggaagccaatccgtttctgacctggagagacgtacagcatgttattgtcaggacttcccgtgcgggacatttgaacgctaatgactggaaaaccaatgctgctggttttaaggtgagccatctttatggatttggactgatggacgcagaagccatggtgatggaggcagagaagtggaccaccgttccccggcagcacgtgtgtgtggagagcacagaccgacaaatcaagacaatccgccctaacagtgcagtgcgctccatctacaaagcttcaggctgctcggataaccccaaccgccatgtcaactacctggagcacgtcgttgtgcgcatcaccatcacccaccccaggagaggagacctggccatctacctgacctcgccctctggaactaggtctcagcttttggccaacaggctatttgatcactccatggaaggattcaaaaactgggagttcatgaccattcattgctggggagaaagagctgctggtgactgggtccttgaagtttatgatactccctctcagctaaggaactttaagactccaggtaaattgaaagaatggtctttggtcctctacggcacctccgtgcagccatattcaccaaccaatgaatttccgaaagtggaacggttccgctatagccgagttgaagaccccacagacgactatggcacagaggattatgcaggtccctgcgaccctgagtgcagtgaggttggctgtgacgggccaggaccagaccactgcaatgactgtttgcactactactacaagctgaaaaacaataccaggatctgtgtctccagctgcccccctggccactaccacgccgacaagaagcgctgcaggaagtgtgcccccaactgtgagtcctgctttgggagccatggtgaccaatgcatgtcctgcaaatatggatactttctgaatgaagaaaccaacagctgtgttactcactgccctgatgggtcatatcaggataccaagaaaaatctttgccggaaatgcagtgaaaactgcaagacatgtactgaattccataactgtacagaatgtagggatgggttaagcctgcagggatcccggtgctctgtctcctgtgaagatggacggtatttcaacggccaggactgccagccctgccaccgcttctgcgccacttgtgctggggcaggagctgatgggtgcattaactgcacagagggctacttcatggaggatgggagatgcgtgcagagctgtagtatcagctattactttgaccactcttcagagaatggatacaaatcctgcaaaaaatgtgatatcagttgtttgacgtgcaatggcccaggattcaagaactgtacaagctgccctagtgggtatctcttagacttaggaatgtgtcaaatgggagccatttgcaaggatgcaacggaagagtcctgggcggaaggaggcttctgtatgcttgtgaaaaagaacaatctgtgccaacggaaggttcttcaacaactttgctgcaaaacatgtacatttcaaggctgagcagccatcttagatttctttgttcctgtagacttatagattattccatattattaaaaagaaaaaagccaaaaagaaaaaaaaaaaaa

SEQ ID NO: 2875 - DNA, 7783 bp, Homo Sapiens
  NM_006203
aatacttgttgcaataattgcccacgatagctgctcaaacaagagagttggaattcatctgtaaaaatcactacatgtaacgtaggagacaagaaaaatattaatgacagaagatctgcgaacatgatgcacgtgaataattttccctttagaaggcattcctggatatgttttgatgtggacaatggcacatctgcgggacggagtcccttggatcccatgaccagcccaggatccgggctaattctccaagcaaattttgtccacagtcaacgacgggagtccttcctgtatcgatccgacagcgattatgacctctctccaaagtctatgtcccggaactcctccattgccagtgatatacacggagatgacttgattgtgactccatttgctcaggtcttggccagtctgcgaactgtacgaaacaactttgctgcattaactaatttgcaagatcgagcacctagcaaaagatcacccatgtgcaaccaaccatccatcaacaaagccaccataacagaggaggcctaccagaaactggccagcgagaccctggaggagctggactggtgtctggaccagctagagaccctacagaccaggcactccgtcagtgagatggcctccaacaagtttaaaaggatgcttaatcgggagctcacccatctctctgaaatgagtcggtctggaaatcaagtgtcagagtttatatcaaacacattcttagataagcaacatgaagtggaaattccttctccaactcagaaggaaaaggagaaaaagaaaagaccaatgtctcagatcagtggagtcaagaaattgatgcacagctctagtctgactaattcaagtatcccaaggtttggagttaaaactgaacaagaagatgtccttgccaaggaactagaagatgtgaacaaatggggtcttcatgttttcagaatagcagagttgtctggtaaccggcccttgactgttatcatgcacaccatttttcaggaacgggatttattaaaaacatttaaaattccagtagatactttaattacatatcttatgactctcgaagaccattaccatgctgatgtggcctatcacaacaatatccatgctgcagatgttgtccagtctactcatgtgctattatctacacctgctttggaggctgtgtttacagatttggagattcttgcagcaatttttgccagtgcaatacatgatgtagatcatcctggtgtgtccaatcaatttctgatcaatacaaactctgaacttgccttgatgtacaatgattcctcagtcttagagaaccatcatttggctgtgggctttaaattgcttcaggaagaaaactgtgacattttccagaatttgaccaaaaaacaaagacaatctttaaggaaaatggtcattgacatcgtacttgcaacagatatgtcaaaacacatgaatctactggctgatttgaagactatggttgaaactaagaaagtgacaagctctggagttcttcttcttgataattattccgataggattcaggttcttcagaatatggtgcactgtgcagatctgagcaacccaacaaagcctctccagctgtaccgccagtggacggaccggataatggaggagttcttccgccaaggagaccgagagagggaacgtggcatggagataagccccatgtgtgacaagcacaatgcttccgtggaaaaatcacaggtgggcttcatagactatattgttcatcccctctgggagacatgggcagacctcgtccaccctgacgcccaggatattttggacactttggaggacaatcgtgaatggtaccagagcacaatccctcagagcccctctcctgcacctgatgacccagaggagggccggcagggtcaaactgagaaattccagtttgaactaactttagaggaagatggtgagtcagacacggaaaaggacagtggcagtcaagtggaagaagacactagctgcagtgactccaagactctttgtactcaagactcagagtctactgaaattccccttgatgaacaggttgaagaggaggcagtaggggaagaagaggaaagccagcctgaagcctgtgtcatagatgatcgttctcctgacacgtaacagtgcaaaaactttcatgccttttttttttttaagtagaaaaattgtttccaaagtgcatgtcacatgccacaaccacggtcacacctcactgtcatctgccaggacgtttgttgaacaaaactgaccttgactactcagtccagcgctcaggaatatcgtaaccagttttttcacctccatgtcatccgagcaaggtggacatcttcacgaacagcgtttttaacaagatttcagcttggtagagctgacaaagcagataaaatctactccaaattattttcaagagagtgtgactcatcaggcagcccaaaagtttattggacttggggtttctattcctttttatttgtttgcaatattttcagaagaaaggcattgcacagagtgaacttaatggacgaagcaacaaatatgtcaagaacaggacatagcacgaatctgttaccagtaggaggaggatgagccacagaaattgcataattttctaatttcaagtcttcctgatacatgactgaatagtgtggttcagtgagctgcactgacctctacattttgtatgatatgtaaaacagattttttgtagagcttacttttattattaaatgtattgaggtattatatttaaaaaaaactatgttcagaacttcatctgccactggttatttttttctaaggagtaacttgcaagttttcagtacaaatctgtgctacactggataaaaatctaatttatgaattttacttgcaccttatagttcatagcaattaactgatttgtagtgattcattgtttgttttatataccaatgacttccatattttaaaagagaaaaacaactttatgttgcaggaaaccctttttgtaagtctttattatttactttgcattttgtttcactctttccagataagcagagttgctcttcaccagtgtttttcttcatgtgcaaagtgactatttgttctataatacttttatgtgtgttatatcaaatgtgtcttaagcttcatgcaaactcagtcatcagttcgtgttgtctgaagcaagtgggagatatataaatacccagtagctaaaatggtcagtcttttttagatgttttcctacttagtatctcctaataacgttttgctgtgtcactagatgttcatttcacaagtgcatgtctttctaataatccacacatttcatgctctaataatccacacatttcatgctcatttttattgtttttacagccagttatagtaagaaaaaggtttttccccttgtgctgctttataatttagcgtgtgtctgaaccttatccatgtttgctagatgaggtcttgtcaaatatatcactaccattgtcaccggtgaaaagaaacaggtagttaagttagggttaacattcatttcaaccacgaggttgtatatcatgactagcttttactcttggtttacagagaaaagttaaacagccaactaggcagtttttaagaatattaacaatatattaacaaacaccaatacaactaatcctatttggttttaatgatttcaccatgggattaagaactatatcaggaacatccctgagaaacggttttaagtgtagcaactactcttccttaatggacagccacataacgtgtaggaagtcctttatcacttatcctcgatccataagcatatcttgcagaggggaactacttctttaaacacatggagggaaagaagatgatgccactggcaccagagggttagtactgtgatgcatcctaaaatatttattatattggtaaaaattctggttaaataaaaaattagagatcactcttggctgatttcagcaccaggaactgtattacagttttagagattaattcctagtgtttacctgattatagcagttggcatcatggggcatttaattctgactttatccccacgtcagccttaataaagtcttctttaccttctctatgaagactttaaagcccaaataatcatttttcacattgatattcaagaattgagatagatagaagccaaagtgggtatctgacaagtggaaaatcaaacgtttaagaagaattacaactctgaaaagcatttatatgtggaacttctcaaggagcctcctggggactggaaagtaagtcatcagccaggcaaatgactcatgctgaagagagtccccatttcagtcccctgagatctagctgatgcttagatcctttgaaataaaaattatgtctttataactctgatcttttacataaagcagaagaggaatcaactagttaattgcaaggtttctactctgtttcctctgtaaagatcagatggtaatctttcaaataagaaaaaaataaagacgtatgtttgaccaagtagtttcacaagaatatttgggaacttgtttcttttaattttatttgtccctgagtgaagtctagaaagaaaggtaaagagtctagagtttattcctctttccaaaacattctcattcctctcctccctacacttagtatttcccccacagagtgcctagaatcttaataatgaataaaataaaaagcagcaatatgtcattaacaaatccagacctgaaagggtaaagggtttataactgcactaataaagagaggctctttttttttcttccagtttgttggtttttaatggtaccgtgttgtaaagatacccactaatggacaatcaaattgcagaaaaggctcaatatccaagagacagggactaatgcactgtacaatctgcttatccttgcccttctctcttgccaaagtgtgcttcagaaatatatactgctttaaaaaagaataaaagaatatccttttacaagtggctttacatttcctaaaatgccataagaaaatgcaatatctgggtactgtatggggaaaaaaatgtccaagtttgtgtaaaaccagtgcatttcagcttgcaagttactgaacacaataatgctgttttaattttgttttatatcagttaaaattcacaataatgtagatagaacaaattacagacaaggaaagaaaaaacttgaatgaaatggattttacagaaagctttatgataatttttgaatgcattatttattttttgtgccatgcattttttttctcaccaaatgaccttacctgtaatacagtcttgtttgtctgtttacaaccatgtatttattgcaatgtacatactgtaatgttaattgtaaattatctgttcttattaaaacatcatcccatgatgggatggtgttgatatatttggaaactcttggtgagagaatgaatggtgtgtatacatactctgtacatttttcttttctcctgtaatatagtcttgtcaccttagagcttgtttatggaagattcaagaaaactataaaatacttaaagatatataaatttaaaaaaacatagctgcaggtctttggtcccagggctgtgccttaactttaaccaatattttcttctgttttgctgcatttgaaaggtaacagtggagctagggctgggcattttacatccaggcttttaattgattagaattctgccaataggtggattttacaaaaccacagacaacctctgaaagattctgagacccttttgagacagaagctcttaagtacttcttgccagggagcagcactgcatgtgtgatggttgtttgccatctgttgatcaggaactacttcagctacttgcatttgattatttcctttttttttttttttaactcggaaacacaactggggaaatatattctttcccagtgattataaacaatctttttcttttttttaagtccttttggcttctagagctcataggaaaatggacttgatttgaaattggagccagagtttactcgtgttggttatctattcatcagcttcctgacatgttaagagaatacattaaagagaaaatactgttttttaatcctaaaatttttcttccactaagataaaccaaatgtccttacatatatgtaaacccatctatttaaacgcaaaggtgggttgatgtcagtttacatagcagaaagcattcactatcctctaagatttgtttctgcaaaactttcattgctttagaattttaaaatttcaccttgtacaatggccagcccctaaagcaggaaacatttataatggattatatggaaacatcctcccagtacttgcccagcccttgaatcatgtggcttttcagtgaaaggaaagattctttttctaggaaaaatgagcctattttattttattttattttattttttgacacaaactgtagattttagcagccctggcccaaaggaatttgattacttttgttttaaacagtacaaaggggacactataattacaaaaacatccttaactgatttgagttgtttttatttctttggatatattttcagagtggtaaattgtgtgtgagaattacaaatgattattcttttagtggtttcttagcctctcttacagcccacggggatagtactgtacatcaataccttcatatgaaatttttatatgcaatgaaaataaaagcatgggttgattctgcctatttatgactcaatcttttacaaataaaagattattcattttaaattatagttcaatcagcatgtctcttaggatactgaacgtggttgaaatgaaaggatagtgacatcataagttagtactgatattcataaccaaataaagccaacttgagtaattttgctacattaaaaattaccaaaattacttagatggcctataagattaagcatggtgttttctaagcaagctttgaaaggggccttccatacttacttaattgaatattctgggatattgaaaattattcagatacttgacaattatttttggttacctactccgcaaactacaaagttttaaggactcaacaataagttaatgagacacagtgtttgctttcatggagcttacagtctggaggggacaaaggcttaaacaatactcatataattatatatgtgatcagtacaatgaaggagctcagtggggtaaataagcaggaacctgaacttgatctgttccggagggccacagaaggcttccttgaggccttgagaaagtgatttgcatctgagttctgaaggattgtaagaggtaactagggaaaaagttgacaggaagaggaaggggatccagacaagaaacatttgcaaagatcttgaggcataaatgagcttgagacatctggagaaactgaggaaaagtgagagagtaggcagggcctggagccgcagagccattgctaaccatcctgtgtgagatatcccccattctgtagctttattctcataaccctgctcaattttctttataacacttctcacagatttatatacgtgtttgtttttgttatctgtctctcccaccagaccacagctccatgagagcaaggtctttgcttaccaatatatcactagcacttaaaactatgcctggtacacagtaggttcttaatatgtgttgaatatagccatcaaattgatattggatataattcaatctgataagatattttgagatattaaagagtttttaacttgataccataaaaaaaaaaaaaaaaa

SEQ ID NO: 2876 - DNA, 7073 bp, Homo Sapiens
  NM_006212
ggtcccggccacaagctgtcggctcggttcggtcgcgttacagggcaggcgccggggccaaggcagggagggatcttaggagagatcgtaggacatctgaagagctgccatgtctggggcatcttcctcagaacagaacaacaacagctatgaaaccaaaaccccaaatcttcgaatgtcagagaagaaatgttcatgggcctcctacatgaccaactccccgactctgatcgttatgattggtttgccagcccggggtaaaacctacgtgtccaagaaactaacacgctacctcaactggattggagtccccaccaaagtgtttaatcttggggtgtatcggcgtgaagcagtcaagtcctataagtcctacgacttctttcggcatgacaatgaggaggccatgaagatccgcaaacagtgtgctctggtggcgctggaagatgttaaggcgtatctcactgaggagaatggtcagattgcggtgtttgatgccaccaatacaacccgggagaggagggacatgattttgaactttgctgaacagaattccttcaaggtattctttgtggaatccgtctgtgatgatcctgatgtcattgctgccaatattctggaggttaaggtatcaagccctgactatcctgaaaggaacagagagaacgtgatggaggacttcctgaagagaattgaatgctacaaagttacctaccgacctcttgacccagacaactatgacaaggatctttctttcatcaaggtgataaacgtgggccagcgatttttagtcaacagagtccaggactacatccagagcaagatagtctactacctcatgaatatccacgtccagcctcgcaccatttacctttgccggcatggagaaagcgagttcaatctcttggggaagattgggggtgactctggcctctcggtgcggggaaagcagtttgcccaagctctaaggaaatttctggaggaacaggaaataacagacctcaaagtgtggacaagccagttgaagaggaccatacagactgctgaatctctcggggtgccctatgagcagtggaagattctgaatgagattgatgctggtgtgtgtgaagagatgacctatgcagagattgagaaacggtacccagaagagtttgcacttcgagatcaagagaagtatctgtatcgatatcctggtggggagtcataccaggacctggtgcagcggctggagcctgtcatcatggagctggaacgtcagggcaatgtcctcgtcatctcccaccaggctgtcatgcgctgcctcctggcctacttcttggataagggcgcagatgagctaccatacttgagatgccctctccataccatcttcaaacttactcctgtggcctatgggtgcaaagtggaaacaattaaacttaacgtggaggctgtgaacacgcaccgtgacaagccaactaacaacttccccaagaaccaaacccctgtaaggatgagaaggaacagctttacgcctctgtccagttcgaatacaataaggcgtccaagaaattacagtgttgggagccggcccctcaagcccctcagccctctccgtgcccaggacatgcaagaaggggccgactagccgaagacccaagtcagcattccggtggtgtaactgtgtgtttccctccagccctggcctcctgcccttgtcactaatcaccaaggagtcattaacttcctccctctatgcccacccctgacacttcaccattaatcttaacacagaacatgaggttatgtgtttataggacaacttaagctgttcttcagtttgaaacatcttttcacccaggggcaagttagcaaattgagtcttttaggacagattctcagatgggatgatctggaggaggaggaaaaagatacactcccttggggctgagcatgccccacactcttggatcttctctctgttccctggtgtcttcactaatgtcctcatgttggtgaagtgttgggggatggagggcgggtgagcagtcgggggacaaaaagtctatttttccttcacttttgtctcttcaatgtgtgttttcctcacactccttacttgactgctttcttcccccactttcatgtcccctctggattgtccagtgtaatgcatggcattgtggtgtctgtctaggaaggaaggggtgattgacaagagacaagtctggcccagttaatgctttctgcagtgggtctaaatggatctggactggaggagtctttcctttcctttctcccttcctctccagccaggtcctgtaagggccagcccagactacaggacatccacagaatattctggagcttgcaagtagacatagggtgagagttcttgcctcctttcatgagaaacagttctaagtcttcgatgccctgggagaatctggctctgagcatgtgggaaatgtcttggtttttatttttaatttagagtcaggcctgggtcttttgaggtctgcagagtggggtttaggagagtagggtgggctctagctcttgcagggctcttagagagcagtcatgtcttttctcccatgactctcaggttctttgccaatcacagcaacttttcctgccaaagccagtatcctctggggctgtttagaagggcagttagattcaggagtcaccactgatgtttgagttgctcaaggcaagaggcagagaagagttcactaaaactgcttatttttgaataatttcagcacactgtccttaagaagaaagaaacatcaaaacaaaatagtttttacatgaccatttttttcccaaatgtggaaaagcttgatgatgaatttaatctctctcattggagtattcttttgttcataaagagaaactatctcatcttgatgtccagagaagtccttggaaccctgtgggatctagctcgtaactgtttgtatttctctattcacttctgtcatttcattttctttgtagggttaaacagaaaatgtttagggaagaaattcttagccccttgatgaccatgatggcttattctctttcccaattttgcatgcaaaatgtacgaatatatgtatgtttttctgagaggcaagtttagggttctcatgggattttaaaaagagataggtgactccccaccttaaagttatctgctggtcttttagaggtaaccagtgagaaggagttagctattttccaagggtgttttcatttggtaatggaagactttttgctgtggttctcatccaggagtattccttagaattgcctttaggattgttgaatcataaacatgcctgtgtccaccttatgcttaatactgactcagaatctctgggatctgggtctggacatgcatgtatttaagtagcttcccggatgattctgattcatagctcgggttaagaactccaccttaggaagttaggtggaaaaatactggatagtagtttctcagacaaaagtgtcagcctaggaattctgaattcctcatagtcctgaaaggacagttctttgggtttgatgtttgagcagatcataatgttaaatgatataaccccctggaaggcaggctgctgtgttttagagggttattctaggttctagtcccatctttaaccctttacattgctgagtgatgtggaacaaatcactgaattaaataattgtctctagagagcagctggggattttaagcaccctggagagaggtgcagaccctgccaggatgataaaggttgtcatcactggcaactgactcctgaccccgggtcctttactcgtatgtcccaagtaggataccataggcagcttctaaaggctgcttacctagattcttctcaaaattgtgtccaagatgttaagtaacctgctattcctgtttagtggttacataacatgtacttagtgtctttgtggagctttgggctggtaggggcagggataggggaaagctaaacagaagtagaagaaaaggtccttgtccagaggaaggttattttaagagacaggacatgtaatttataacaaatggacatttgcaatatagcaacagtctgagtctagaagtgttcaaccatcacatcgcttctcctgacttttctgttgtcctatggctatgagactacaggggttgggggatggggatgcccccaccaccaccagtgtgagaatgagatatggttggggaggcgtgtttggcacttttacaaggttgcattgtccacatttgcttggatggtggcatctgtagcccaaatgggcattcagtcttttcttctgctgtgaggtaagagtaattcagacctaatgaatgagaagagggagcactttgatccacagactttggattaacactgtacccactcttagcaaaaggggacttctctaacaagctagcattgtgttaacctgtcattaacccagcattagagacaggtcactgggatgttcattctggctctcagcctgctgttatttccccactctcacctgtgctagttcgctttctccagaagaggagctgaggtggtcttatcctcagataggacatgagaaattggaatttggcaagcaagggcttcagcatcctttagtttctaaagcaagatcccttcagagaagtctagcaggaagaagccaggagaatgtagaatggaaaagagctcttactccaaattttagagaagtttcagctctacttctcatcttttctctcctggtcttacttgaatgcatgttggtaatctgtatacattactatgactgtgtctatcacaagtcctacaaaataaaaatggacttaaaagtactctctgctgaggctgtaagttttgttttgtgagaaataggtaaagacattagcatttaatctactggaataagctggttgctgtggcttatacctgtagtcccagatacttgggaggctgaggcaggagaatcacttgagaccagcctgggcaatatagtgagacctcacctctaaaaaagttttttataaatttacttgtctaaagtggggaaagggaaattattctgttttcttattcttgcttcaagactatgacagatttgaaagagaattctaaagcagatttagagaacctgcttctcttcttatctcctaatccctaaattgtaatttagctcttatctgtattgttgttttgttttggtaaagggatgatttttacattgagttttaaagtagaataagaaaagcttctaaaaacttgcattgtgctagggatctgccctatatctttgcctctggtgtttcgttgttgttgttattgtttgtttgtttccaaagaagttggagttaaggacacaatatatttgtacccctagactgaatgggtgagtattccatatgaggatctgggtaatcctctttgcaacccacatttggtcttcagagacactggcattttgaagaaacatatgatatagctgtttggaaataaattcatctatgttactttttttttcttttttttttttttttatgagcaggagatcttaattgacagaaactcattggtggttggagtggccaatgggcacgggaaaaagtatccagtaatcagaagaattgtatctgggttatgtaatcttatgcacattccattgtctttgccaagcccagaagccatgttgtgttcattgttaagaaatttgatagatttacccagcttttctatgtattttgacttattgaaaatatgtaacaactgagtcgggttgcagcactggtggggtagaatcgactttccctgaaggtgacacagatgtcagaattgtgtccagggatttaatttagacccatactgtccaggagactgtctctagttggatctctgtgctgactgactgacagacagactttagtgtctgtgtgctgactgacagactctagtagtgtctatatgttgaccaactggtagaccaggaggatctgtgtgctgattgactctagtaggatctgtttgtcactgacagactgtagtagtgtctgtgtgctgactgatagatagactatagtaaaatttgggtgttgcctgactaacggtctagggtctgtaagctgacagtctgcctgctttctgattgtatccattgaagtgtatgtacattatggtaattctctgtctattaaatgtgtctaacaaaggaaggaattaagcactccacgtgttttctttataggggagttctgtacactatgattttaaatagatatttcttatatagtagtggccaaattctcattattttgtacaagataaaggttatgcatcacttttatggtattttgtgaactcagctaagggaatgcctgttcagagcctggagttgttacctttacttgaagtcatctcatccagtcccctgctttagggcaggacttcagttccactgttcatttctgaagcttctgtgtccccagcttaccctgttctgaaatgttgtattccattggacagggctgctatttttagtcagccatgcatttggattttacacttaatctagtaagtaaaaatgagaagaaaatttggcatttaaaaattgattttaagggttggcaaaagtattttttccagtaagcctttcactggatatctgtgaccaatgtttacctacgcaatgtttttgtatctgaattgcttatgtacgttttttattatattgacctaacaagaagatcaacttatgctggtatggtgatggttttgctatggcaaaatcaaagggctgatcatacatggtgccctttgggaagggggatggtgtggggctgagcacctctgggttgaatgggaatgggtcagattgggaagcctaggaagagagttctactgtagatttcctaggcactgctctgttgaaataggaacataagtctttagcaacattctgatttaatcgggtgacactgataacaaagtatgccactcagatccatttaaagtgtgcataactgtatttgaaatgtgtttttgtgtgcgtgtgtgtagaatgggtaaataaaattgttgagtaacttgaaccta

SEQ ID NO: 2877 - DNA, 1620 bp, Homo Sapiens
  NM_006214
agtccggggcggcgcctggaggcggagccgcccgctgggctaaatggggcagaggccgggaggggtgggggttccccgcgccgcagccatggagcagcttcgcgccgccgcccgtctgcagattgttctgggccacctcggccgcccctcggccggggctgtcgtagctcatcccacttcagggactatttcctctgccagtttccatcctcaacaattccagtatactctggataataacgttctaaccctggaacagagaaaattttatgaagaaaatgggtttctagtaatcaaaaatcttgtacctgatgccgatattcaacgctttcggaatgagtttgaaaaaatctgcagaaaggaggtgaaaccattaggattaacagtaatgagagatgtgaccatttcgaaatccgaatatgctccaagtgagaagatgatcacgaaggtccaggatttccaggaagataaggagctcttcagatactgcactctccccgagattctgaaatatgtggagtgcttcactggacctaatattatggccatgcacacaatgttgataaacaaacctccagattctggcaagaagacgtcccgtcaccccctgcaccaggacctgcactatttccccttcaggcccagcgatctcatcgtttgcgcctggacggcgatggagcacatcagccggaacaacggctgtctggttgtgctcccaggcacacacaagggctccctgaagccccacgattaccccaagtgggaggggggagttaacaaaatgttccacgggatccaggactacgaggaaaacaaggcccgggtgcacctggtgatggagaagggcgacactgttttcttccatcctttgctcatccacggatctggtcagaataaaacccagggattccggaaggcaatttcctgccatttcgccagtgccgattgccactacattgacgtgaagggcaccagtcaagaaaacatcgagaaggaagttgtaggaatagcacataaattctttggagctgaaaatagcgtgaacttgaaggatatttggatgtttcgagctcgacttgtgaaaggagaaagaaccaatctttgaaatagccatctgctataactctttcaacagaaaaccaaaaccaaacgaaatgtctaaggaaaatgttttcttaatgagatgatgtaaccttttctatcacttgttaaaagcagaaaacatgtatcaggtacttaattgcatagagttagttttgcagcacaatggtgttgctttaatggaaaaaaaaaacagtaaaagtgaaatattactgttttaaggaaaactaatttagggtggcagccaataaaggtggttggtgtctaatttaagtgttaaatcaatttctttcattcagttagctctttacccaagaagaagtgaatgatttggagcttagggtatgttttgtatcccctttctgataaacccattccctaccaattttatgtcataagagatttttttcccccaaatctagaacaatgtataatacattcacatctagtcaagggcataggaacggtgtcatggagtccaaataaagtggatattcctgctcggacaaaaaaaaaaaa

SEQ ID NO: 2878 - DNA, 3213 bp, Homo Sapiens
  NM_006219
atgtgcttcagtttcataatgcctcctgctatggcagacatccttgacatctgggcggtggattcacagatagcatctgatggctccatacctgtggatttccttttgcccactgggatttatatccagttggaggtacctcgggaagctaccatttcttatattaagcagatgttatggaagcaagttcacaattacccaatgttcaacctccttatggatattgactcctatatgtttgcatgtgtgaatcagactgctgtatatgaggagcttgaagatgaaacacgaagactctgtgatgtcagaccttttcttccagttctcaaattagtgacaagaagttgtgacccaggggaaaaattagactcaaaaattggagtccttataggaaaaggtctgcatgaatttgattccttgaaggatcctgaagtaaatgaatttcgaagaaaaatgcgcaaattcagcgaggaaaaaatcctgtcacttgtgggattgtcttggatggactggctaaaacaaacatatccaccagagcatgaaccatccatccctgaaaacttagaagataaactttatgggggaaagctcatcgtagctgttcattttgaaaactgccaggacgtgtttagctttcaagtgtctcctaatatgaatcctatcaaagtaaatgaattggcaatccaaaaacgtttgactattcatgggaaggaagatgaagttagcccctatgattatgtgttgcaagtcagcgggagagtagaatatgtttttggtgatcatccactaattcagttccagtatatccggaactgtgtgatgaacagagccctgccccattttatacttgtggaatgctgcaagatcaagaaaatgtatgaacaagaaatgattgccatagaggctgccataaatcgaaattcatctaatcttcctcttccattaccaccaaagaaaacacgaattatttctcatgtttgggaaaataacaaccctttccaaattgtcttggttaagggaaataaacttaacacagaggaaactgtaaaagttcatgtcagggctggtctttttcatggtactgagctcctgtgtaaaaccatcgtaagctcagaggtatcagggaaaaatgatcatatttggaatgaaccactggaatttgatattaatatttgtgacttaccaagaatggctcgattatgttttgctgtttatgcagttttggataaagtaaaaacgaagaaatcaacgaaaactattaatccctctaaatatcagaccatcaggaaagctggaaaagtgcattatcctgtagcgtgggtaaatacgatggtttttgactttaaaggacaattgagaactggagacataatattacacagctggtcttcatttcctgatgaactcgaagaaatgttgaatccaatgggaactgttcaaacaaatccatatactgaaaatgcaacagctttgcatgttaaatttccagagaataaaaaacaaccttattattaccctcccttcgataagattattgaaaaggcagctgagattgcaagcagtgatagtgctaatgtgtcaagtcgaggtggaaaaaagtttcttcctgtattgaaagaaatcttggacagggatcccttgtctcaactgtgtgaaaatgaaatggatcttatttggactttgcgacaagactgccgagagattttcccacaatcactgccaaaattactgctgtcaatcaagtggaataaacttgaggatgttgctcagcttcaggcgctgcttcagatttggcctaaactgcccccccgggaggccctagagcttctggatttcaactatccagaccagtacgttcgagaatatgctgtaggctgcctgcgacagatgagtgatgaagaactttctcaatatcttttacaactggtgcaagtgttaaaatatgagccttttcttgattgtgccctctctagattcctattagaaagagcacttggtaatcggaggatagggcagtttctattttggcatcttaggtcagaagtgcacattcctgctgtctcagtacaatttggtgtcatccttgaagcatactgccggggaagtgtggggcacatgaaagtgctttctaagcaggttgaagcactcaataagttaaaaactttaaatagtttaatcaaactgaatgccgtgaagttaaacagagccaaagggaaggaggccatgcatacctgtttaaaacagagtgcttaccgggaagccctctctgacctgcagtcacccctgaacccatgtgttatcctctcagaactctatgttgaaaagtgcaaatacatggattccaaaatgaagcctttgtggctggtatacaataacaaggtatttggtgaggattcagttggagtgatttttaaaaatggtgatgatttacgacaggatatgttgacactccaaatgttgcgcttgatggatttactctggaaagaagctggtttggatcttcggatgttgccttatggctgtttagcaacaggagatcgctctggcctcattgaagttgtgagcacctctgaaacaattgctgacattcagctgaacagtagcaatgtggctgctgcagcagccttcaacaaagatgcccttctgaactggcttaaagaatacaactctggggatgacctggaccgagccattgaggaatttacactgtcctgtgctggctactgtgtagcttcttatgtccttgggattggtgacagacatagtgacaacatcatggtcaaaaaaactggccagctcttccacattgactttggacatattcttggaaatttcaaatctaagtttggcattaaaagggagcgagtgccttttattcttacctatgatttcatccatgtcattcaacaaggaaaaacaggaaatacagaaaagtttggccggttccgccagtgttgtgaggatgcatatctgattttacgacggcatgggaatctcttcatcactctctttgcgctgatgttgactgcagggcttcctgaactcacatcagtcaaagatatacagtatcttaaggactctcttgcattagggaagagtgaagaagaagcactcaaacagtttaagcaaaaatttgatgaggcgctcagggaaagctggactactaaagtgaactggatggcccacacagttcggaaagactacagatcttaa

SEQ ID NO: 2879 - DNA, 1331 bp, Homo Sapiens
  NM_006223
aattgagatgcggctttcaggcatttgtttaggacatgcccatggcggggcttctaaaggggcttgtacggcaactggagcggttcagcgttcaacaacaagcttccaagatgccgcccaaaggaaaaagtggttctggaaaagcggggaaagggggagcagcctctgggagtgacagtgctgacaagaaggctcaaggtcccaaaggtggtggcaatgcagtaaaggtcagacacattctatgtgaaaaacatggcaaaatcatggaagccatggaaaagttaaagtctgggatgagattcaatgaagtggccgcacagtatagtgaagataaagccaggcaagggggtgacttgggttggatgaccagagggtccatggtgggaccatttcaagaagcagcatttgccttgcctgtaagtgggatggataagcctgtgtttacagacccaccggttaagacaaaatttggatatcatattattatggtcgaaggaagaaaataaaatcatatgaaagactgaataagttttatacattttgtttctttaaaaggtattacatattcttttgagctggagctgcaaggaaatacaaaaatttttaaaaagaaaagatattggatgctccttgtattctgtgaaagctctaagtatgggtttgtaggtgtaagagagggtggggctaagtgaatgtcaactgtagtaggtattcagtcagtctttctcaaagagaagtcaagcagactccctttaacctgtattctctttcctcccagaactatatctgactctcagtctgtcccataaattaattcagaaaccatcttcaggggaagcagatatcaactcacactattcacacaactgaaaatattgggcatcaaatagattagtgtgtgagaatcataaaataagttcctagacaacatttgttttacatgttagtcaactctgatcttccaggacaggtggtattagctccactgtcttaacatagtacgtggcacgttatgcctttcagtgttaactcctttctttttaaataaatgtttattggaggaaaaaagcactcagttgttccatgagttgttttgtactagactaaccgagtgctggttaaagggagggatgtcagcataaaaatgtcattccctcatcttcagtgtatgggttacattaagactgtcctttccagggccaatgttctgtgcatctaaatttttaaaatttaaaatgccatatttatgacatataaaaaagtataaagattactaatataaatactatactgcttcaaaaataaaactttgccaacacagctaaaaaaaa

SEQ ID NO: 2880 - DNA, 3660 bp, Homo Sapiens
  NM_006224
ttgccgcagagacgccccgcccccgcgcggcgctgcggaaccggagctccgggcggcgtcggcagcggcgcgagaggcgacgaggcccgggcggcaggagccggcgcggcgaccgcggcgagggcggcggggacggagcagagcacgacgaagacgcacaggcagccgggccgggccgggccacggggagagcggccggcgggcagcgggcgggaggccgggcgggccgcgggcagccaccgagccgcgaagcgacatggtgctgctcaaggagtatcgagtaatcctgcctgtgtctgtagatgagtatcaagtggggcagctgtattctgtggctgaggccagtaaaaatgaaacgggtggtggcgaaggcgtggaggtcctggtgaatgagccctacgagaaggacggtgagaaaggccagtacacacacaagatctaccacctgcagagcaaagtacccacgtttgttcgaatgctggccccagagggagccctgaatatacacgagaaagcctggaatgcttacccctactgcagaaccgttattacaaatgagtacatgaaagaagactttctgattaaaattgaaacctggcacaaaccagatcttggcacgcaggagaatgtgcataagctggagcctgaggcgtggaaacacgtggaagccgtatatatagacattgcagatcgaagccaagtgctcagcaaggattacaaggcagaggaagacccagcaaaatttaaatctatcaaaacaggccgaggacccttgggccccaattggaagcaagagcttgtaaaccagaaggactgcccatatatgtgtgcatacaaactggtgaccgtcaagttcaagtggtggggcctgcagaacaaagtggagaacttcatccataagcaagagaggcgtctgtttacaaacttccacaggcagctgttctgttggctcgataagtgggttgacctgaccatggacgacattcgaaggatggaagaagagacgaagagacagctggatgaaatgagacaaaaggacccagtgaaaggaatgacagcagatgactaaagccgcctttcccctctgcactttttgcaagacagtggtcaacaggaagacccagcagctccaccctcccaagtgacaggccattttcggacgcagccgttctgtgcccattcttcaggcaactttcgattccttactgtagctaattctagatgcccttcagtattgtgaacaaatagaccgtctggtgtcacagagcccgcgtgtgcaggagcctgctcctccgagatacgtggcgtgtaggttgctgtagttacagcgcctccgtctctctccattgtgttccgatccatttctgtgtgttcccccaacctttatttccaagtgacattttcagtctttcaaatagctgccttttgtgatgtggtgatttaaatgatttaagttcatttgttctcaaccttggggtaaactgaggtattttgcttcctgggaagatcttcgcaattttgagtgctcctgtggggagcggggatgagctaaagatacaatgtttccctgccccgcaccgcttccacaaaatagcaatgtggttttgcagctctgacttctgctcccagtaacccatcgttagggcactctagcactatggaggtacccaaggctcagccagtctctatttaagaaaatttaacaaatacgagtaaccctgtcccaatcactgaatctctagttactactcttagaaacacctgtggcttcttggccctcctgttgcccgctctgaatctctctgcagtctacaaaatcgccccagtcaactctccacttggagggaattgtccagtgtggcccctagaattgagtcaccccctagataccaactgtctgaccccgaggagctctgtaagtccctgctcctcctcttccctttggggctggtgctgccactcagcaataatcctcttttctctgtgctttcttaggtccctgtcctctgtctttgaggctggttaggaagcaagagtcctgatctttcatgctgcacaatatgagcatgcaaaaagctttttccagcagaacatgttccctcgtctccagttgccggaaaggaatttggggatcaagaacttagctcgtcctacccccatgttgagttctgccctggaaaacccaaagcaagtagtgatcatagtacagaacccgaccaaagtaggctggtgaggaagtccaggctccaggggaacagacgctgcccagtgttcatagcttcctgcaacttgacagagcctgagtttgcctcttagtgggagaatgagagagagctgtagtgtcacctgacattccccaaaccttgtgaagcacgttggcctaagtgtgccgtgatcccagcccacactagcctgggtgcatctgctaatgggagaccaaatctttgtccgggaagcaagaagtgggtgggagaatgtatcctgtttttgtcagtttgtttgccttactcatttctaagtgcaataagggagtgtctcacaggattgcacctgtgacatcctgatggatgcttccctgtggccctcctggggcaagggtggacagactcagacccccagcatggttagcgctgaccttcattgaggtccctttggaaccagatgtcttgttacagacaccttcctctgtgtaagtctcctcaccttgaggggtctttagtaatgcatctgggtagcatctcaactgctggtagcatttatctgacttggaaagttggagaagaggcattcctactggagaaaaatgtcagtgttttcctataagctctgtgttagctattcattatatttgtgcttaaagatgttccttcattcatcaactaggggaagtccagatgcgggttatcttgaaagaaacaaactgacattctaggcagacagttgtctatgtggtctgagggtcagcagctgttagtctccttcctttggctcttgagacccacacatatcactttagccctaacaagggctcctcccacctccacctgttgccccagttgaaaagcatccattatgagctgaggtcagcctggatctggaattgcagcccacataaacataaaggaggatgtccctggtctgttccatccccacggatggtgttgctgctgggcaacagtgttggcttcttttaagtaccccctttcctcctcacccacctccaaactgactagcactcagagggacttatgataaaggttcagctccaggggtagtacctgagtgtgtgccatgccccttcagaccagctgcttccatcagaattccagggtcacagccccaacagaagcagcagtgcctctgtaggaggggtgctgggctctggccttctcatgcagagaggtccgggacagggtcagtatcgtgggcatgtgtatagcttcccaagttcttttacagtccctgctgggactccctgacttactttggttggttcctagtgctacttgttttacaaactacactttgtagaattgattagattaccttgtttatttaatgtgagtttgtgcctttttgtctcaatcttccaatacaggtatattgagaaaaaaagcagtctaataaaatcctagacagaaaaaaaaaaaaaaaaaaaaa

SEQ ID NO: 2881 - DNA, 1245 bp, Homo Sapiens
  NM_006228
gccaggaaggcttgcaggttctgctgtttggttgctgaagggggtcagtgtgtgtatgtgtcatggaggtgggcagggaaggggagggctgtgcgtgggggagaggatatatatgctggtgtggctgagaaagcggaaccgagcctcgcatccatcggagggagccggggactgacagctctcagcacctgcttcctgctcctgcaccatgaaagtcctgctttgtgacctgctgctgctcagtctcttctccagtgtgttcagcagttgtcagagggactgtctcacatgccaggagaagctccacccagccctggacagcttcgacctggaggtgtgcatcctcgagtgtgaagagaaggtcttccccagccccctctggactccatgcaccaaggtcatggccaggagctcttggcagctcagccctgccgccccagagcatgtggcggctgctctctaccagccgagagcttcggagatgcagcatctgcggcgaatgccccgagtccggagcttgttccaggagcaggaagagcccgagcctggcatggaggaggctggtgagatggagcagaagcagctgcagaagagatttgggggcttcaccggggcccggaagtcggccaggaagttggccaatcagaagcggttcagtgagtttatgaggcaatacttggtcctgagcatgcagtccagccagcgccggcgcaccctgcaccagaatggtaatgtgtagccggaaggggcgctcctcccagctgtaccggccactgcaacccatgagcgtccaggtgatcccccaaacagcatgtgctcagccccagacctgccgcctgggaatcaggattccttcttccccaaggcactgagcgcctgcagatcccgcaggcttcgtttgcctccagaaccttcccgtctgattgttcctccccagccccctggcatgtttcaccacaaccctgttgctacatcagagtgtatttttgtaattcctctagctaccatttcaatagccccatctctcctgctcacccgcctcttgccccttctaggggcaggtgaaaggaataggaaattgaacctggggttttgacttgccactgccataacttgtttgtaaaagagctgttctttttgactgattgttttaaacaacgatttctccattaaacttctactgagcaaatggttaaaaaaaaaaaaaaaaaaaaaaaaaaaaaaaaaaaaaaaaaaaaaaaaaaa

SEQ ID NO: 2882 - DNA, 821 bp, Homo Sapiens
  NM_006232
tccggtcttgtccacgctagggggtgcacgtactcccaactgtggtcgcgctctcaccccttctgctgctctcgtggccccctcgcgatggcgggcatcctgtttgaggatattttcgatgtgaaggatattgacccggagggcaagaagtttgaccgagtgtctcgactgcattgtgagagtgaatctttcaagatggatctaatcttagatgtaaacattcaaatttaccctgtagacttgggtgacaagttccggttggtcatagctagtaccttgtatgaagatggtaccctggatgatggtgaatacaaccccactgatgataggccttccagggctgaccagtttgagtatgtaatgtatggaaaagtgtacaggattgagggagatgaaacttctactgaagcagcaacacgcctctctgcgtacgtgtcctatgggggcctgctcatgaggctgcagggggatgccaacaacctgcatggattcgaggtggactccagagtttatctcctgatgaagaagctagccttctgaacctcgcctgaagccagcctctctgccaagtcactcaggtcatgggcattgttcaagcctgagtggcagccgctcttgctcacctgttgaggaagggctggctcactgtccaccgtggcggcatctttaactggcctccactcaatgggaaactgactcgcctgtgaaagacacagtgggagagctgaaaatgaatcagaagctttatgtatatgatttttaaattaaactttactttttcagactgcccctcccctttttgtaaaaagtccatttactgt

SEQ ID NO: 2883 - DNA, 3749 bp, Homo Sapiens
  NM_006238
gcggagcgtgtgacgctgcggccgccgcggacctggggattaatgggaaaagttttggcaggagcgggagaattctgcggagcctgcgggacggcggcggtggcgccgtaggcagccgggacagtgttgtacagtgttttgggcatgcacgtgatactcacacagtggcttctgctcaccaacagatgaagacagatgcaccaacgaggctgatgggaaccaccctgtagaggtccatctgcgttcagacccagacgatgccagagctatgactgggcctgcaggtgtggcgccgaggggagatcagccatggagcagccacaggaggaagcccctgaggtccgggaagaggaggagaaagaggaagtggcagaggcagaaggagccccagagctcaatgggggaccacagcatgcacttccttccagcagctacacagacctctcccggagctcctcgccaccctcactgctggaccaactgcagatgggctgtgacggggcctcatgcggcagcctcaacatggagtgccgggtgtgcggggacaaggcatcgggcttccactacggtgttcatgcatgtgaggggtgcaagggcttcttccgtcgtacgatccgcatgaagctggagtacgagaagtgtgagcgcagctgcaagattcagaagaagaaccgcaacaagtgccagtactgccgcttccagaagtgcctggcactgggcatgtcacacaacgctatccgttttggtcggatgccggaggctgagaagaggaagctggtggcagggctgactgcaaacgaggggagccagtacaacccacaggtggccgacctgaaggccttctccaagcacatctacaatgcctacctgaaaaacttcaacatgaccaaaaagaaggcccgcagcatcctcaccggcaaagccagccacacggcgccctttgtgatccacgacatcgagacattgtggcaggcagagaaggggctggtgtggaagcagttggtgaatggcctgcctccctacaaggagatcagcgtgcacgtcttctaccgctgccagtgcaccacagtggagaccgtgcgggagctcactgagttcgccaagagcatccccagcttcagcagcctcttcctcaacgaccaggttacccttctcaagtatggcgtgcacgaggccatcttcgccatgctggcctctatcgtcaacaaggacgggctgctggtagccaacggcagtggctttgtcacccgtgagttcctgcgcagcctccgcaaacccttcagtgatatcattgagcctaagtttgaatttgctgtcaagttcaacgccctggaacttgatgacagtgacctggccctattcattgcggccatcattctgtgtggagaccggccaggcctcatgaacgttccacgggtggaggctatccaggacaccatcctgcgtgccctcgaattccacctgcaggccaaccaccctgatgcccagtacctcttccccaagctgctgcagaagatggctgacctgcggcaactggtcaccgagcacgcccagatgatgcagcggatcaagaagaccgaaaccgagacctcgctgcaccctctgctccaggagatctacaaggacatgtactaacggcggcacccaggcctccctgcagactccaatggggccagcactggaggggcccacccacatgacttttccattgaccagcccttgagcacccggcctggagcagcagagtcccacgatcgccctcagacacatgacacccacggcctctggctccctgtgccctctctcccgcttcctccagccagctctcttcctgtctttgttgtctccctctttctcagttcctctttcttttctaattcctgttgctctgtttcttcctttctgtaggtttctctcttcccttctcccttgccctccctttctctctccaccccccacgtctgtcctcctttcttattctgtgagatgttttgtattatttcaccagcagcatagaacaggacctctgcttttgcacaccttttccccaggagcagaagagagtggggcctgccctctgccccatcattgcacctgcaggcttaggtcctcacttctgtctcctgtcttcagagcaaaagacttgagccatccaaagaaacactaagctctctgggcctgggttccagggaaggctaagcatggcctggactgactgcagccccctatagtcatggggtccctgctgcaaaggacagtgggcaggaggccccaggctgagagccagatgcctccccaagactgtcattgcccctccgatgctgaggccacccactgacccaactgatcctgctccagcagcacacctcagccccactgacacccagtgtccttccatcttcacactggtttgccaggccaatgttgctgatggccccctgcactggccgctggacggcactctcccagcttggaagtaggcagggttccctccaggtgggcccccacctcactgaagaggagcaagtctcaagagaaggaggggggattggtggttggaggaagcagcacacccaattctgcccctaggactcggggtctgagtcctggggtcaggccagggagagctcggggcaggccttccgccagcactcccactgcccccctgcccagtagcagccgcccacattgtgtcagcatccagggccagggcctggcctcacatccccctgctcctttctctagctggctccacgggagttcaggccccactccccctgaagctgcccctccagcacacacacataagcactgaaatcactttacctgcaggctccatgcacctcccttccctccctgaggcaggtgagaacccagagagaggggcctgcaggtgagcaggcagggctgggccaggtctccggggaggcaggggtcctgcaggtcctggtgggtcagcccagcacctgctcccagtgggagcttcccgggataaactgagcctgttcattctgatgtccatttgtcccaatagctctactgccctccccttcccctttactcagcccagctggccacctagaagtctccctgcacagcctctagtgtccggggaccttgtgggaccagtcccacaccgctggtccctgccctcccctgctcccaggttgaggtgcgctcacctcagagcagggccaaagcacagctgggcatgccatgtctgagcggcgcagagccctccaggcctgcaggggcaaggggctggctggagtctcagagcacagaggtaggagaactggggttcaagcccaggcttcctgggtcctgcctggtcctccctcccaaggagccattctgtgtgtgactctgggtggaagtgcccagcccctgcccctacgggcgctgcagcctcccttccatgccccaggatcactctctgctggcaggattcttcccgctccccacctacccagctgatgggggttggggtgcttcctttcaggccaaggctatgaagggacagctgctgggacccacctccccctccccggccacatgccgcgtccctgccccgacccgggtctggtgctgaggatacagctcttctcagtgtctgaacaatctccaaaattgaaatgtatatttttgctaggagccccagcttcctgtgtttttaatataaatagtgtacacagactgacgaaactttaaataaatgggaattaaatatttaagagctgactggaaaa

SEQ ID NO: 2884 - DNA, 3475 bp, Homo Sapiens
  NM_006241
gaggaggtcggctttgttctcgccccgccctctccccgcctcctccctagatatcgcgagagggcgggtccgcttggcttcggcgtcgcgtcgctcctgcgctggagctctaggccggcgtctctccgcgagccgcgggtcaagtggcagtggctaagggtgcgcgagtagccgccacccgttcggcgttggctctggcgtcggggtcgttgtgtcgtgacaaccgctgcggtagccgtttccgaggcagcagttgcggccgctttagccctgagcgggatctgcggctgcctgcgagtctctgctgtgccgacccttctcttcgcggaccccacgccaagcagcgaccctgagccgacagccggagcgcccggcaatggcggcctcgacggcctcgcaccggcccatcaaggggatcttgaagaacaagacctctacgacttcctctatggtggcgtcggccgaacagccccgcgggaatgtcgacgaggagctgagcaaaaaatcccagaagtgggatgaaatgaacatcttggcgacgtatcatccagcagacaaagactatggtttaatgaaaatagatgaaccaagcactccttaccatagtatgatgggggatgatgaagatgcctgtagtgacaccgaggccactgaagccatggcgccagacatcttagccaggaaattagctgcagctgaaggcttggagccaaagtatcggattcaggaacaagaaagcagtggagaggaggatagtgacctctcacctgaagaacgagaaaaaaagcgacaatttgaaatgaaaaggaagcttcactacaatgaaggactcaatatcaaactagccagacaattaatttcaaaagacctacatgatgatgatgaagatgaagaaatgttagagactgcagatggagaaagcatgaatacggaagaatcaaatcaaggatctactccaagtgaccaacagcaaaacaaattacgaagttcatagacgagatttgttcaacactgcaattgtttgttagatgtaaaccctgtgactatagtacgttgcttcttgttcttcacaattcatgacttaagtaccaaaatgcataccagttattatatattgccaagaattaaatgataaacttagagactgattagactgaaaatgcctaatcgatatatatattcttgtgcctagtactttaccacaaatacagtgtaatatcatcagtccaaaactgcattacttttgtaaaaacactggttaatttgtataagatattatagagctttttatgctttagaagttaaacaatatctttgggggggaactaatttattttcatcacttgaaatgtggtagctcttacaaagtttattgatttgatttttttaaaaatcaaaagccaattgaacaacaggatatatagactgataaatatttaggctgaatagtattttaacacttgtcttcaacttgatttgtctgtttaattgaaaagaattataagagttactgttgcattttctgacctactatttttaaaattcctgttgagtttctttgtgtttacaaggaaaggactgaactttttctcatcaaaactagcttttttccccacaaataaattatcaggttaaactttcaccaatgtctgctctgttttttgtttttggggggttttttgtttgtttttgttttttaatgtttttggtacactgggcagacttcagagcagttttttaaaaaaataaatattctaatgtagctatctcgccattccctttaaatacctgtcttaacctcctgcttttctttcctactcctttccacacatacgcacacaatcttctaccttttaaaggatcattaagactgtcaccacattaggagctctttctctcactcttctgtcatttgctgctatgttgaaattcttattttgaccatcaatgcctatgaattcttctaatacgtgaagaaaatagtttgagtagcagcagtgctataggtgggaaatacagtttagctgctgaatttctatacctctctgatttacagattgctaattaaatggctattattagtttggattaattagacttaagaaaacaactaactgagggttttttttgtttgttttttgagggttttctttgcatgagagttgtatgtaaccagtgatatgattattcctgaatgtacagacagaagtaagcctggacattgttaaatagtccctgctttaagggactacgataatgtgtactatgacaaacgtgctttattcttctaacgcagtaagaattaggtggaattttttccttcaaccaagtgcaggaaagccctgtgtgtcttggtttagttatggtttcatttctagccatacaattgatgaattgtgtacaacttttgttagtaccaaaataatctgttatatgaacagacttctaaaataacgtctgtatattttatatatagatacatatatgaaagaaggcttttattgaacagcttatcttccacttgcaggtttatggaaacagcagtatttgaaaataaataaaaagtgggagaattccttgctgttagaagaatgtggccattattttgattttttgaatgagatatataatcaaagtactgctgaactgtgagtgcagtattctaaacatttcagctaggaataccactgatttagaaacaaaactgtttgtctctggtttctgaatttaaaatgttgggattacctgtttaaatctgtcttgggggatgtagagattaagtctgtacatgtgcgtgcacatatattcatgcaccctctgattttggttttcttgtttctgagttcttagaaagtacccacatactcttttttttttttttgtagaagtagctgtcatagagtgaagaaaaggataagactttaaacagttgattctttttgtgttttctacaaactattttttgaaatttaaatcacaaactcattttctggtttttagaaagtagatgatgatttcagaggagtaaggcatgccaagcagcatgctcagtggggttttaggctgtcacatgcagctgagaaaaggtatgttcaagtcataagtaggtaattgatagggtatgaactagtcaaaatatgaaccattatgattcaagttagattttcctctggagagacagatctgaatgttcagttctagccaaggtagattttactttcaactttttaatcagtatcactttctgtgcttaactatttggtgttaccttgtctgttttcatttgtctaaaattctgcagagatgactaaaatttgacataatggtgtaaatggattgttaaggtaactttcagttgaagattaaagcaagatgccattttccccatgactttggttttgtttacatttttccctttcagttagtatacactacacgtactgtaataaaatacaataatatgacaaaaaaaaaa

SEQ ID NO: 2885 - DNA, 3481 bp, Homo Sapiens
  NM_006242
aagtaacgccgcggaccgggaaagtgggaggggccgctcccggaacgcagccttcttgtaagaacctccaaggaagcaagaagaaaaaagaggcgctaccctgcgctcccgggaggcctctgaaagcttccactagagaaaaactccccactcttacaatttctttaaccgcaagaagcggaggacctggacaaggactcgaggagcaaggtggcgaaccaagggtagggcgcaccgggcccgagaggtcccccgcaggttgcagatacggtggactctctgcggcttctgagcacggagggagctgtcgcggggtcgggaggtcgtctctcatccctgcctcatcttccgacggccggcggggccatgtccagaggcccgagctccgcggtcctgcctagcgccctgggatcccggaagctcggcccccggagcctcagctgcctgtcggacctggacggcggcgtggccctggagccgcgggcctgtaggccccctgggagcccgggccgcgcgccgccgccaacgccagcgccgtcgggctgcgacccccgcctgcggcccatcatcctgcggcgggcgcgctcactgcccagctcccccgagcgccgccagaaggccgcgggcgcgccgggcgctgcgtgtcggccgggctgcagccagaagctccgcgtgcgcttcgccgacgccctgggcttggagctggcacaggtcaaggtgttcaacgcgggagacgacccgtccgtgccgctgcacgtgctgtcgcggctcgcaatcaactcggacctgtgctgcagcagccaggacctggagttcaccctgcattgcctggtgcccgatttcccgccgcccgtcgaggccgccgactttggcgagcgcctgcagcggcagctcgtgtgcctggagcgtgtcacttgctcggaccttggcatcagcggtacggtgcgcgtgtgcaacgtggccttcgagaagcaggtggctgtgcgctacactttctcgggctggcgcagtacccacgaggcggtggcgcggtggcgcgggcccgcaggccccgagggcacggaggacgttttcaccttcggctttccagtaccgcccttcctgctggagctcggctcccgcgtgcacttcgcggtgcgctaccaagtggcgggtgccgagtactgggacaacaacgaccaccgagactacagcctcacatgtcgcaaccacgcgctgcacatgcctcgcggggagtgcgaagagagctggatccacttcatctgagccgcgcggggaccggccacctggagcctccacacctaagctgcgcctcctgtcatttccctgctgggctctcacatctatctggttgttcttcaccaccctccaagtcctctgacctaattttctgctgcaaggtcccctggcagtggcccatcctgtcttctacttgaaacgtctgagtcacttggtctaaaaagtagcctcaggtggccagaaggccgagttgtgtaatgagttggggcagggtggtggggtaggtgcatgggagggtgggccctctggggaggcccaagcagcttgttttgcaaaggcccaagtcctcctgctaggaaaagcttttgcatgtgtcctgaatgtgtctctgtaaacatagctgttatttattattgtgatgttgggacctttagcccatagcggatgcctcctcaggaatattctcgatttaataagctaaaaaaaaaaagttctgtgtttgtgcccacagtaaacagaatgtacagtgtgacccacatcgtggtccctccaggcattcctgccccaggataaggaaaacctgagcccacatctgattgccaacggctgtagccttctaacagtgggaaactattaataggcaagaaatttctgctttatcagtcatcacacaaccattcctgggcattgagactgtcctggttaggctgtgtgtctcctacattaacagctggggaggagggaaaagcttcagacttttaaactagcaaaacagttatttctctgcattcacaattctgatttcatgtatttctctgtacatgtttgatcattatcaggccattctgtttaagtttgaaactaagcattttaagaagtcttgcctcagttatttcagttttcaggtgactagagaatttcaggcaacagtgccctttgcaattacctttttgatgattaaggtgactatttttatttcttgttaagcatcagaagatgtcagcattcatcttttgggagtccagttacaaggtggaactagaaggtgttttcagcaatagccagagcactggaggaaaaataattgacaaatatttatacttttaaattgttttgaactgtatttacatacatcatgttttatcaggtacccaccaactttatactttctgccttcagatagagtttctaacattttctagtttgtcagttttaaaatataaaattcttttatgtttttaaaccgtcaaccaagaagtcaagaccactgtcccctgctgagttaggcaatcacttaaaactccaaagaactccaggctgaggagttcttttggtgctgaacagtggtctgacaacaggtgctagaattaaggtgtgggaaaaaaaaaaaaacagccaggaaggacaagatctccaatttgtgaagcttatgatacagctgaaaccagtctgatcaattttatgctacctgtcaccaagaaattaactctaaatttttgaatgcttgttggcatctgtcaaatcaatactgaaaggatgcatttcggcttttaaccagtttggttctgatcattgcaacctctgtgcttttataattcaaagaacaaggatagctttcttcggtatcttttaatataagaacactgaattttggcttgaaatattgtgactaaattgcacaatctctggctattagcactgttcactacattaacatgcaagagagagagaagccttgttacatttcctgctatttaacaaactgtccaattaggtcagcaagcctgttagggccttcactgctacgcccctggccccaaaacagagagcaagacagttgtccagagaatttagatatgagttaagagctgccagatttattttaaggcatgtagagaatctcataatctatgtgaaagtcacttgccaaaaaggttttggttatgaaagtgaatgttatatatttaatattaagtgaacctcccgtgccttttaaaaaataccaacattatgaaatttaaaagcttaaatatatttgcctagttgataaagaggctgtggaacaactgaaggagaactttcagaccctaaaacagttatattacttagatgttaaaattttctagtgggctgtgcaattgctgggttgtccccccaaacatattttaatatgttatttaaaatgattttacccaagcctaagtattaaagtatatgtgcaaaaacaaaaaaaaaaaaaaaa

SEQ ID NO: 2886 - DNA, 3135 bp, Homo Sapiens
  NM_006243
cgcagagggccggggctacggggcagcgccccgggcgatgaggggccggcgttgaccgggaagagcgggcaccgcggcagtggctccgaggggacccgcgatggcagcgccctgagaggaggctccaggcagggcgggctgcgctggcagcggccgctgaggtgctggccggccggctggctggcgacgggggcagaagcgacgagaggcgcgctcggcacccgcacccccgtgcccccgcctcagttgtctaaacttcgggctctcttccacccgctctgcgcgcccagagtcaacaacttcttcacccccctccgcccccgcccttccctccgtcagccccgggagctcgccgcgcgccggggaccaggaacctccagcgctgagatgtggccgtgaggcgttggcgggcggcgaggagaagctcggcggcgtcccggggccggagggccgtggggccggggcgcaggggcgcgagcaccccgcgcctctcccccgcctcctcctgccgtctccgccgctgcccgtgccttgcaagcagcagccggagctgccaagcgtcagggccgcggagatgtcgtcgtcgtcgccgccggcgggggctgccagcgccgccatctcggcctcggagaaagtggacggcttcacccggaaatcggtccgcaaggcgcagaggcagaagcgctcccagggctcgtcgcagtttcgcagccagggcagccaggcagagctgcacccgctgccccagctcaaagatgccacttcaaatgaacaacaagagcttttctgtcagaagttgcagcagtgttgtatactgtttgatttcatggactctgtttcagacttgaagagcaaagaaattaaaagagcaacactgaatgaactggttgagtatgtttcaactaatcgtggtgtaattgttgaatcagcgtattctgatatagtaaaaatgatcagtgctaacatcttccgtacacttcctccaagtgataatccagattttgatccagaagaggatgaacccacgcttgaggcctcttggcctcacatacagttggtatatgaattcttcttgagatttttggagagccctgatttccagcctagcattgcaaaacgatacattgatcagaaattcgtacaacagctcctggagctttttgatagtgaagatcccagagaacgtgacttcctgaagactgttctgcaccgaatttatgggaaatttcttggattaagagcattcatcagaaaacaaattaacaacattttcctcaggtttatatatgaaacagaacatttcaatggtgttgctgaacttcttgaaatattaggaagtattatcaatggctttgcattgccactgaaagcagaacataaacaatttctaatgaaggttcttattcctatgcatactgcaaaaggattagctttgtttcatgctcagctagcatattgtgttgtacagttcctggagaaagatacaacactaacagagccagtgatcagaggactgctgaaattttggccaaaaacctgcagtcagaaagaggtgatgtttttaggagaaattgaagaaatcttagatgtcattgaaccaacacagttcaaaaaaattgaagagccacttttcaagcagatatccaagtgtgtatccagttctcattttcaggttgcagaaagggcattgtacttctggaataacgaatatattcttagtttgattgaggagaacattgataaaattctgccaattatgtttgccagtttgtacaaaatttccaaagaacactggaatccgaccattgtagcactggtatacaatgtgctgaaaaccctaatggaaatgaatggcaagcttttcgatgaccttactagctcatacaaagctgaaagacagagagagaaaaagaaggaattggaacgtgaagaattatggaaaaaattagaggagctaaagctaaagaaagctctagaaaaacagaatagtgcttacaacatgcacagtattctcagcaatacaagtgccgaataaaaaaaaagcctcccacctctgccggataggcagagttttgtatgcttttttgaaatatgtaaaaattacaaaacaaacctcatcagtataatataattaaaaggccaattttttctggcaactgtaaatggaaaaatatatggactaaacgtagccctgtgctgtatcatggccatagtatattgtaacctttgtctaatcattggatttattgtgtcacttctgaagtttcacagaaatgaatgaattttatcatctatgatatgagtgagataattatgggagtggtaagaattatgacttgaattcttctttgattgtgttgcacatagatatggtagtctgctctgtatatttttcccttttataatgtgcttttcacactgctgcaaaccttagttacatcctaggaaaaaatacttcctaaaataaaactaaggtatcatccttacccttctctttgtctcacccagaaatatgatggggggaattacctgccctaacccctccctcaataaatacattactgtactctggaatttaggcaaaaccttaaatctccaggctttttaaagcacaaaatataaataaaagctgggaaagtaaaccaaaattcttcagattgttcctcatgaatatcccccttcctctgcaattctccagagtggtaacagatgggtagaggcagctcaggtgaattacccagcttgcctctcaattcattcctcctcttcctctcaaaggctgaaggcagggcctttccagtcctcacaacctgtccttcacctagtccctcctgacccagggatggaggctttgagtcccacagtgtggtgatacagagcactagttgtcactgcctggctttatttaaaggaactgcagtaggcttcctctgtagagctctgaaaaggttgactatatagaggtcttgtatgtttttacttggtcaagtatttctcacatcttttgttatcagagtaccattccaatctcttaacttgcagttgtgtggaaaactgttttgtaatgaaagatcttcattgggggattgagcagcatttaataaagtctatgtttgtattttgccttaaaaaaaa

SEQ ID NO: 2887 - DNA, 2766 bp, Homo Sapiens
  NM_006244
ggtggggggaggtgacttgatgtcatcctgagcagctgggcggcgggtgccggtgcgcacggagccgagccggggctcccgttgcgctgcaccgcgttgggtcggagtcccaggacttcagcggagatccgcgcgctgcgacggccggtgcagagcccgccgagcgcccagtcccggcccggggctgagttgggggcatgctctagccgcccccccggagcccgggagagaacccaggagcgccgccgcccagccccagcgccccgagcggaaccgctgcgaaggggccctgaacggccgtcgccctccctacgggcagcccccgggggttggcgaccgaagtctaggttttcgagaaagccagggtgggaaccctaactggactcttcgggacccccaggaaggatctgaggcctgagccatcctcctttctaccctgtctgccccccaggactgggcagttgcaggaggccctgggggggggcccaggactgtggttgtgccccccccccaaaggccggacaggatgggaccaagttagtctgtccagtctcacccagcacctcccaggcccagagagaacccccggggctctgaaagcttgccctgccgcctgaccgccatggagacgaagctgccccctgcaagcacccccactagcccctcctcccccgggctgtcgcctgtgcccccacccgacaaggtggacggcttctcccgccgttccctccgcagagcccggccccgccgctcccacagctcctctcagttccgctatcagagcaaccagcaagagctcacaccgctgcccctgctcaaagatgtgccggcttccgagctgcacgagctgctgagccggaagctggcccagtgtggggtgatgtttgacttcttggactgtgtggccgacctcaaggggaaggaggtgaagcgggcagccctcaacgagctggtggagtgtgtggggagcacccggggtgtcctcatcgagcccgtctacccagacatcatccgcatgatctcagtgaatatcttccggactctgccgcccagtgagaaccctgaatttgaccctgaagaggatgagcccaatcttgagccttcgtggccacacctgcagctggtatatgagtttttcctgcgtttcttggagagcccagacttccagccctccgtggccaagagatatgtggatcaaaagtttgtcctgatgctcctggagctatttgatagtgaggatccccgggagcgtgagtacctcaagaccatcctgcaccgggtctatggcaagttcctgggtctccgggcctacatccgcaaacagtgcaaccacatcttcctccggttcatctatgaattcgagcacttcaatggtgtggctgagctgctggagatcctaggaagcatcatcaatggctttgcgctgcccctgaagacggagcacaagcagttcctggttcgcgtcctgatccccctgcactctgtcaagtcgctgtctgtcttccatgcccagctggcatactgtgtggtgcagttcctggagaaggatgccactctgacagagcacgtgatccgggggctgctcaaatactggccaaaaacctgcacccagaaggaggtgatgtttctgggggagatggaagagattcttgatgtcatcgagccctcccagtttgtgaagatccaggagcccctttttaagcaggtggctcgctgtgtttccagcccccatttccaggttgcagagcgggctctgtatttctggaacaatgagtatatcctaagcctcattgaggacaactgccacactgtgctgcctgctgtgtttgggaccctctaccaagtctccaaggagcactggaaccaaaccatcgtatcactgatctacaatgtgctcaagaccttcatggagatgaatgggaagctgtttgatgagctcacagcctcctacaagctggaaaagcagcaggagcagcagaaggcccaggagcgtcaggagttatggcaaggtctggaggagctgcggctacgccggctacaggggacccagggggccaaggaggcccccctccagcggcttacaccccaggtggccgccagtgggggtcagagctagacagcacctcagaaggggaaaagctaaacccagagctgtcagtccctctatcccttctcctgtccaggggcccagagagaaacacacctacccctggccttgccagagtggcttctgaggactccctgcccagcccagctttcactggggggagacgaggagaggcaatggtggtcttggcaacagaatgctcagcccctcgtggcaggacttgacaagggcaagcttgaccaggaagctgccatcagggatcttcccctgccccgcaaagctaggctccagctgcaggcgggctcccaccctctgctcctggccttgggcaagggcactcagcgcctcgcctgcccctgccttggccaatgcgaggtccttccttatccccaccatggggtccatggtctatttattctcgcccagctcaccctctacacagacactgtcctgggtgcacactcctcccttccctcgctgtgtacttccttgtcccctttttatttattgggcagggggagggggagggcacaggcaagaagagattcacagtgtcctggggtaagggggggttcacagtaatcatggtctactcctctttccgtggctgggggtagacttaataaagagagaaattcaagaaaaaaaaaaaaaaaaaa

SEQ ID NO: 2888 - DNA, 3366 bp, Homo Sapiens
  NM_006246
ggttgcgcgtgtgccatggactcagccgcccggtgatattgacaataggagagagaaaggggcattgactgggacccaccgcgggtagcgaaaggtggctctggcagcggcggctccagctcctgcggctcctcctccttattctgtccccttctcttgctgccgctgcagatccagtcttcctccctcccttccccccctccccacgtcgtcgccgccgccgccgggtccggggcaacgagctgaggcgccgcccgccaggaatgtgagcgaggagccaccggcggagccgcaacggggtcggtgccgatttgatgggacgggcccgcgggggaggatcgtgaggccgccgccgccaccggaacgctgaggttcgggtccggccgtgaggcctagaggctccgccgccgcggaaccggagggaccccgtaccggacagccgtcgccccaggctccccgcagctgcccggacctccccctgcacgtcccggtcccgccgcccgcccccgctgcggccacctcgcccgtctcccgcccctccaagccacagatcatctttggattcttccccagaagcttcaagtagggatatgtcctcagcaccaactactcctccatcagtggataaagtagacggattttctcggaagtccgtcagaaaagccagacagaagaggtcgcaaagttcctcacagtttaggtctcaaggcaagcctattgagttaacacctctgccgctgctaaaagacgttccatcctcagagcagcctgaactgttcctaaagaaacttcagcagtgctgtgtcatttttgacttcatggacacgctatctgatcttaaaatgaaagaatacaagcgctccactcttaatgaactggtggactacattacaataagcagaggctgtttgacagagcagacttaccctgaagtagttagaatggtatcttgcaatatattcagaactctccctcctagtgacagcaatgaatttgatccagaagaagatgaacctacccttgaggcatcgtggccacacttacagcttgtatatgaatttttcatacgatttttggaaagccaagaattccaacccagcattgccaaaaaatatatagatcagaaatttgtattacagcttctggagctatttgacagcgaagaccctcgggaacgggactacttaaaaacagtcttacacagaatttatggcaagtttcttggtcttagagcatttatccgaaaacagattaacaatatttttctaaggtttgtttatgaaacagaacacttcaatggtgtagctgaactgctggaaatattaggaagtattatcaatggctttgctttacctcttaaggcagaacacaaacagtttctggtgaaagtattgatccctttacacactgtcaggagcttatcactcttccatgcacagctggcatattgtatagtacagtttctggagaaagatccttcactcacagaaccagttattagggggttaatgaaattttggcctaaaacatgtagtcaaaaagaggtcatgttccttggggaactggaagaaatattggatgtgattgaaccttcacaatttgttaaaatccaagaacctttgtttaaacaaatcgccaagtgtgtatctagcccccattttcaggtggcagaaagagcactctattattggaataatgaatacatcatgagtttgatagaagaaaactctaacgtcatccttcccatcatgttttccagcctttataggatttcaaaagaacattggaatccggctattgtggcgttggtgtacaatgtgttgaaggcatttatggaaatgaacagcaccatgtttgacgagctgacagccacatacaagtcagatcgtcagcgtgagaaaaagaaagaaaaggagcgtgaagaattgtggaaaaaattggaggatctggagttaaagagaggtcttagacgtgatggaataattccaacttaacaaaaacaatgacaacaacattactaacctgtggagtcacacgtttatgtagtagaagatggagcaacagttttctgtattgtgcaactttacagtagatttcacctttgtttcattattacagcagcactgtatatacctgtctctaagtaaaggaaaaaacaaaataaggacttcaatccaaagtttggacagtagatggacttctcagaactttgcaaacataatcattgttctcaccctcttttaaaaaaaaaaatcggtcttcaaagatctgttgatgaaattgctatgttaaaattccattatcgggagttccttatttatcactagcagagagtatgatacaattttcaaatgtgaacaatcttaaatttagcttgtctttctgctaagctgttaaatgtatttatagtaaaggaagaaaaaaagactgtcatttccttataagtttgtgtaacatcctcctctggataacttgactgtaatttaacatctttttcttttgcacatcttcctgagttgaatgtccacgtggaatggggtcatgaattataaaagtccctgataaaagttttgtttactggggtgaacatctttccagtaaccaggtagtcctggtactcctttagttttaaaattaggagttaagagagaagaggtgataaacatagtagggaagggaatatcggattcatgcatcagtttatggtgaatccaaatcaatgtcttgaatcctttgaaaacaggcactgggacatcacaggcttcagtacctgaccagtattagttgcatatatcattgaacacacataccagagatgttttagaaatgtgagaaaaacatccttttggaccatttgaaataagaaagacaaacactaaacaatacaaccatgaaattgatcaccgggattgcaaatctaattgggaaaagagttgagcaaacagcttggactgtttggagttgttgccttactttttaatatgtatttataaagtattccagcaaaagaggatgtagcctctgggaaaaaacaaacatgttacagtgttttttgtagattctcgttctatatctcatcacagcgccagccctgtttttagccggaaaggattcaggataaacattattatgcattctgaattggatgcatattcctaactactgtatttgttaccaaaagtggttctacaaatgctactgaaaaaaatctggaaattcctaatgtcctgagtattaataataaagtttaaaaatgcttttatatcaaaggtgcatcgtgaccaaattgtttaagaaaaaaaaacaaaaaaaacaaaatctagggctgtattttatatatatatatatatatatatatatatatat

SEQ ID NO: 2889 - DNA, 5085 bp, Homo Sapiens
  NM_006251
agcgccatgcgcagactcagttcctggagaaagatggcgacagccgagaagcagaaacacgacgggcgggtgaagatcggccactacattctgggtgacacgctgggggtcggcaccttcggcaaagtgaaggttggcaaacatgaattgactgggcataaagtagctgtgaagatactcaatcgacagaagattcggagccttgatgtggtaggaaaaatccgcagagaaattcagaacctcaagcttttcaggcatcctcatataattaaactgtaccaggtcatcagtacaccatctgatattttcatggtgatggaatatgtctcaggaggagagctatttgattatatctgtaagaatggaaggctggatgaaaaagaaagtcggcgtctgttccaacagatcctttctggtgtggattattgtcacaggcatatggtggtccatagagatttgaaacctgaaaatgtcctgcttgatgcacacatgaatgcaaagatagctgattttggtctttcaaacatgatgtcagatggtgaatttttaagaacaagttgtggctcacccaactatgctgcaccagaagtaatttcaggaagattgtatgcaggcccagaggtagatatatggagcagtggggttattctctatgctttattatgtggaacccttccatttgatgatgaccatgtgccaactctttttaagaagatatgtgatgggatcttctatacccctcaatatttaaatccttctgtgattagccttttgaaacatatgctgcaggtggatcccatgaagagggccacaatcaaagatatcagggaacatgaatggtttaaacaggaccttccaaaatatctctttcctgaggatccatcatatagttcaaccatgattgatgatgaagccttaaaagaagtatgtgaaaagtttgagtgctcagaagaggaagttctcagctgtctttacaacagaaatcaccaggatcctttggcagttgcctaccatctcataatagataacaggagaataatgaatgaagccaaagatttctatttggcgacaagcccacctgattcttttcttgatgatcatcacctgactcggccccatcctgaaagagtaccattcttggttgctgaaacaccaagggcacgccatacccttgatgaattaaatccacagaaatccaaacaccaaggtgtaaggaaagcaaaatggcatttaggaattagaagtcaaagtcgaccaaatgatattatggcagaagtatgtagagcaatcaaacaattggattatgaatggaaggttgtaaacccatattatttgcgtgtacgaaggaagaatcctgtgacaagcacttactccaaaatgagtctacagttataccaagtggatagtagaacttatctactggatttccgtagtattgatgatgaaattacagaagccaaatcagggactgctactccacagagatcgggatcagttagcaactatcgatcttgccaaaggagtgattcagatgctgaggctcaaggaaaatcctcagaagtttctcttacctcatctgtgacctcacttgactcttctcctgttgacctaactccaagacctggaagtcacacaatagaattttttgagatgtgtgcaaatctaattaaaattcttgcacaataaacagaaaactttgcttatttcttttgcagcaataagcatgcataataagtcacagccaaatgcttccatttgtaatcaagttatacataattataaccgagggctggcgttttggaatgcaatttgcacagggattggaacatgatttatagttaaaagcctaatatgcagaaatgaattaagatcattttgttgttcattgtgcagtatgtatatagcataatatacacagtgaattataggtctcaggcttacttgatttttggctattttatatttagtgtacacagggctttgaaatattaatttacataaaggccttcatatattattacgtgttatatattacgtgttataaatttattcaataaatatttgcctagaattcccaagacctttataggtgattttgttttctgggctccttaacttcataaatagctagtatcttccagcagtagtaacagtctggataacttcttccatatccctccctctttgtttttttgagacagtgtcactttgtcacccaggctggagtgcaatggtgtggtctcggctcactgcaacctccacctcccgggttcaagtgattctcccgcctcagcttcctgagtagctggaactacaggcgtgtgccaccacacccggctaatttttcgtatttttagtgtagacggggtttcactatgttgcccaggctggtctcgaactcctgaccgcgtgatccaccacctcagcttcccaaagtggtgggattacaggcgtgagccaccgcacccggcctccatatcccccttttaaaattctgtagtgtatggtaagtcatatcagatatcagacctaatttaaatttcattttagctttacaagtccaaaaacacagaatttatatattcagatactctagcactaattttagtcttaaaatattcccacgatattctgtacacaaaatgttctttttgttacaagagctgagttgcatatactgtagataaatcatattatttttgccaatttcacaaattcctctggcccatcatgtcagtcattattgagtatatgcacacattgctacttatttgattatgtatcttttaaattgattcagtgcatagaaaactatctcttacaaactttaagtgctctgatatgacttcccccccaaattttattatgaacatttttaaaaacagaaaaattgaaaaactgtttggtaagcacatgtatatctaccatttagattcagcagttgttaatgttttgtcatttgttttctctatacctatatatgtatagatacagctagttatgcatatatatgcatatatgtgtttgtttgtgtatgtatatatgcttttttccccctgaaccatttggatgttacagacatacttatcaccgtgaaaatacttcaagtatctcctacagataatgacattctcctaaaaatccgtaataccattgtaaaagtaataattccccaatatcatctaatcaagccatatttaaatttctgaagttaactccaaatttctttatagctgattatttcaaactaggatccaattaaagtttacatatgacacttggttataactctttagttggatataacattattattattttgataaaatatggaacaaatcaattctattaataagtggtcacatttgttttgggcttaaattactttttaaagatactggattttcctaagatttctgatttacactgatatttttttttgtcattcttaattgcatcacacaatagatgtaaatgaagatgtagtcacctcagataaaattggtatcgtgtatgataatattgtatcatttatatttgccttatgttaactttaagaaattgatttttttgtattaatcattttcccattgcaacagagctatattttttctattttaagaatcatattttaggattatttttggcaaatacagtgagcacttatgtaaccagatgataatgaactcaaatgtcatgatagcttgcataaatggtgactctagtagatttgactcaagcacttctagaatcatgcactgaattcaaaagaaaaatcttgctgctttttgtccagggcttgttctattcaacttctaatttgaaagctgtacaaagtaatagaagttccatttaaatatgagttcaaaactgtatttactttttatgtggccctctctttaggggattctaattttacttagggtctctaagtgcagcataatgttcctgatgttaacagaagactgtatttttaaagttacaaatttgtatatggaattaagtaatggcgctatatacgctgttgtggggaggggggaagaaaaggaggaaccaattaaataggaccttttaaaaattgttaattttgtaaactttgcttctcttataagttattgtgattcattttagttactgtgttttattttgaaaatatttaaatattgcacttctataaatagtatgataaatgcacagacaattgcagtaaattcttttttaagctaggatatttgaaatgacaacctttggttaagtgtgtcaaggttgcaacagaattttcacaatttttttgttgtttgcaaattgttactaatattgaagaggtaagggaggcaatgcaaatgatttttaatctttttttattatcttttcagcagtttatattttttgtgactttatgcaaccatatttttactttgtcttgacaactgaaagatgtataaggttttttgccagaaatgtactgtatacatagttttaagtataacagattttactgatatgtaaaaattttgccattaaaataaatgatttctcactgagaggaacttttctaccaggttggggcatatgggagcttaatatatcatatctaatttaaaataatttcactgaaataaactccattgcttttacctaatttttttcttgagatgcttttgtagtttttcagagttttagatgattttatacaaaatcctctgcctagcactgctctttttgatgttgtagtgacaccatttacattgaattaatgcttggtagcctggggctagatgtggaactccatggatctgtgttctgactggcacctttggaatgaaagaaaagtgtgtgctgtccaaattttttccccttaattctttccctcatcttctcacccataatagaaattttatttccattgtgagttctgacaagaatgaaattccacatacaacataactgtaaattgttggtaggtagaagttaatatttgtggttcatgtatattttgaccagagtatatttaagtatataatttcagcttccttgatttagaaatatgatataataaagaaaaactccatttatcatctgtta

SEQ ID NO: 2890 - DNA, 2850 bp, Homo Sapiens
  NM_006254
tcgcacttccgtgtgccgcggcgccggagcccgaggcggctgtagcccacatctcccgagcgacccccggcgcccgcccgccgcgcggaggcccgggccacacctcactggccgcttggcccatcccagtcagcgccgcgccgaaccccgtccgcgcgcgccggggagcggcgcccccgccgctgccgccgcgacccttggcgcctgcccctgcaacgggaggtctgcagggaactggccaggcaagggggcaggcccgtttctcctggtggttggtgcgttgtagcagcagcgggagccaggactaaggacaagcaggagctgggagccccagccccactgcaggccccaccatggcgccgttcctgcgcatcgccttcaactcctatgagctgggctccctgcaggccgaggacgaggcgaaccagcccttctgtgccgtgaagatgaaggaggcgctcagcacagagcgtgggaaaacactggtgcagaagaagccgaccatgtatcctgagtggaagtcgacgttcgatgcccacatctatgaggggcgcgtcatccagattgtgctaatgcgggcagcagaggagccagtgtctgaggtgaccgtgggtgtgtcggtgctggccgagcgctgcaagaagaacaatggcaaggctgagttctggctggacctgcagcctcaggccaaggtgttgatgtctgttcagtatttcctggaggacgtggattgcaaacagtctatgcgcagtgaggacgaggccaagttcccaacgatgaaccgccgcggagccatcaaacaggccaaaatccactacatcaagaaccatgagtttatcgccaccttctttgggcaacccaccttctgttctgtgtgcaaagactttgtctggggcctcaacaagcaaggctacaaatgcaggcaatgtaacgctgccatccacaagaaatgcatcgacaagatcatcggcagatgcactggcaccgcggccaacagccgggacactatattccagaaagaacgcttcaacatcgacatgccgcaccgcttcaaggttcacaactacatgagccccaccttctgtgaccactgcggcagcctgctctggggactggtgaagcagggattaaagtgtgaagactgcggcatgaatgtgcaccataaatgccgggagaaggtggccaacctctgcggcatcaaccagaagcttttggctgaggccttgaaccaagtcacccagagagcctcccggagatcagactcagcctcctcagagcctgttgggatatatcagggtttcgagaagaagaccggagttgctggggaggacatgcaagacaacagtgggacctacggcaagatctgggagggcagcagcaagtgcaacatcaacaacttcatcttccacaaggtcctgggcaaaggcagcttcgggaaggtgctgcttggagagctgaagggcagaggagagtactttgccatcaaggccctcaagaaggatgtggtcctgatcgacgacgacgtggagtgcaccatggttgagaagcgggtgctgacacttgccgcagagaatccctttctcacccacctcatctgcaccttccagaccaaggaccacctgttctttgtgatggagttcctcaacgggggggacctgatgtaccacatccaggacaaaggccgctttgaactctaccgtgccacgttttatgccgctgagataatgtgtggactgcagtttctacacagcaagggcatcatttacagggacctcaaactggacaatgtgctgctggaccgggatggccacatcaagattgccgactttgggatgtgcaaagagaacatattcggggagagccgggccagcaccttctgcggcacccctgactatatcgcccctgagatcctacagggcctgaagtacacattctctgtggactggtggtctttcggggtccttctgtacgagatgctcattggccagtcccccttccatggtgatgatgaggatgaactcttcgagtccatccgtgtggacacgccacattatccccgctggatcaccaaggagtccaaggacatcctggagaagctctttgaaagggaaccaaccaagaggctgggagtgaccggaaacatcaaaatccaccccttcttcaagaccataaactggactctgctggaaaagcggaggttggagccacctttcaggcccaaagtgaagtcacccagagactacagtaactttgaccaggagttcctgaacgagaaggcgcgcctctcctacagcgacaagaacctcatcgactccatggaccagtctgcattcgctggcttctcctttgtgaaccccaaattcgagcacctcctggaagattgaggttcctggacagatcaggctagccctgccctccacccacacctgcccgctccccacgataagcaccagtgggactgtggtgacttctgctgctggccccgcccctgcccccagagcgtccttggctgccgtctggccgggctctcatggtacttcctctgtgaactgtgtgtgaatctgcttttcctctgccttcggagggaaattgtaaatcctgtgtttcattacttgaatgtagttatctattgaaaatatatattatatacatagacatatatatatatataataggctgtatatattgctcagtagagaaaaaccatgggggactggtgatatgttgatctttttcaaaaaaatatatatatgacaaaaaaaaaaaaaaaggagcacaagctgtttgaaccaccaggtttatttgtgtgtctaaataaacaccaaatagtaccaaaaaaaaaaaaaaaaa

SEQ ID NO: 2891 - DNA, 3522 bp, Homo Sapiens
  NM_006255
aggggcgagtcctgcgcgagtccccgggaggcgccgcgcgcttggaagggacggtcgggcttccccggcccgctgagggctcggcggcgggctcccctcctttccacctcgggagggagggaaggaggggagggaaaagtcccacggaggaggcagaatggccagtcgaggggcgcttaggcgctgcctttccccagggctgcctcgactcctgcacctgtcccgagggctggcctgagacgggactcccggttctcccgctgcgaagcagcgcggccccccggggccggggcagcggcgccggcatgtcgtctggcaccatgaagttcaatggctatttgagggtccgcatcggtgaggcagtggggctgcagcccacccgctggtccctgcgccactcgctcttcaagaagggccaccagctgctggacccctatctgacggtgagcgtggaccaggtgcgcgtgggccagaccagcaccaagcagaagaccaacaaacccacgtacaacgaggagttttgcgctaacgtcaccgacggcggccacctcgagttggccgtcttccacgagacgcccctgggctacgaccacttcgtggccaactgcaccctgcagttccaggagctgctgcgcacgaccggcgcctcggacaccttcgagggttgggtggatctcgagccagaggggaaagtatttgtggtaataacccttaccgggagtttcactgaagctactctccagagagaccggatcttcaaacattttaccaggaagcgccaaagggctatgcgaaggcgagtccaccagatcaatggacacaagttcatggccacgtatctgaggcagcccacctactgctctcactgcagggagtttatctggggagtgtttgggaaacagggttatcagtgccaagtgtgcacctgtgtcgtccataaacgctgccatcatctaattgttacagcctgtacttgccaaaacaatattaacaaagtggattcaaagattgcagaacagaggttcgggatcaacatcccacacaagttcagcatccacaactacaaagtgccaacattctgcgatcactgtggctcactgctctggggaataatgcgacaaggacttcagtgtaaaatatgtaaaatgaatgtgcatattcgatgtcaagcgaacgtggcccctaactgtggggtaaatgcggtggaacttgccaagaccctggcagggatgggtctccaacccggaaatatttctccaacctcgaaactcgtttccagatcgaccctaagacgacagggaaaggagagcagcaaagaaggaaatgggattggggttaattcttccaaccgacttggtatcgacaactttgagttcatccgagtgttggggaaggggagttttgggaaggtgatgcttgcaagagtaaaagaaacaggagacctctatgctgtgaaggtgctgaagaaggacgtgattctgcaggatgatgatgtggaatgcaccatgaccgagaaaaggatcctgtctctggcccgcaatcaccccttcctcactcagttgttctgctgctttcagacccccgatcgtctgttttttgtgatggagtttgtgaatgggggtgacttgatgttccacattcagaagtctcgtcgttttgatgaagcacgagctcgcttctatgctgcagaaatcatttcggctctcatgttcctccatgataaaggaatcatctatagagatctgaaactggacaatgtcctgttggaccacgagggtcactgtaaactggcagacttcggaatgtgcaaggaggggatttgcaatggtgtcaccacggccacattctgtggcacgccagactatatcgctccagagatcctccaggaaatgctgtacgggcctgcagtagactggtgggcaatgggcgtgttgctctatgagatgctctgtggtcacgcgccttttgaggcagagaacgaagatgacctctttgaggccatactgaatgatgaggtggtctaccctacctggctccatgaagatgccacagggatcctaaaatctttcatgaccaagaaccccaccatgcgcttgggcagcctgactcagggaggcgagcacgccatcttgagacatcctttttttaaggaaatcgactgggcccagctgaaccatcgccaaatagaaccgcctttcagacccagaatcaaatcccgagaagatgtcagtaattttgaccctgacttcataaaggaagagccagttttaactccaattgatgagggacatcttccaatgattaaccaggatgagtttagaaacttttcctatgtgtctccagaattgcaaccatagccttatggggagtgagagagagggcacgagaacccaaagggaatagagattctccaggaatttcctctatgggaccttcccagcatcagccttagaacaagaaccttaccttcaaggagcaagtgaagaactctgtgaaggatggaactttcagatatcaactatttagagtccagagggagccatggcactagaaatagttgataatgaaatgagattttatgaagtataccgctccacctatgagcgtctgtctctgtgggcttgggatgttaacaggagccaaaaggagggaaagtgtgaagaataaagtagatctgagaaattctgagccaatcaggcttcttaattcaagagacaaaccaagacgttctgtcaactgtgctgtgctcttctttaagccaatgaaccccaattcctggcagtctacaagaagtctcttaatgctaatgaagaatttaaaggtctttttaaggaaatgaagggctttccaaatagaatgatttactctgaagaaacaaacaatggtatctctgaaactcacaacctaaagcccaatcttgaaaatatgttgtgcaccaagacgactgcttcagcttcttctcttatccttactttctttaatagatatttattaaactgtccagtgaaaaggtgccacaatgcccagtattgtaaacaacaggtttgcattcatgaagctttcattcattctggagtctactaatttacctgaatggtgtttgcattctgtgaaatgcctctccacgttgcatatgtcacacttttgtctgcacataactcttttttcacaagaagggtcactgccacaacagcacagtcagcgggtgaattacaggtgcctgctgcctgcctacctgggtaatctgatcttgtctgtatcgccgtgtgctcatcactgaagaattgcaggccactcatgtcagtgaccagatttgtggcttataaacattagcagtttatttatgttttaagatgcaaagatgtgtgtttgatattcactttaataattagaaatggatcttgtaaacagggcatatatcaaagatgaccttataatatgtacccgaatatacagttcaagaattttgtctgactggaaataaatgcattttgtagcaaaaggaaaaaaaaaaaaaaaaaa

SEQ ID NO: 2892 - DNA, 3273 bp, Homo Sapiens
  NM_006257
agtccccgcgcagtccccgcgcagtcccagcgccaccgggcagcagcggcgccgtgctcgctccagggcgcaaccatgtcgccatttcttcggattggcttgtccaactttgactgcgggtcctgccagtcttgtcagggcgaggctgttaacccttactgtgctgtgctcgtcaaagagtatgtcgaatcagagaacgggcagatgtatatccagaaaaagcctaccatgtacccaccctgggacagcacttttgatgcccatatcaacaagggaagagtcatgcagatcattgtgaaaggcaaaaacgtggacctcatctctgaaaccaccgtggagctctactcgctggctgagaggtgcaggaagaacaacgggaagacagaaatatggttagagctgaaacctcaaggccgaatgctaatgaatgcaagatactttctggaaatgagtgacacaaaggacatgaatgaatttgagacggaaggcttctttgctttgcatcagcgccggggtgccatcaagcaggcaaaggtccaccacgtcaagtgccacgagttcactgccaccttcttcccacagcccacattttgctctgtctgccacgagtttgtctggggcctgaacaaacagggctaccagtgccgacaatgcaatgcagcaattcacaagaagtgtattgataaagttatagcaaagtgcacaggatcagctatcaatagccgagaaaccatgttccacaaggagagattcaaaattgacatgccacacagatttaaagtctacaattacaagagcccgaccttctgtgaacactgtgggaccctgctgtggggactggcacggcaaggactcaagtgtgatgcatgtggcatgaatgtgcatcatagatgccagacaaaggtggccaacctttgtggcataaaccagaagctaatggctgaagcgctggccatgattgagagcactcaacaggctcgctgcttaagagatactgaacagatcttcagagaaggtccggttgaaattggtctcccatgctccatcaaaaatgaagcaaggccgccatgtttaccgacaccgggaaaaagagagcctcagggcatttcctgggagtctccgttggatgaggtggataaaatgtgccatcttccagaacctgaactgaacaaagaaagaccatctctgcagattaaactaaaaattgaggattttatcttgcacaaaatgttggggaaaggaagttttggcaaggtcttcctggcagaattcaagaaaaccaatcaatttttcgcaataaaggccttaaagaaagatgtggtcttgatggacgatgatgttgagtgcacgatggtagagaagagagttctttccttggcctgggagcatccgtttctgacgcacatgttttgtacattccagaccaaggaaaacctcttttttgtgatggagtacctcaacggaggggacttaatgtaccacatccaaagctgccacaagttcgacctttccagagcgacgttttatgctgctgaaatcattcttggtctgcagttccttcattccaaaggaatagtctacagggacctgaagctagataacatcctgttagacaaagatggacatatcaagatcgcggattttggaatgtgcaaggagaacatgttaggagatgccaagacgaataccttctgtgggacacctgactacatcgccccagagatcttgctgggtcagaaatacaaccactctgtggactggtggtccttcggggttctcctttatgaaatgctgattggtcagtcgcctttccacgggcaggatgaggaggagctcttccactccatccgcatggacaatcccttttacccacggtggctggagaaggaagcaaaggaccttctggtgaagctcttcgtgcgagaacctgagaagaggctgggcgtgaggggagacatccgccagcaccctttgtttcgggagatcaactgggaggaacttgaacggaaggagattgacccaccgttccggccgaaagtgaaatcaccatttgactgcagcaatttcgacaaagaattcttaaacgagaagccccggctgtcatttgccgacagagcactgatcaacagcatggaccagaatatgttcaggaacttttccttcatgaaccccgggatggagcggctgatatcctgaatcttgcccctccagagacaggaaagaatttgccttctccctgggaactggttcaagagacactgcttgggttcctttttcaacttggaaaaagaaagaaacactcaacaataaagactgagacccgttcgcccccatgtgacttttatctgtagcagaaaccaagtctacttcactaatgacgatgccgtgtgtctcgtctcctgacatgtctcacagacgctcctgaagttaggtcattactaaccatagttatttacttgaaagatgggtctccgcacttggaaaggtttcaagacttgatactgcaataaattatggctcttcacctgggcgccaactgctgatcaatgaaatgcttgttgaatcaggggcaaacggagtacagacgtctcaagactgaaacggccccattgcctggtctagtagcggatctcactcagccgcagacaagtaatcactaacccgttttattctattcctatctgtggatgtgtaaatggctggggggccagccctggataggtttttatgggaattctttacaataaacatagcttgtaacttgagatctacaaatccattcatcctgattgggcatgaaatccatggtcaagaggacaagtggaaagtgagagggaaggtttgctagacaccttcgcttgttatcttgtcaagatagaaaagatagtatcatttcacccttgccagtaaaaacctttccatccacccattctcagcagactccagtattggcacagtcactcactgccattctcacactataacaagaaaagaaatgaagtgcataagtctcctgggaaaagaaccttaaccccttctcgtgccatgactggtgatttcatgactcataagcccctccgtaggcatcattcaagatcaatggcccatgcatgctgtttgcagcagtcaattgagttgaattagaattccaaccatacattttaaaggtatttgtgctgtgtgtatattttgataaaatgttgtgacttcatggcaaacaggtggatgtgtaaaaatggaataaaaaaaaaaaaagagtcaaaaaaaaaaaaa

SEQ ID NO: 2893 - DNA, 5598 bp, Homo Sapiens
  NM_006260
agagccactgaggcctgagcgagagccgacggcgggcgggcgcagctgctgccggagcgccggcgcgtgctggtgggccacacacctttcctcctcttcactcgcgagccctcggacatggtggcccccggctccgtgaccagccggctgggctcggtattccccttcctgctagtcctggtggatctgcagtacgaaggtgctgaatgtggagtaaatgcagatgttgagaaacatcttgaattgggcaagaaattacttgcagctggacagctagctgatgctttatctcagtttcatgctgccgtagatggtgaccctgataactatattgcttattatcggagggctactgtctttttagctatgggcaaatcaaaagctgcacttcctgatttaactaaagtgattcaattgaagatggacttcactgcagcaagattacagagaggtcacttattactcaaacaaggaaaacttgatgaagcagaagatgattttaaaaaagtgctcaaatctaatccaagtgaaaatgaagaaaaggaagcacagtctcaacttataaaatctgatgaaatgcagcgtttgcgttcacaagcacttaacgcttttggaagtggagattatactgctgctatagccttccttgataagattttagaggtttgtgtttgggatgcagaactacgggaacttcgagctgaatgttttataaaagaaggagaacctaggaaagctataagtgacttaaaagctgcgtcaaagttgaagaatgataatactgaagcgttttataaaataagcacactgtactaccaactaggagaccacgaactgtccctcagtgaagttcgggaatgtcttaaacttgaccaggatcataaaaggtgttttgcacactataaacaagtaaagaaacttaataagctgattgagtcagctgaagagctcatcagagatggcagatacacagatgctaccagcaaatatgaatctgtcatgaaaacagagccaagcattgctgaatatacagttcgttcaaaggagaggatttgccactgcttttctaaggacgagaagcctgttgaagctattagggtttgttctgaagttttacagatggaacctgacaatgtgaatgccctgaaagatcgagcagaggcctatttgatagaggaaatgtatgatgaagctattcaggattatgaaactgctcaggaacacaatgaaaatgatcagcagattcgagaaggtctagagaaagcacaaagattattgaaacagtcgcagaaacgagattattataaaatcttgggagtaaaaagaaatgccaaaaagcaagaaattattaaagcataccgaaaattagcactgcagtggcacccagataacttccagaatgaagaagaaaagaaaaaagctgagaaaaagttcattgatatagcagctgctaaagaagtcctctctgatccagaaatgagaaagaagtttgacgacggagaagatcctttggatgcagagagccagcaaggaggcggcggcaaccctttccacagaagctggaactcatggcaagggttcaatcccttcagctcaggcggaccatttagatttaaattccacttcaattaaaccaactgtttttctgctcttcttaatttttttaaagattaaaaacaaagaaatcttgttccgggaccctaatgaaaaaaaatttcaaatcttttcagtttgtccatgaccaaagagttgctttaataggaaaaaatctgttcttatccctgtcagatttatggttaatgggtttgcaacggcaaggaggcaaggaatggttctatttctgacagagcagcctgcatctgctttatgctgtctggagggaagtggtctgaggcaggctcacccgtggaagtgctcacgtattctgtattatttttctacactggagctgagattcttctcttcacagccttgcagagtaagtcagtgcctacaagtgtaagaaggagctgtaatcttcatgaggatggttatacttcagtattcttaaagagaacatgaacatttttgagctgtatgttcttagggacaactgtgcttcgatgtggtcagtctcgtcacttgtgagtagctgtgaaatctttagtgtgcatgtgtttgcacctctgtggtctgtcaacgtggctgtcactgaaggagcaagagaccatcttttaggaaccctgccaccaaataataatatatccaggcttagactttggattaatgttaaatgtacatttttttggttcagtacctgaagaagaatactgaaacttgaatctataaattcctatggacccttttaatattaaacacaacaaattaaaagttgttataggtaaaataagttcagataaaatagtggtggtatttaaaataatattgctgaagtgcagattgaaatactttttaaacaactgaagttctgagtttttatagggaatttcatgtaacaagactggtttagaaacgtaaagttgcgcagtcaacataaataaatacagaatgccatgttctccacttctaagtaaagacagtgggcagcttctgtttctccttctatcaaggcttcaccctatcttaaaggtctgtggtgcctcccacgtgggacctgtctgctggtatgtgttaaacagcagaccggcccttctaccagatcttgatgcctctgattttctcctgcctacaagaaaatacaggcaaggttagtcaggtctggctatatttccactgttgtttcatttaataagatggcatctcctcttgagatatgttcttcttaccttttaagaagatactatttaagaagtgaactattcagtctttgtatactgaatgctttttccctaaaaaatgttaatcaagaatattgaatatttatggcactcttgatgctgcatttgaaagctgaaggaattactttagatagataggaattgctacctttattctggaaaggttttgtttctgcctcaaagcattttgaagtgttttaaccattaaagggtctaatttttttttcttaatgaaatcaagcattttaattcactgtgggaggcatcctgaccacggacatccataacagcaaagcacaaatcgttttcgtctgtagtcatatcctgaaacataggtggacaaatttttaactgagagacaaaaatcacatagttgaattgagcagaacacttaagtgctttctgcatctatttaggagtctatttcttaccaataaacttgacaacgcatttggaaaactagtgaacaccttacagctttcattttgctttaatgtttcaattcaagccggtgtaaaaataatttccaaggcatttctgtttattctttagtaatctcactactggctatgtcagcaatatctttttcaatctggttccttttgtatatgatgtcactgtgacctctttgaaatatagtgatggcttttacctactttgaaaagaattttcacatagagtcagaaaaaaaaggaaatatcaaatcacttgcctttccacttggagagcacgacagttgccaacaacaaggggtcaagggccgcacaggagatgtgtgggggcctggccacctcccacctgctgcccagaggcttgtttgcattttcattttttctccacttgtaacaaccatagtttcagctcctaaattcttatcatggatttacttagtcatcttaactgacctgcagttacttgcctgttttcagtgaagagagagaagcagctctggtgccacatgccagtgccatggagggaaatgaattctctgcaatctgttgtttcgctgattcatgaagaaagtaacaactgttgagtttcagccttgatggctgtcggcagttttctggtgtccacccaaacggagagacagtcactcctgcttaccctaatgtgtgactgagaagcagcctgggtgtgtaaagagatagtcattccccctgcctgtctcactgtagggtagcattatccactgtaaaaccatactactttcattttcccttggggactacaggtgccaggtaacctttttttttttttttttttttttttgagacagaatcttgctctgttgcccaggctggagtgcagggacacctcccgggttcaagcagttctcctgcctcagcctccaagtagctgggactataggcacgcaccaccatgcctggctaatttttgtatttttagtagaaatggggtttcactgtgttagccaggatggtcttgatctcctgaccttgtgatctgcccgccttggccttccaaagtgttgggattacaggcgtgagccactgcgcctggccatcaggtaacctttatggctctttcaggaaaagtgaaatcagagaggcgtaccctagccacagctgttgtattctgctcttctttcctttttggtgagcttcatgggtggagttatcagtggtctgtactttgtggatattttgcccagcaggaagtattagacacatcagtctagaagcattgtgaaaaggttccaaaacgggagacaaaatttaattcattcctcagttctgaaagtttgtgctttcttaccatgaatagatgaaaacttgaaaaaaatcttgacagtttactaatgtgaatcagatgtaacgtactactaattctacaatgcctttctctttagtcagtattaaaaatcttttttaaagtattggtatgaaaacaaatttttgttgccctgataatggaattttaaaactacccacagtttaagagaaaacataacttggtaaaaaaggtagccaataaaaccacaatttgaaattgataccattttctactcacaatggatgatgaaaaatttcacctttaaatgggtcagaagttgtctttgacatttaccatgaaaaaactacataaaatggctccctggtgaggttacagacacggccctggtgatgggcgttgcaaagttttcactgagcacacagcaatggtatcacctagagaagttcacgcaactttgttgaatgtagttgacttttccaaatttataaaggaaggaagaaggcaaatgttaatttgccaacaacgaatatcctttttctaaatcagatcattccttttttgttagtggcagtttatcctgtaatttcaaatgacgttaagaggtgggattatttgggggttttttttgtttgtttacagatgatctcatttgctgaatgattgatttaagagtaaaattagccactgcgtggctttgtgtatagtaaccggttttgttgcacttgtctgtggctgaaacacttacctgcagtggaaagccgagcaaggaggaggtaaacattggagatgtttgtgaaaatattactcttgctgtgaggttttagtttgttttgaatgagaaaagactaagtaacttaatccatctcaatgtagtgttttaataaaaaaggaacctaatatttgaaatgggtctcagacatgtctacaaatatgggtactatttttatgcccgtgtattttcacatttaataaaaatatttatggtcatatcagtataaaaaaa

SEQ ID NO: 2894 - DNA, 1012 bp, Homo Sapiens
  NM_006263
aggcggagctgggtgcgagcgccctaccgctttcgctttcccttcgcggtgcccactccactccttgtgcggcgctaggccccccgtcccggtcatggccatgctcagggtccagcccgaggcccaagccaaggtggatgtgtttcgtgaagacctctgtaccaagacagagaacctgctcgggagctatttccccaagaagatttctgagctggatgcatttttaaaggagccagctctcaatgaagccaacttgagcaatctgaaggccccattggacatcccagtgcctgatccagtcaaggagaaagagaaagaggagcggaagaaacagcaggagaaggaagacaaggatgaaaagaagaagggggaggatgaagacaaaggtcctccctgtggcccagtgaactgcaatgaaaagatcgtggtccttctgcagcgcttgaagcctgagatcaaggatgtcattgagcagctcaacctggtcaccacctggttgcagctgcagatacctcggattgaggatggtaacaattttggagtggctgtccaggagaaggtgtttgagctgatgaccagcctccacaccaagctagaaggcttccacactcaaatctctaagtatttctctgagcgtggtgatgcagtgactaaagcagccaagcagccccatgtgggtgattatcggcagctggtgcacgagctggatgaggcagagtaccgggacatccggctgatggtcatggagatccgcaatgcttatgctgtgttatatgacatcatcctgaagaacttcgagaagctcaagaagcccaggggagaaacaaagggaatgatctattgagagccctctctcccattctgtgatgagtacagcagagaccttcctgctttttactggggactccagattttccccaaacttgcttctgttgagatttttccctcaccttgcctctcaggcacaataaatatagttataccactgcccatcaaaaaaaaaaaaaaaaaa

SEQ ID NO: 2895 - DNA, 2411 bp, Homo Sapiens
  NM_006268
ggaacagggaagatggcggctgtggtggagaatgtagtgaagctccttggggagcagtactacaaagatgccatggagcagtgccacaattacaatgctcgcctctgtgctgagcgcagcgtgcgcctgcctttcttggactcacagaccggagtagcccagagcaattgttacatctggatggaaaagcgacaccggggtccaggattggcctccggacagctgtactcctaccctgcccggcgctggcggaaaaagcggcgagcccatccccctgaggatccacgactttccttcccatctattaagccagacacagaccagaccctgaagaaggaggggctgatctctcaggatggcagtagtttagaggctctgttgcgcactgaccccctggagaagcgaggtgccccggatccccgagttgatgatgacagcctgggcgagtttcctgtgaccaacagtcgagcgcgaaagcggatcctagaaccagatgacttcctggatgacctcgatgatgaagactatgaagaagatactcccaagcgtcggggaaaggggaaatccaagggtaagggtgtgggcagtgcccgtaagaagctggatgcttccatcctggaggaccgggataagccctatgcctgtgacatttgtggaaaacgttacaagaaccgaccaggcctcagttaccactatgcccactcccacttggctgaggaggagggcgaggacaaggaagactctcaaccacccactcctgtttcccagaggtctgaggagcagaaatccaaaaagggtcctgatggattggccttgcccaacaactactgtgacttctgcctgggggactcaaagattaacaagaagacgggacaacccgaggagctggtgtcctgttctgactgtggccgctcagggcatccatcttgcctccaatttacccccgtgatgatggcggcagtgaagacataccgctggcagtgcatcgagtgcaaatgttgcaatatctgcggcacctccgagaatgacgaccagttgctcttctgtgatgactgcgatcgtggctaccacatgtactgtctcaccccgtccatgtctgagccccctgaaggaagttggagctgccacctgtgtctggacctgttgaaagagaaagcttccatctaccagaaccagaactcctcttgatgtggccacccacctgctccccgacatatctaaggctgtttctctcctccacttcatatttcatacccatctttcccttcttcctcctctccttcacaaatccagagaaccttggggtggttgtgccagcctgcctttggcagctgcaagctgaggtggcagctctgaccacctctggccccaggccctcagggagaaaggagcaacacactgcccctaggcgtgcgtgtggcccagtttctctctgctctccattaagtgcattcactctgcttgccttgggcccagcccctggtgatcacagggttcaaacagtgtcctcctagaaagagtgggagagcagctcacttctctgtgttctgcctcccctctggtctccagagttttcctgtcctctagaggcaagccaggccagggagctgggagcgagcaagctgaggccacgtccacaaggagcttttcatgcccctgtgccgcatagcctcacctctttcctccagagtggctctctgcggccctgtgttcctgctacagagtgttcttttctggagtcaggatgttctcggtcaccctcctggttctgccctgtcccattccaccccaccccagggggaacagtagcttcaccttgttattcccattgctctcctggctcactcttacggtcggtctccagtgactgaagcattccccacccttggaatttctcatcttctgcctcccttcctactccttttggttttgtggggagaggggaaggatcagggggccaggccagcagctcgggggccacaaggagatggataatgtgcctgttttttaacacaacaaaaaagcctacctccaaaatcccctttttgttcttcctggacctgggcattcagcctcctgctcttaactgaattgggagcctctgccacctgccccgtgtatcctggctctcagctcatggggaagccacatagacatccctttcttcccttgcacgctcgctagcagctggtaaggtcttcacaccctgattcctcaagttttctgcttagtggcactgacattaagtagtggggggacagtccatgccaggacaccctggagtagccttcccccttggccgtgggcaggccctaactcactgtcgctttggagttgaggtgtcttttctttttctttctttagttcctgtattctaaacattagtaaaaataaatgtttttacacagaaa

SEQ ID NO: 2896 - DNA, 3755 bp, Homo Sapiens
  NM_006275
catatagcgaaagcctggcgcgcgcgcgcgccattgtgtggctggactcggccgcccctgtggtgtgaggcgcgtgttcgggctcttgccgtccccgcacccgcaccgcggttactggcttgcggtccgccgttcgacaaccagcccttgggtccccgcccgccacggacatgccgcgcgtctacataggacgcctgagctacaacgtccgggagaaggacatccagcgctttttcagtggctatggccgcctcctcgaagtagacctcaaaaatgggtacggcttcgtggagttcgaggactcccgcgacgccgacgacgccgtttacgagctgaacggcaaggagctctgcggcgagcgcgtgatcgtagagcacgcccggggcccgcgtcgcgatcgcgacggctacagctacggaagccgcagtggtggaggtggatacagcagtcggagaacatctggcagagacaaatacggaccacctgttcgtacagaatacaggcttattgtagaaaatctttctagtcggtgcagttggcaagatttaaaggattttatgcgacaagcaggtgaagtaacctatgcggatgcccacaaggaacgaacaaatgagggtgtaattgagtttcgctcctactctgacatgaagcgtgctttggacaaactggatggcacagaaataaatggcagaaatattaggcttattgaagataagccacgcacaagccataggcgatcttactctggaagcagatccaggtctcgatctagaagacggtcacgaagtaggagtcgcaggagcagccgcagtagatctcgaagtatctcaaaaagtcgctcccgttccaggtcgcggagcaaaggtcgatcacgttctcgatcaaaaggcaggaaatctagatcaaagagcaaatctaagcccaagtctgatcggggctcccattcacattctcgaagcagatctaaggatgagtatgagaaatctcgaagcaggtctcggtcccgatcccctaaagaaaatggaaagggtgatataaagtcaaaatccagatcaaggagccagtcccgttccaattcgccgctacctgttccaccctcaaaggcccgttctgtgtcccctccaccaaaaagagctacttcaagatcccgttctagatctcgctcaaagtcaagatcaaggtccaggtcgagttccagagattaactcagaactccttgtttgcacattattatggaacactttcctacttaggcagttactcttccatgtttatacttggcctcttctgcaagaggaatctcttgaaaacaggggcacacagaaatttgatttgtggccaaattggatgaaaaagatgaggctctaaggaaatggtggcatgaagaccctctcccttctttgtagaattaagataactttgattttatagcttttgagctaacgtaacttttgtaaagattaagctcatttagtgttgtttttttttttttttttttttttttttttttttttttagtatttcagcaggatctgctggcagggtttttttgttttatttgtttgcttatttttaaattaactgttttgagctttgaatacttaaggctttagagggagaacccaattttcaattatgttggctttttataaagcttgagttatgtaagatttaaataaaagtttgctaccaagatgattgccttattgaataggtcactattaaattcctttaaatgttgatatctgccatttgtggaaacaacgtaaattctacttaagtgtaaacaaggcaagcctcagaccagcaataaattactcagtttggataacattattttgtgcagttaatcaaatttgccaaagtctttatctgcccctttaacaagttgagtaaaaataaaaggtattttttagtcaatgtgttccatgattttgcttaaattaatacttttaagtaatggaacttttttcaaaggcaaatttaaactatttaagaaatagctcctaatacttgggatcttgtttagagaatccactttctggaagttctcagcataattagtgttgagagtggttcagttgtctttaatgtttgtcatgtggaaatggaagtagcctctttttgttctgaaattgagtttattcaaagtgtaaaagcacatactgcattttctgctgaaagatcattatgtttaacaggcacttaatctcagtaaagtcagttgccagttaagttccacccagtagtcagtcccctttgtagttagtgggattatttgataattggttagatcatacttgtaaattttaatgctttgtgtaattggtttgaaaaacagtgaaatgggtaaacgcaaaacttttgtactttattacgagtaaagtgtaatgagtactgtggaaaccaaatttgaatactgcaaatttgtaggagttactaggttagcaattagtccatacatccataagcctgatgagttgaaattgcagtttgagaagtgaattaaccttacatccctttgttcagataccttaaaagttactttatttaaaagcatttattaatcttagtctgaaatcaaaatatagattaattggctcagctttaatacctttctaggaggtgtcacaatgtagggtaccaagggttggattgtgatggggcatggtcgtacactgctcattgtgccacaggtgtgactggaaagcatgatattctagggttggtttgtagattcaaataatccagaaatatacctaataagattgagtgaaaaatttgagtcaaatatctagggcattcacagagtagctgtgagttcttggtaatgtgaaaaaggccttgtttttcagaaattcctgggtttcctgttaaaaaatcttaaagcccaaccttaggaatatagtgccccaaaaggcggatgcttcttccattatcttattttctttgatactttatttaattagatgtttataaagaaatgggtttatttttccagcataaacctcagaatttaaggaaagaaaatgatgtctgttgttatagttcattgttttgcctactcagcagaagtgatgactcttaaaaattggctttgaccaaagttctcttgttttcagggaaagaacataaaagctttttgaactacagcctttttaaaagagggatgggaggatattacagtaagaaattaggctttctaaaagtatgaaacatccttcaactgggctctcttgttaataggacatcatatggtaatagactggtttgactatattgttagctgccacagtaagcaggtcattgtataggtaaatgcctgcacccataattttctagtaatagccacgaccaatttattaacagtcagggcctatccttgcctgtagttctcagtcactggatgcacaaaatcactgtgtaacattggctcacttggtgagcatagggttgactgataaaatgtttaattcccttgctagcttgtgagaagaatgagttgatgacatgctccataccagtggctagatggagtattaaggtggagcagaaaagaagtgagaacatcttgattcccctttcttttacttgatggtgtttatgaacatgccgtagtgcctttatggccagtttgagtcctgcctactttgacttttacgttcccattcctgtgttaccaccttcctcccgatttgttcacctattttgtgctttaaatctcaataaaatacttactgagggaaaaaaaaaaa

SEQ ID NO: 2897 - DNA, 1766 bp, Homo Sapiens
  NM_006278
cggtcaggtccagcacttgggagctgactgtgctggaggtgacaggctttgcggggtccgcctgtgtgcaggagtcgcaaggtcgctgagcaggacccaaaggtggcccgaggcagccgggatgacagctctccccaggaatcctgctgcctgctgagaaacatggtcagcaagtcccgctggaagctcctggccatgttggctctggtcctggtcgtcatggtgtggtattccatctcccgggaagacagtttttattttcccatcccagagaagaaggagccgtgcctccagggtgaggcagagagcaaggcctctaagctctttggcaactactcccgggatcagcccatcttcctgcggcttgaggattatttctgggtcaagacgccatctgcttacgagctgccctatgggaccaaggggagtgaggatctgctcctccgggtgctagccatcaccagctcctccatccccaagaacatccagagcctcaggtgccgccgctgtgtggtcgtggggaacgggcaccggctgcggaacagctcactgggagatgccatcaacaagtacgatgtggtcatcagattgaacaatgccccagtggctggctatgagggtgacgtgggctccaagaccaccatgcgtctcttctaccctgaatctgcccacttcgaccccaaagtagaaaacaacccagacacactcctcgtcctggtagctttcaaggcaatggacttccactggattgagaccatcctgagtgataagaagcgggtgcgaaagggtttctggaaacagcctcccctcatctgggatgtcaatcctaaacagattcggattctcaaccccttcttcatggagattgcagctgacaaactgctgagcctgccaatgcaacagccacggaagattaagcagaagcccaccacgggcctgttggccatcacgctggccctccacctctgtgacttggtgcacattgccggctttggctacccagacgcctacaacaagaagcagaccattcactactatgagcagatcacgctcaagtccatggcggggtcaggccataatgtctcccaagaggccctggccattaagcggatgctggagatgggagctatcaagaacctcacgtccttctgacctgggcaagagctgtagcctgtcggttgcctactctgctgtctgggtgacccccatgcgtggctgtgggggtggctggtgccagtatgacccacttggactcaccccctcttggggagggagttctgggcctggccaggtctgagatgaggccatgcccctggctgctcttatggagccgagatccagtcagggtgggggcgctggagccgtgggagcccggccagggcagggggctcgtcgctgtggcaccccctctctgccagcaccaagagattatttaatgggctatttaattaaggggtaggaaggtgctgtgggctggtcccacacatccaggaaagaggccagtagagaattctgcccactttttataaaaacttacagcgatggccccaccaaggcctagacacggcactggcctcccaggagggcaggggcattgggaatgggtgggtgccctccagagaggggctgctacctcccagcaggcatgggaagagcactggtgtgggggttccaccgagaaggggacctcatctagaaaagaggttacaaacctaccattaaactatttttcctaaaacggaaaaaaaaaaaaaaaaaaaaaaaaa

SEQ ID NO: 2898 - DNA, 2826 bp, Homo Sapiens
  NM_006281
ccgcggagttacgggaaagttggtccgagttcccagagtttccctctgtggtgccctaggctcggccggccggtgccccggctcctttcctcctttcggccttcgccgtccaccaggtccctctctctgtccccggccgccatggagcagccgccggcgcctaagagtaaactaaaaaagctgagtgaagacagtttgactaagcagcctgaagaagtttttgatgtattagagaagcttggagaagggtcttatggaagtgtatttaaagcaatacacaaggaatccggtcaagttgtcgcaattaaacaagtacctgttgaatcagatcttcaggaaataatcaaagaaatttccataatgcagcaatgtgacagcccatatgttgtaaagtactatggcagttattttaagaatacagacctctggattgttatggagtactgtggcgctggctctgtctcagacataattagattacgaaacaagacattaatagaagatgaaattgcaaccattcttaaatctacattgaaaggactagaatatttgcactttatgagaaaaatacacagagatataaaagctggaaatattctcctcaatacagaaggacatgcaaaattggcagattttggagtggctggtcagttaacagatacaatggcaaaacgcaatactgtaataggaactccattttggatggctcctgaggtgattcaagaaataggctataactgtgtggccgacatctggtcccttggcattacttctatagaaatggctgaaggaaaacctccttatgctgatatacatccaatgagggctatttttatgattcccacaaatccaccaccaacattcagaaagccagaactttggtccgatgatttcaccgattttgttaaaaagtgtttggtgaagaatcctgagcagagagctactgcaacacaacttttacagcatccttttatcaagaatgccaaacctgtatcaatattaagagacctgatcacagaagctatggagatcaaagctaaaagacatgaggaacagcaacgagaattggaagaggaagaagaaaattcggatgaagatgagctggattcccacaccatggtgaagactagtgtggagagtgtgggcaccatgcgggccacaagcacgatgagtgaaggggcccagaccatgattgaacataatagcacgatgttggaatccgacttggggaccatggtgataaacagtgaggatgaggaagaagaagatggaactatgaaaagaaatgcaacctcaccacaagtacaaagaccatctttcatggactactttgataagcaagacttcaagaataagagtcacgaaaactgtaatcagaacatgcatgaacccttccctatgtccaaaaacgtttttcctgataactggaaagttcctcaagatggagactttgactttttgaaaaatctaagtttagaagaactacagatgcggttaaaagcactggaccccatgatggaacgggagatagaagaacttcgtcagagatacactgcgaaaagacagcccattctggatgcgatggatgcaaagaaaagaaggcagcaaaacttttgagtctaatttcctctctgtttttaactattctggagaccaagaaaccactaggaattgaaggaatatttggatatttttaatcctaagattttgccctacaattaggcagaggtcaaaaagtgacaatggtacatgcccaggtaaattcccaaaaggcagaattgacagttgtatctgctgtgcattcactctaagatgaggagaacaaaagaagtgtattctcttgttctgtcagctgcataccagtaataaaactgttatgaaatggattttcaaggtctctaaaccttgaaaatccaaagctattgttgcattgtacagcactgaagggctttatgttacaatattctttattcctatctagtatactaggctatttattgtatccccttaggtaaacttatttatttatgctattttgctttgtttcattttttaaggacaagatcaggatagctttggtgaaggtagggtcatattaatatgatgataatgtgcaaccaatttatactttctgcagggagctatggggtacattccttgatttccaggatagtttttcaaataggaaagcaataatggcagtagttctcaaatgggctaggccttttttatattgaagcaataattccatttttaccctttgaaattttgtttttttgatttttgatgtttggtacaaatagaactatatatatttaggtaaaatagatctatcgtgtttaaaaccaaagaaatcaatggaacccttgcacaaaaaagtgtgataaatatttttaaataaaaacttaatacaaatgtaatttgttaatattgtttcatgttttatgtgtagatctaatagctgaactgattcaaactgtaataagctcatcaatttcatttctatgaaaatgtgctctgttgtcacaggatgtttctgttgattttattcatttcctgggaattggtaaacatcatgttcctgatgataacccagtagcaaaaacatttgtactgagtggtacaagccttggggactgaaaaaaaaaagattaaaaccattaaaaagaaactcatttttacgctgaatgaacatttatatgattgcattgggaccagtcatttcctaagctacatatggccatcttgacagtgttttttcttttgtgtgtttaattattatgtgtaaatcataaagacaaataaatttcactgtgccacccagca

SEQ ID NO: 2899 - DNA, 762 bp, Homo Sapiens
  NM_006284
gttcgccgcctctcccaccggcccgatgagctgcagcggctccggcgcggaccccgaggcggcgccggcctccgccgcctcggccccgggccccgcgcccccggtctcggctcccgccgcgctgccctccagcaccgccgcggagaacaaggccagccccgcggggacagcggggggacctggggctggagcagctgctgggggcacgggacccttggcggcgcgggccggggagccagctgagcggcgtggggcggctccggtgtcggcgggtggcgcggcgcccccggagggggccatatctaacggggtttacgtactgccgagcgcggccaacggagacgtgaagcccgtggtgtccagcacgcctttggtggacttcttgatgcagctggaagattacacgcctacgatcccagatgcagtgactggttactacctgaaccgtgctggctttgaggcctcagacccacgcataattcggctcatctccttagctgcccagaaattcatctcagatattgccaatgatgccctacagcactgcaaaatgaagggcacggcctccggcagctcccggagcaagagcaaggaccgcaagtacactctaaccatggaggacttgacccctgccctcagcgagtatggcatcaatgtgaagaagccgcactacttcacctgagccacccaacctaaatgtacttatctgtccccatgtccccacaccagcctgttttcataataaactttattgtgacaggc

SEQ ID NO: 2900 - DNA, 2559 bp, Homo Sapiens
  NM_006285
agcggagcagccgccgcccgcccgcccgcccgcctccgcccgcggcaagccagcccgccggcgccccggagcgctgccgccaccgtcaccgccaccgcccggtccaggcccaagcccaggccctgcgcggagcggagcggcgcggcgtccacccgggcccagccagccggcgcggcgggggcgggtccaggatcttcggcggatcttccattctcagggcgggagccggagtccgggcgcccgggatcgggctgggcccgcgcccatggcaagcgcggcctgcccgggccctggggaccctgccatgtgaggcaggcccgggctgggggcccggccatggccggggaacggcccccactgcggggccctgggcccgggcctggagaggtgccgggggaggggcccccggggccggggggcacgggcggaggcccgggccggggccgcccctcctcctaccgggctctccgcagcgccgtgtctagcctggcgcgtgtggacgattttcactgcgcggagaagatcggggccggcttcttctctgaggtctacaaggttcggcaccgacagtcagggcaagtcatggtgctgaagatgaacaagctccccagtaaccggggcaacacactacgggaagtgcagctgatgaaccggctcaggcaccccaacatcctaaggttcatgggagtctgtgtgcaccagggacagctgcacgctcttacagagtatatgaatggggggacattggaacagctgctcagctcccctgaacccctgtcctggccggtcaggctccacctggccctggacattgcccgaggcctgcggtacctgcactccaaaggtgtatttcaccgcgacctcacatccaagaactgtctagtccgacgggaagatcgaggcttcaccgctgtcgtgggtgacttcgggctggccgaaaagattcctgtgtatagggagggggcaaggaaggagccattggccgtggtgggctccccatactggatggctccagaggtgttacggggtgagctgtatgatgagaaggctgatgtctttgccttcgggattgtcctctgtgagctcatcgcccgagtacctgcagaccctgactacctaccacgcactgaggactttggcctggatgtgcctgctttccgaactctggtgggggatgactgcccactgcctttcttgctcctggccatccactgctgcaacctggaacccagcacccgtgcccccttcaccgaaattacccagcacctggaatggatcctggagcagctgcctgagccagccccactcaccaggaccgccctgacacacaatcagggctctgttgcaagagggggtccctctgccacgcttcccaggccagatccccggctttcccgaagccggtcagacctcttcctgcccccatcaccagaatcaccccccaactggggggacaatctgactcgagtcaaccccttctcactacgggaagacctcaggggtggcaagatcaagctcttagacacacccagcaagccagtcctgcctcttgtgccaccatcaccattcccatccactcagctgcccttggtgaccactccggagaccctggtccagcctgggacacctgcccgccgctgccgctcactaccctcatcccccgagctcccccgccgtatggagacagcactgccaggtcctggccctcccgctgtgggcccctcggctgaagagaagatggagtgcgagggcagcagccctgagccggaacctccagggccagcgccccagctgcctctggctgtggccacagacaacttcatcagcacctgttcctcggcctcccaaccctggtcccctagatcaggacccgtcctcaataacaatcccccagctgtggtggtgaactccccacaaggctgggctggggagccctggaaccgggcccagcatagcctgccccgggcggcagccctggagcggacagaaccctcgccacccccttcagctccccgggagcccgatgaggggctgccctgtcctggctgctgcctcggccccttcagctttggcttcctgtccatgtgcccccgccccacaccagctgttgcccgctaccgcaacctgaactgtgaggcgggcagtctcctctgccaccgagggcaccacgccaagccacccacacccagcctgcagctgcctggggcacgctcttagcagtggagcccgtggtctcaggcctccaactttggccttcaggacaccctgtaagaacagagcacacttgctggacagtgccagttccagatgggctgaccggctcttctccccgtgtaggggagccccagcatggactcaagggacagagcacttccagtcgaccccccggctcgcgttcccgtggggatcactgaaccagacacagcattgctgacacatgagactaacacgtgcaattatttaaaaagatttcaataaaactgcctggctggctccgggccgcccctatccgctcaaaaaaaaaaaaaaaaaaaaaaaaaaaaaaaaaaaaaaaaaaaa

SEQ ID NO: 2901 - DNA, 9462 bp, Homo Sapiens
  NM_006286
gacacagtctcaagtttccactgaatggtaacaaagactgtagaatgttgttggtactgcagtgagaggcatgcttccttagaccaggcaacatttcatttgttgcatttccagtttccaataccaactcacctacaaagattttaccaaaaaccttaggaccaataaatgtgaatgttggaccccaaatgattataagcacaccacagagactaaccagttcaggaagtgttctgattgggagtccatatacccctgcaccagcaatggttactcagacacacatagcagaagctactggctgggtccctggtgatagaaaacgggctagaaaatttatagactctgatttttcagaaagtaaacgaagcaaaaaaggagataaaaatgggaaaggcttgagacacttttcaatgaaagtgtgtgagaaagttcaacgaaaaggtacaacatcgtacaatgaagtcgctgatgagctggtgtcagagttcaccaattcaaataaccatttggctgctgattcgcaggcttatgatcagaagaacattaggcgaagagtttatgatgctttaaatgtgctaatggcaatgaacataatttcaaaggaaaaaaaagaaatcaagtggattggcctgcctaccaattctgctcaggaatgtcagaatctggagatagagaagcagaggcggatagaacggataaagcagaagcgggcccagctgcaagaacttctcctacagcaaatcgctttcaaaaacctggtacagagaaatcgacaaaatgagcagcaaaaccagggcccgccggctctgaactctaccattcagctgccattcataatcatcaatacaagcagaaaaacagtcatagattgcagcatctccagtgacaagtttgagtatcttttcaattttgacaacacctttgagatccatgatgacatagaagtactaaagcggatgggaatgtcgtttggcctggagtcaggcaaatgctctctggaggatctgaaacttgcgaaatccctggtgccaaaggctttagaaggttatatcacagatatctccacaggaccttcttggttaaatcagggactacttctgaactctacccaatcagtttcaaatttagacctgaccactggtgccaccttaccccagtcaagtgtaaaccaagggttatgcttggatgcagaagtggccttagcaactgggcagttcctggccccaaacagtcaccagtccagcagtgcggcctctcactgctccgagtcccgaggcgagaccccctgttcgttcaatgatgaagatgaggaagatgatgaggaggattcctcctccccagaataaagacaagagaaagcctacgtttcaatatgtgatgctcatgtgtgtttgtagtgtgagctcttgtttttgaaatgattgcttcagtctttgcctttgtttgcactgtgtgttcagtgaaaactagagaaacacaataagcaaatcacatgaaggctgagatgattgagatgaaagttaacatagtgtgaatgaaagtctggccaacagagcagtagatgatataacaaagaaagcatgctttctgaggagatagtggggataatccctgaagagttggcagtgtgagtgcaactcatttatcttctgtgaggtgggatttttgtgttcctcacacccatgtaattattcttagaattgagattgctacacggagcagtccttgacgatcgtgtttctgacgtttctcttccttgcctggactgcctttgacaaggcagaaatgaacatgaaaagtccccaggagaggggagctgtgtagtgagggatactgagggcagtcctgtggctgaggggcacagattgaactgctgaactagttggaggtctagatgaggtgctttacgcatcagctgccttagacagcttctagaaaggagcgagcgctacttcttaagtacttaagtgacatttagataatttatagtaaaactgaaattattattagccaatgcattggtgcatagaatttactagggctacttctggaagccaaaatagaatagcatttccatgtgcattaaatactttgccagcactgcctttgccagcatcctaaatctggagttttacaaagaaggaaactgtatctttaggttaatcaaagctatgcatttcatatagctttttcatttaaaacaagacaaagaaacaaattcctatgaccaaattgcttgcctacagttccctgcagtaattgtatgatctcacccagtgtgcaatttgtgaaaatgaaccaaatgtcattacttttgtcttaaagaaaagtctatttcaagaatatgaacagcagtgtttccttgtacatgtcaccttttttcacattttcattaatcagaatgaccttattgagcctactcctggggtcaattgcatttcaaactaatccaatatttagtgtttcacagaaacactagaaaacgttgaacactcctactgcctggatatatggtagtgcagttatgttgtttatggctcaagatgtcattagaaatactgcagtggtgtattcacagctgctccttctctgaatgaaagagtgtagggacacctgccaccatggccagaccctgactgaatttcacattaaggctttggaaaggagcaaataataatgggagaattaactccaaaactttgacctgaatcatgtggatttgtcccaagattatgctagatgcaccaagcatggcccaaattggttcttttttaaatcccatgggggaagtgcaggctccttcctgtggtgcctctttatagcctcaccaccatgctaacactgagcatggtgaggaggaggaagctttggctagctaaacatgtttaataaggccataaaaactgagaaagaaaaacattcaactttagctgaagctcctttgatacaaaagtttcattctgtcagaaataagccatagtacagactcagagatagaggcagtttctagagaactcggtcttatcgtgggttctggagcacacctctcagaccagtcaggaacactggggaggtgacagcaggtccccaggggcctgcagggaatctttcagctgcacggattgggatttccctccaaaccaaactgtcctttaaggggcagcctcctcttttactaactccaccctttctcatctctgggacccagcagggacctggagaggccaacagccactgctacctttgtagtcttcaaaatattgaactgcaggtcccaagatgcatttcaggatttaagacaggtgcactaatgataaccattccttcaccaagtagcaacattcttgccagagttcttgggaaacctgtttttttctctactctccatctctgctgctctcatgctttaaattgataaaatatgggctcaaaaaaagaaagccgccaaagactcttatccttattggtgccccatcattggccaccccagccataggtgtgtgctgttggtgggaaatggtctccttcctcagcgttgtgtttgggttactggtgaggccagctcacagagtgacatcatggtcaccagtacatgtcgctggagtaaaatcttgcctttagaaactaggttgagctgttcagaaaggtcaattctcttctgtattccccctcaacatttatctgggtctaaagctcagcactgagtcacaatttcacacaagatcaaagtgaggcagtgttaggaaaccatgggctgggtgcagtgcctctcgcctgtaatcgtagcactttgggaggccgaggcgggcacattgcttgagctcaggagttcaagaccagcctgggcaacatgacaaaaccctgtctctacaaaaatacaaaaattagctgggtgtggtggggcatgcctgtagtcctggctactcaagaggctgaggtgggaggattgcttgagcgcaggaggcggaggttgtagagccaagatcacaccactgcactccagcctgggtgacagagcaagaccctgtctcaaaaaaaaaaaaaaaaaaaatggaagttgtggtcacaatgcccaggcttctttgttatagtggcacgctgggttacttgccacacacagatcactcctcccagggctgctggcacacactgattgtggggagttcaagaggccttttccccttgagggtgtggctgtccccctttcaggcgtgtggcgtcattcatggaggaagtgctggctctacttagcacacgcacagtggcactaggacctgcgtgcctggccctcagtgggtagggcggtgctgcctaggcacacagcagcgcttacgggccccaggtgcctactaggctgccttcctcttccccgctgtcagtctgtgtcctccacgtgcttatttcctgtggtgagagcagttgtggtgtttgtataccttgtgccttatgatcaaggtgggccttggaggagggcgggaaaggagcgaccaacatggcggtcctccacccctcagcgacacccaccgcccgagaaactacagacaatggccacaagtttggcgtccttcaatttaattctttaaagaagtgctgggaagaaaaagctatgtggtttctaccattttagcaggataaagaggataactccttccattagcaaattttacagttgttaacagtactctgccatatttgaaaaataatgccagagtcagtccttgaaaacaaggtagctcctatcagaattcaaatggaaattttttttttttttttttttttttttgagactgagtctcgctctgttgcccaggctggagtgcagtggtgatctcggctcactgcaagctccgcctcccgggttcacgccattctcctgcctcagctgggaccatgcctggctaattttttttgtatttttagtagagacggggtttcaccgtgttagccaggatggtctcgatctcctgaccttatgatccacccctctcggcctcccaaagtgctgggattacaggcgtgagccaccgcacccggcctcaaatggaaatatttcacagaggagtggttcagtttagccctgcaagacatctataacttgactgtttgctaaaccacaactctttttggctacttgggtcatagagacagcagagttgctccaagtataaatgtgacttaggctccctccagcacacagtgtgtatgttggagggagtgtggattagcagagaatgagaactacctcagctattcctgccataaccacactgagagaggggggcacggtggggagcctatttagcttttttttttttttgagacggagtcttgctctgtcgccaggctggagtgtagtggcgcaatcccggctcactgcaacctctgcctcccgggttcaagcgattctcctgcctcagcctcccaagtagctgggattataggcgcatgccgccacacccgactaattttttgtatttttagtagagtcagggtttcaccgtgttgcccaggctggtgtcgaactcctgacctcaggtgatctgcccacctcagcctcccgaagtgctgggattacaggtgtgagccaccgcacccggctctatttagctttttaaaaattatttcctttcaagggccctttaatatctatcaagctccctcccctaacaaaatgggctgtccctgcccaacaagtctgaaatagaccttaaaactgtgctgccttagtggtaagtaaggggtgggggttggacagtgaatcttaagatttcatccttcattcagtaagcatttgagtacctactgtgagcaggcattggggcggagcagcgagagccctgccgatgttgggttctcctcctattggggaaacttgatcacagatggaacacgtgcagattgattgatgagtgctgtggagaaagcagcagcgtagcgggaccgtttgggaaaggctactttggctgggggtggctgggaaaggcccctctgggaaagagacagttttactgagtcagatggtggaaagacagatgtctctatactttcttaacaagccactctgtcccataacatgcacttggaatctctcctaagttccagaggccccactgttccagtttcaagccttcattttggagtctgtttgggaacttttaagacttcaaagcaaagttagctaccagcaatttctgtaaaccaagagaagattgtcacaaagattcactactttccaactgaatctatgcagtagaaaaatcattagaaaatacaaaaattagccgggcgtggtggcacatgcctgtagtcccagctactcgggaggctgaggcaggagaatcacttgaacccaggaggcggaggttgcagtgagccaagatcccgccactgcactccagcccaggtgacagagcaggactctgtctcaaaaaaagaaaaaagaaagaaagaaaaatgattagaaattgagaactattttacgtgtttctaagttgttggctacatcaaagagatcatctgtattctgcatatgggctggctttggtgaagctgatgactggacttctaagaaccgttttcccaaatgggttcccatattcatgcacccaaagcaatggtccccaagcactgatgaaaactaatatgcatttcccaaagacccacactatgtatcaggagcctgcaccatgccatttgaatgaccctcagcaatgtgcctccctgccctcaaattcccagttgataacagtgtttgattaaatttccactcaagccaaacatggttactaagaagagaaaaacctgatgtttgcataatattttttttcccctcgagatggagtcttgctctgttgcccaggctggagtgcagtggcatgatctcagccactgcaacctctgcctcccgggttcaagcgattcttctgcctcagcctcccaagtagttgggattacagacatgtgccaccacgcctggctaatttttgtatttttagtagagacagggtttcaccatgttgaccacactggtcttgaacttctaaccatgtgatctgcctgcctcggcctcccaaagtgctgggattacaggcttgagccaccacgcccagcctaagattttatgattaaaaaaaattcaagctcaatacccacataaattataacgtttctcaggaagtagtcccttaaccaaaacgtctctgagaagtgatgcttaggtaatctctgggatccgattttcccacatgtctcactccacagtatgctaaagaagaaaaagtgagtgggcacaacactttgaccctctggctaagccctgggagtccctgacaggtccagaaacttctctgacacccattcaccagggtgctgagataggagaaagtgctcatttataatgtgtattctgtgcagctgttctcagacaagaccggatcttgtcatcttaccttttgctttacaaaaaaggcctgttgaagtcaatgctgtcttgccccttgctgtttcagcaggttagactttggtcttcactgcttatagctgcattggaggccaacgtagctgatgctcagggtcaggcctcgccccttcgccgcaggtctcaggatcggggataacatcgctcccaccctgctcatttagagatgggaaacaagcaagagcttgacttgcctcccatccctcagcctgtctgtggcagagcctgcaccaaaacccagagcttcttccctccgtgagggccacgctgtcaccacagtcctcccagatgggttttggattagcatcagtcctgtgtcaccaagtgccaaacagctgaggggtagaagtgggactcctttcccgagccccagcatgaggctgtggtgtcaggtttaggcctctctcaagtcagaaaaccccgggctgagacctccacagacaagggctccccatgctggccattggcaggggcccaagaagttcagtgaccaactggtccttccacaccacaccagctggtgctgcccatgtctgtcgaatcataacggaaaattccccagatcacgtttggatttaaaaactcatcccttgtcgtgcttcaatgcatgccatttgtcacttaccatacttcaccatggccgagcttcatgtcacatggcctggcgattgtgcttgttcacactggggccaggattttcatactaaaacgtcactgacaatggggctacttttctcctgaatagctcctctgggcttgttgcagttctagttttcccagtagttccatggcaggttcaacctctcagtgtcctgaaaaatggaaccacccactaaccatatgcactggctgcccaggtggctgcactccggggatcacgtttcagtactgagttccttcacgcacttggttcaccaccatcactcttgagttttggacaaaagaggtgggtatgccaggcacagtggctcacgcctgtgatcccagcactttgggaggccgaggcgggcggatcacctgaggtcgggagttcgaaaccagcctgaccaacatggagaaaccctgtctctactaaaaatataaaattagccgggtgtggtggcgcatgcctgtaatcccagctactcgggaggctgaggcaggagaatctcttgaacccaggaggcaaaagttgcaatgagctgagatcgtgccatttgcactccagcctgggcaacaagagcgaaattccatctcaaaaaaaaaaggtgggtaaagggccatgagcccaaaccactaggttgttcaccttttcatctgaaaatgctttactctgactatgtgctattgggttttatttccagaaaatatagttctccttttttctgcatgaaggatacatcgtggtgccacatgctttaagcaatttaaacaagagagataagaggaaaatgcaaccaccacatctgacttgcccaatgtagactttcctttattagattgaagtacacaacctaatatgatatattattttgtagtatctcagactttgtaaataaatgccattatttttatatggaaattttatagaagagctatttctgtatacgtaattactcctgattttctgaaattgcttctggtagataacagacaagtcctaagcagtgttccactaagggtggttccaggcctgcctgccgtggagttgactgggggaattttacagttttgcgatcctaggatgcgtcccagacgctcagtcagaagtgctggaggtggggcctgggaagctgtatttgtaatgaactctggtgttttttgtccattaaagtgtatctttgtccatcctataagattaaaggaaagaaaaagcatctcaaatgagtgtaagttgttcttgagaaaaaaatgtatcagacttttatgatttgaatgaaatgtattatagaaaaaaataaacactttaaaataaaaaaaaaaaaaaaaaaaaaaaaaaaaaa

SEQ ID NO: 2902 - DNA, 3927 bp, Homo Sapiens
  NM_006287
attcccaactgccagtgatctctgaagccgactctgaggctccctctttgctctaacagacagcagcgactttaggctggataatagtcaaattcttacctcgctctttcactgctagtaagatcagattgcgtttctttcagttactcttcaatcgccagtttcttgatctgcttctaaaagaagaagtagagaagataaatcctgtcttcaatacctggaaggaaaaacaaaataacctcaactccgttttgaaaaaaacattccaagaactttcatcagagattttacttagatgatttacacaatgaagaaagtacatgcactttgggcttctgtatgcctgctgcttaatcttgcccctgcccctcttaatgctgattctgaggaagatgaagaacacacaattatcacagatacggagttgccaccactgaaacttatgcattcattttgtgcattcaaggcggatgatggcccatgtaaagcaatcatgaaaagatttttcttcaatattttcactcgacagtgcgaagaatttatatatgggggatgtgaaggaaatcagaatcgatttgaaagtctggaagagtgcaaaaaaatgtgtacaagagataatgcaaacaggattataaagacaacattgcaacaagaaaagccagatttctgctttttggaagaagatcctggaatatgtcgaggttatattaccaggtatttttataacaatcagacaaaacagtgtgaacgtttcaagtatggtggatgcctgggcaatatgaacaattttgagacactggaagaatgcaagaacatttgtgaagatggtccgaatggtttccaggtggataattatggaacccagctcaatgctgtgaataactccctgactccgcaatcaaccaaggttcccagcctttttgaatttcacggtccctcatggtgtctcactccagcagacagaggattgtgtcgtgccaatgagaacagattctactacaattcagtcattgggaaatgccgcccatttaagtacagtggatgtgggggaaatgaaaacaattttacttccaaacaagaatgtctgagggcatgtaaaaaaggtttcatccaaagaatatcaaaaggaggcctaattaaaaccaaaagaaaaagaaagaagcagagagtgaaaatagcatatgaagaaatttttgttaaaaatatgtgaatttgttatagcaatgtaacattaattctactaaatattttatatgaaatgtttcactatgattttctatttttcttctaaaatgcttttaattaatatgttcattaaattttctatgcttattgtacttgttatcaacacgtttgtatcagagttgcttttctaatcttgttaaattgcttattctaggtctgtaatttattaactggctactgggaaattacttattttctggatctatctgtattttcatttaactacaaattatcatactaccggctacatcaaatcagtcctttgattccatttggtgaccatctgtttgagaatatgatcatgtaaatgattatctcctttatagcctgtaaccagattaaggaatacagctcttaaaaaatcaagaacttcctgagtttcacatataaaatggtgacaaacacctgcttctgataaagtttatccaattttgtatttatagtattctattgtaataatagaattctattatgtgcttccctccttagacatagtttttctccttttgtactaaccagtacttccatctatattgagctaaactgtctttgaacagtcaactctgcatcatgtgcctgcctgatttggattggtttcacttttttttttgtttgaccatagcccattctatcagtcaagatgactgaataattgtgtgttaaatacaactcatgataaggagaacctttatggaaacaagaagttttatggcaatcgagagggaattatttatatgtacttcttaatactatgcttcccaatattttttcttactaaaaataacaaaaatatttaaaccttctgaaatctattcagttatcattaggatttgcacacaatgcaactaataattcatgctttaaaaagtaggttatttctgttgaagagaaaattatcagcagggaagagtctactagaaaattcatgtgctagtcattcttggggatttaatattttgctggagttaattcactatatccagacctgtatctttcatttattgctgagccatgtgcagtctggcatctcaacaacctcaacaacctcaacaacctccaagacatgtcagtttctgtagtgttcacctcaaatctgacactggaattggaactgatttagaaacaaccatttcattcatttggtatgactagcttcatgactagcttcatgaatagcttcatgaatagcttcatgacttctcgctaacaatgatagtataattctgcctgttcttcaggattgaaattttgaactcaatttagatttcctgttttccctcatataccacatctaaacagtctccaaatctttatgcttttttttttttttttcgaaaaagttcacccaatccctaggctttttacttttttctttttcttttcttttttcttgtttttttttttttttcattttgttttgttttgttatgtttttttagacagggtcccactctgtcacccaggctggagtgcagtggtgcaatcacaggacactgaaacctcccacctagctgggactagaggtgcaggccaccacaccagctaatttatgtaatttttgtagagacgagtttcaccacgttacctaggcttgtcttgaacacctgggctcaagcaatcttccagccccagcctcccaaagtgctgggattacaggtataaaccacaatgcccccgtttttactctttactgcatccttcccatcagtattaattcctcagaaatttagtacattcctccaccatttcaaaatgctcccagaactcacactagttggtacttaactacaaccttcaacctcaccatttaattttgatgtatgtttttggatttaccaacagtactttctttcatgactactttgatttagttaagaatgctcactgtacactgaatgttaattactcagctaattcacactgatttcctgtttaaaaatatgatcccctccaggccattcatgtgaagtcagggtacagctgatgccagctacagaatcactatgtttcaatatggaatatgaaaagtcctaacacataattgcaaatcattttctactatggtatacaaattttatcattacaaaatagtatcagcttttttcacttaaggaaaataatacatcttcattcaaatattcagtgcataaataattgccttaaattgagtctttgctgtggaatttgagagttttggaaatcaaaggcccttgtgaaacatttcctgttgccatttatttatagatagcaatagcttcaaatgagtgggaaagtctacttaggtgaagtggtaaatagtcactaagattgtataaatagcgcattgatgagttgcctaattgttttctccaacaataaccactggtccattggttcactacttactcaagaaagacatatactgagatggcttgaaatgtttaatgcatgtgaacgttatttttaccgtgttttggaaaaagatcttgatgttattgtcttcctttattttccacaattaagtgcatctaactgtgaattgtatatggaattacattattcagcatatacatatatttacctgctttgttcattctctgtattcaaaattaacagatcatgctgaaaaccactcaaacgattatattttttacattataagaagtaaaatatattattctgaataatgaaaaaaaaaaaaaa

SEQ ID NO: 2903 - DNA, 4446 bp, Homo Sapiens
  NM_006290
tgccttgaccaggacttgggactttgcgaaaggatcgcggggcccggagaggtgttggagagcacaatggctgaacaagtccttcctcaggctttgtatttgagcaatatgcggaaagctgtgaagatacgggagagaactccagaagacatttttaaacctactaatgggatcattcatcattttaaaaccatgcaccgatacacactggaaatgttcagaacttgccagttttgtcctcagtttcgggagatcatccacaaagccctcatcgacagaaacatccaggccaccctggaaagccagaagaaactcaactggtgtcgagaagtccggaagcttgtggcgctgaaaacgaacggtgacggcaattgcctcatgcatgccacttctcagtacatgtggggcgttcaggacacagacttggtactgaggaaggcgctgttcagcacgctcaaggaaacagacacacgcaactttaaattccgctggcaactggagtctctcaaatctcaggaatttgttgaaacggggctttgctatgatactcggaactggaatgatgaatgggacaatcttatcaaaatggcttccacagacacacccatggcccgaagtggacttcagtacaactcactggaagaaatacacatatttgtcctttgcaacatcctcagaaggccaatcattgtcatttcagacaaaatgctaagaagtttggaatcaggttccaatttcgcccctttgaaagtgggtggaatttacttgcctctccactggcctgcccaggaatgctacagataccccattgttctcggctatgacagccatcattttgtacccttggtgaccctgaaggacagtgggcctgaaatccgagctgttccacttgttaacagagaccggggaagatttgaagacttaaaagttcactttttgacagatcctgaaaatgagatgaaggagaagctcttaaaagagtacttaatggtgatagaaatccccgtccaaggctgggaccatggcacaactcatctcatcaatgccgcaaagttggatgaagctaacttaccaaaagaaatcaatctggtagatgattactttgaacttgttcagcatgagtacaagaaatggcaggaaaacagcgagcaggggaggagagaggggcacgcccagaatcccatggaaccttccgtgccccagctttctctcatggatgtaaaatgtgaaacgcccaactgccccttcttcatgtctgtgaacacccagcctttatgccatgagtgctcagagaggcggcaaaagaatcaaaacaaactcccaaagctgaactccaagccgggccctgaggggctccctggcatggcgctcggggcctctcggggagaagcctatgagcccttggcgtggaaccctgaggagtccactggggggcctcattcggccccaccgacagcacccagcccttttctgttcagtgagaccactgccatgaagtgcaggagccccggctgccccttcacactgaatgtgcagcacaacggattttgtgaacgttgccacaacgcccggcaacttcacgccagccacgccccagaccacacaaggcacttggatcccgggaagtgccaagcctgcctccaggatgttaccaggacatttaatgggatctgcagtacttgcttcaaaaggactacagcagaggcctcctccagcctcagcaccagcctccctccttcctgtcaccagcgttccaagtcagatccctcgcggctcgtccggagcccctccccgcattcttgccacagagctggaaacgacgcccctgctggctgcctgtctcaagctgcacggactcctggggacaggacggggacgagcaagtgcagaaaagccggctgcgtgtattttgggactccagaaaacaagggcttttgcacactgtgtttcatcgagtacagagaaaacaaacattttgctgctgcctcagggaaagtcagtcccacagcgtccaggttccagaacaccattccgtgcctggggagggaatgcggcacccttggaagcaccatgtttgaaggatactgccagaagtgtttcattgaagctcagaatcagagatttcatgaggccaaaaggacagaagagcaactgagatcgagccagcgcagagatgtgcctcgaaccacacaaagcacctcaaggcccaagtgcgcccgggcctcctgcaagaacatcctggcctgccgcagcgaggagctctgcatggagtgtcagcatcccaaccagaggatgggccctggggcccaccggggtgagcctgcccccgaagacccccccaagcagcgttgccgggcccccgcctgtgatcattttggcaatgccaagtgcaacggctactgcaacgaatgctttcagttcaagcagatgtatggctaaccggaaacaggtgggtcacctcctgcaagaagtggggcctcgagctgtcagtcatcatggtgctatcctctgaacccctcagctgccactgcaacagtgggcttaagggtgtctgagcaggagaggaaagataagctcttcgtggtgcccacgatgctcaggtttggtaacccgggagtgttcccaggtggccttagaaagcaaagcttgtaactggcaagggatgatgtcagattcagcccaaggttcctcctctcctaccaagcaggaggccaggaacttctttggacttggaaggtgtgcggggactggccgaggcccctgcaccctgcgcatcaggactgcttcatcgtcttggctgagaaagggaaaagacacacaagtcgcgtgggttggagaagccagagccattccacctcccctcccccagcatctctcagagatgtgaagccagatcctcatggcagcgaggccctctgcaagaagctcaaggaagctcagggaaaatggacgtattcagagagtgtttgtagttcatggtttttccctacctgcccggttcctttcctgaggacccggcagaaatgcagaaccatccatggactgtgattctgaggctgctgagactgaacatgttcacattgacagaaaaacaagctgctctttataatatgcaccttttaaaaaattagaatattttactgggaagacgtgtaactctttgggttattactgtctttacttctaaagaagttagcttgaactgaggagtaaaagtgtgtacatatataatatacccttacattatgtatgagggatttttttaaattatattgaaatgctgccctagaagtacaataggaaggctaaataataataacctgttttctggttgttgttggggcatgagcttgtgtatacactgcttgcataaactcaaccagctgcctttttaaagggagctctagtcctttttgtgtaattcactttatttattttattacaaacttcaagattatttaagtgaagatatttcttcagctctggggaaaatgccacagtgttctcctgagagaacatccttgctttgagtcaggctgtgggcaagttcctgaccacagggagtaaattggcctctttgatacacttttgcttgcctccccaggaaagaaggaattgcatccaaggtatacatacatattcatcgatgtttcgtgcttctccttatgaaactccagctatgtaataaaaaactatactctgtgttctgttaatgcctctgagtgtcctacctccttggagatgagatagggaaggagcagggatgagactggcaatggtcacagggaaagatgtggccttttgtgatggttttattttctgttaacactgtgtcctgggggggctgggaagtcccctgcatcccatggtaccctggtattgggacagcaaaagccagtaaccatgagtatgaggaaatctctttctgttgctggcttacagtttctctgtgtgctttgtggttgctgtcatatttgctctagaagaaaaaaaaaaaaggaggggaaatgcattttccccagagataaaggctgccattttgggggtctgtacttatggcctgaaaatatttgtgatccataactctacacagcctttactcatactattaggcacactttccccttagagccccctaagtttttcccagacgaatctttataatttctttccaaagataccaaataaacttcagtgttttcatctaattctcttaaagttgatatcttaatattttgtgttgatcattatttccattcttaatgtgaaaaaaagtaattatttatacttattataaaaagtatttgaaatttgcacatttaattgtccctaatagaaagccacctattctttgttggatttcttcaagtttttctaaataaatgtaacttttcacaagagtcaacattaaaaaataaattatttaagaacaaaaaaaaaaaaaaa

SEQ ID NO: 2904 - DNA, 4180 bp, Homo Sapiens
  NM_006291
ccagggtgatgctgaagatgatgaccttcttccaaggcctctagagccatcagcctgtgccaggcaccctcgacttgcctagaggcccccaaaagttgcagtccacatcagaggcagagtcagaggcctccatgtcggaggcctcctctgaggacctggtgccacccctggaggctggggcagccccatatagggaggaggaagaggcggcgaagaagaagaaggagaagaagaagaagtccaaaggcctggccaatgtgttctgcgtcttcaccaaagggaagaagaagaagggtcagcccagctcagcggagcccgaggacgcagccgggtccaggcaggggctggatggcccgccccccacagtggaggagctgaaggcggcgctggagcgcgggcagctggaggcggcgcggccgctgctggcgctggagcgggagctggcggcggcggcggcggcgggcggtgtgagcgaggaggagctggtgcggcgccagagcaaggtggaggcgctgtacgagctgctgcgcgaccaggtgctgggcgtgctgcggcggccgctggaggcgccgcccgagcggctgcgccaggcgctggccgtggtggcggagcaggagcgcgaggaccgccaggcggcggcggcggggccggggacctcggggctggcggccacgcgcccgcggcgctggctgcagctgtggcggcgcggcgtggcggaggcggccgaggagcgcatgggccagcggccggccgcgggcgccgaggtccccgagagcgtctttctgcacttgggccgcaccatgaaggaggacctggaggccgtggtggagcggctgaagccgctgttccccgccgagttcggcgtcgtggcggcctacgccgagagctaccaccagcacttcgcggcccacctggccgccgtggcgcagttcgagctgtgcgagcgcgacacctacatgctgctgctctgggtgcagaacctctaccccaatgacatcatcaacagccccaagctggtgggtgagctgcagggtatggggctcgggagcctcctgccccccaggcagatccgactgctggaggccacattcctgtccagtgaggcggccaatgtgagggagttgatggaccgagctctggagctagaggcacggcgctgggctgaggatgtgcctccccagaggctggacggccactgccacagcgagctggccatcgacatcatccagatcacctcccaggcccaggccaaggccgagagcatcacgctggacttgggctcacagataaagcgggtgctgctggtggagctgcctgcgttcctgaggagctaccagcgcgcctttaatgaatttctggagagaggcaagcagctgacgaattacagggccaatgttattgccaacatcaacaactgcctgtccttccggatgtccatggagcagaattggcaggtaccccaggacaccctgagcctcctgctgggccccctgggtgagctcaagagccacggctttgacaccctgctccagaacctgcatgaggacctgaagccactgttcaagaggttcacgcacacccgctgggcggcccctgtggagaccctggaaaacatcatcgccactgtagacacgaggctgcctgagttctcagagctgcagggctgtttccgggaggagctcatggaggccttgcacctgcacctggtgaaggagtacatcatccaactcagcaaggggcgcctggtcctcaagacggccgagcagcagcagcagctggctgggtacatcctggccaatgctgacaccatccagcacttctgcacccagcacggctccccggcgacctggctgcagcctgctctccctacgctggccgagatcattcgcctgcaggaccccagtgccatcaagattgaggtggccacttatgccacctgctaccctgacttcagcaaaggccacctgagcgctatcctggccatcaaggggaacctatccaacagtgaggtcaagcgcatccggagcatcttggacgtcagcatgggggcgcaggagccctcccggcccctattttcccttataaaggttggttagcttttcctgtggcctgacctgcctgtgagtgcccagcaagccttgggcacaccccgctgggagctgttaagagcagcgctggttctcggttcctcccgggtctcctgtgctctgatgctacttctgcctagccctggcggaggtgcaggccctgtcagctggaactggacagaccttggtttgtttacatgtccgatgggggcaggagctcccatcctgggcagccaaccaggcaacaccaaggactctttgtaaacgatagctgatcgtgtgcacgcaaggaaagaaccaggagggagagtgcagccaggctcagggatccccggacacctctgtccagagcccctccacagtcggcctcatgactgtcctcctcgtgggtggggccgagggccctcttcagctctctggagacaggggccgagcctcacccatctgccctctgcagcccagggccgccgtgagcgggattcagcaatggtggaatggaagacagaactggaagagaaagaaggaaaagatgagctctcgtctggcaggggcttttagggtcctgtggcgagctgtgagcaccgccagcattagacgtcacatccaggtggccccacggcccctacaggctggccctgcaatggggccctgagccctccctcttcatcccccaaggcctcaactagagggtggtcccccgagggcttggtgtctactaccgaagggcccaagacctcctgggtcctctcaggctcccccttccccaaggcagggacaggccctgggggtgccaccgtgggccctgccacccagaagtctggctgaggtctgggcaggggcagggcaagcttgacctctcactgttgaccctttggcctctgtatttgtttcctattgccgtgacaggtttccacaaacttcgtggatcaaaacgaggtcttccagttctgcgggtcagaaggctgacccggggctcaaatctgggtgtcggcagtcctgcactccttctggaggctctaggggagaattcatttctggccttttcatttttagaggctgaccgtaattcttgacttcaggctcctccatcttcagagccagctgtgggtagttgaatctttttcccgtcacctcattgaggcctcccctctcctgcctccctccaccacttttttttttttttttttgagacagggtcttgctgtgttgcccaggctggagtgcagtggcctggtcatggcatcaaggctcactgcagcctggacctcctggttcaagtgatcctcttgtctcagtcccctgagacaatcccccacgcccagctacatattttttgtggatacagggtctcattctgttgcctaggcttgtctggaactcctgggctcaagggatcttgtagccttagcctcctaaagtgctgggattataggcatgagtcactgtacccggcctgctctaccgcttttaaggacgcttatgatcacattgcgcctacccagagaacccaggtcgtctttctattttcaggtcagctgattagccaccttagttccatctgcaactttagttcccactggctgtgtaacctaacatagtcacaggctctggggactgtcacgtggacatctttgggaggccgttattctgcccaccgcaccctccgttcatcccctgccctgccgggcacctcgctctaccccaggaaaatgtgagctcgttttcctgctcggcatgtgctccccctaaggctctgctcctccctgggcctgaaagttccttctcagcctgagagggggcccttcggactcaggcatgactcagcccggctgatgcctctgcagtgctgagtcaggatttggggccggctctcttgggtccgtccccttttcccaggtactgccttacaaagctgtggccaggaagtggccggtataaaggatgcccaaggtctttgtacgtgtgtaggagttagcgtgtttgatattgttaatataataataattattttttagagtactgcttttgtatgtatgttgaacaggatccaggtttttatagcttgatataaaacagaattcaaaagtgaaaaa

SEQ ID NO: 2905 - DNA, 1550 bp, Homo Sapiens
  NM_006292
gtagtggtgccgacttcctgttgtttgaggccgggttgggggtgtgcgattgtgtgggacggtctggggcagcccagcagcggctgaccctctgcctgcggggaagggagtcgccaggcggccgtcatggcggtgtcggagagccagctcaagaaaatggtgtccaagtacaaatacagagacctaactgtacgtgaaactgtcaatgttattactctatacaaagatctcaaacctgttttggattcatatgtttttaacgatggcagttccagggaactaatgaacctcactggaacaatccctgtgccttatagaggtaatacatacaatattccaatatgcctatggctactggacacatacccatataatccccctatctgttttgttaagcctactagttcaatgactattaaaacaggaaagcatgttgatgcaaatgggaagatatatcttccttatctacatgaatggaaacacccacagtcagacttgttggggcttattcaggtcatgattgtggtatttggagatgaacctccagtcttctctcgtcctatttcggcatcctatccgccataccaggcaacggggccaccaaatacttcctacatgccaggcatgccaggtggaatctctccatacccatccggataccctcccaatcccagtggttacccaggctgtccttacccacctggtggtccatatcctgccacaacaagttctcagtacccttctcagcctcctgtgaccactgttggtcccagtagggatggcacaatcagcgaggacaccatccgagcctctctcatctctgcggtcagtgacaaactgagatggcggatgaaggaggaaatggatcgtgcccaggcagagctcaatgccttgaaacgaacagaagaagacctgaaaaagggtcaccagaaactggaagagatggttacccgtttagatcaagaagtagccgaggttgataaaaacatagaacttttgaaaaagaaggatgaagaactcagttctgctctggaaaaaatggaaaatcagtctgaaaacaatgatatcgatgaagttatcattcccacagctcccttatacaaacagatcctgaatctgtatgcagaagaaaacgctattgaagacactatcttttacttgggagaagccttgagaaggggcgtgatagacctggatgtcttcctgaagcatgtacgtcttctgtcccgtaaacagttccagctgagggcactaatgcaaaaagcaagaaagactgccggtctcagtgacctctactgacttctctgataccagctggaggttgagctcttcttaaagtattcttctcttccttttatcagtaggtgcccagaataagttattgcagtttatcattcaagtgtaaaatattttgaatcaataatatattttctgttttcttttggtaaagactggcttttattaatgcactttctatcctctgtaaactttttgtgctgaatgttgggactgctaaataaaatttgttgcataaaaaaaaaaaaaaaaaa

SEQ ID NO: 2906 - DNA, 4433 bp, Homo Sapiens
  NM_006294
agcggcctttctctgttcgcgatgtgacgtaacgcgcctgcggactgggcccagcttgtcctctatgacttacccagaaggcaacgcttctctttctggtcaaaatggctggtaagcaggccgtttcagcatcaggcaagtggctggatggtattcgaaaatggtattacaatgctgcaggattcaataaactggggttaatgcgagatgatacaatatacgaggatgaagatgtaaaagaagccataagaagacttcctgagaacctttataatgacaggatgtttcgcattaagagggcactggacctgaacttgaagcatcagatcttgcctaaagagcagtggaccaaatatgaagaggaaaatttctaccttgaaccgtatctgaaagaggttattcgggaaagaaaagaaagagaagaatgggcaaagaagtaatcatgtagttgaagtctgtggatgcagctgttatgaagatggttaaacttgaaacaaacaattttaagaattatttggtctgaagatgttttactttaaataaatgtctattgtaatggctggagtttttgaattccaaaccttatactgaataactactgaatccctttactgttaaatttttttccaaactttcaagatatatttagttgtgtttaactgctacttggagctcagaagccactttatcagttttcctcactggttggatagcctatcagtttatggaaggatataacttccgtaagttacatccttatggaagctactgaataaaagaagggggtatgcaccccctagtttgccaagattgagaaatagcctcttcactggtatgcaaacagatttgattttgcatcctatcatttaaaaagaaattatgtctgcaccccaacataggcatacttaagtaatatacatactcctgtgctaacatgtatactagaaaacaaaaagatgttagaaaaataaaagtataaagacaaatcatactgtccccatatcccagtgacttttccactttggaaatgattgttatgaagtttaagggttggatactagtcagttaaaagttttaagattatagggtaatttttaaaaatataaattagaatcattggcaaggcatggtggctcatgcctgtaatcccagcactttgggaggccgaggcgggcgggtcacctgaagtcaggaatttgagaccagcctggccaacatggtgaaaccctgtctctactaaaaatacaaaaaattagctaggcgtgatggtaggcacctgtaatcccagctactcgggaggctgagggaggagaattgcttgaccccaggaggtggaggttgcagtgagcctagatcacaccactgcacttcagcctgagcgacattgactgtctcaaaaaaaaaattaggattattcaatgttgtcatcatttccactcctaaattctgaaatgctttctttggtagaggtgagagtgtggagccacagctagtagagaaggaacagtaggacctgcagcctccctggttttccaggacaagtcattgctgtgtgtggcaggaatgccttacctcaaataacaaaacagtgtgaaaaacgaatttgtgttacatttaaagtttgtaaagcaatgagaaatgtgtgtatcataaagagcatctttaaatttttgctaaaatattagcctcttaaattctctaggaaccccctcccccgcttttttttttcctttcgctggtcgttatttttctaaacctatcctgaaatcatgtcaattttcttttgtatggttgaagacaactagatcacttgataatggttttgctcaggtcacattgtgacaaggttttaatgtagtcctactttgcagaaggaggccaagaagatgggctgtctagaaccccctttaaaagcatttgtctattcagaaaattttcctgagtagatctctgcaaaggctcttttaatagtgatttcaagatcacgtttgcaggactctggtctattcgttcagacgtctactgtgcacaattacaaggagactacaactgaggcatctcaaagagcactgtcaaggtgtgtagggagccgggtgggtggagggaggctgggctctgaccctagaaaccatgcttatgaatgctgttaatgtttaaagcaagcctaagggcactgctgaaggacaggggaacaaatagaactgaccaagactgaggtataacaggaacccccaggctatccacctgctcaaggtaaagtgtggtattacataaggcaacctctgattttgtaagagttcttcctaaagccaaagtgtatgcctattctatgtttccagattacttcattcttctaaatgagaacaagtgtgcaaaagttctttgaacactagatcaatgttttgtgttcattataaattatggttatcgtcctgcttgttatgaagactaagaaagtagatctagtatttggctcacacaggtgaatgggtgagaatttgttaatccatcagtgaagtcctttcatttgaaagagagggcctttctattatcaaaagccgtcctgtgtggaaaatcaccatgagagtgcctgaaacacaggcactctgcattgtcctgtagaccaaatctacattgtcctgtagtctggtctacattgtcctgtagaccgaatggtagagtgattcagagctaattctgggttagactgcacaggtctgaatctatttgctcactgtgtagtgctttaggaatacaatttaacctctccgtgcttcagtttgtttgtccctaagatagagctaatgatagaaacctacttcacccagttgtgaaaattaactgactgcatgtcaagcactaacagtttctggcatatagtatgcataatgtaaattatgtgctgagaagcgagaaagaataacttgggaaaacgctgaatatcatcaatgtcgaatagctaaccagtagctaaggtccaaggtctcctctcttccttctatgtggcactcttgtttctggttcatctactccccttgggtgtcacctccttgagtgaagtacctgctggagatgagaagagtggaactggatctgcatgacagctttgattaggatggagctaagacttggctatctccctgttttgtgttttggatgggtgacattttaaaactgccaatattcaaatcctgctaatttgctttgtacagtttaaaatgtttgatatcttttgttgtttaaagtttgagattggttttgaatatacagttttcctacatcttgaagaaagttatgtttgtttactctgaagtggtctatgttctgtttgtttgttttactatactttgcaaaaaaacagatggctggcttatgttcactgttgtagtgcactacctagtatcacttggccttcctgttgtcaagatgtaggaagcagcgtaagggatgtcgggccttcagacccccaattgccagctgtggtcctagttccagattgcatggaaatatttgataacattcctgcactgagttatcatggtctgaatatttatgtgacgctctacgagtggtaccaaaatgttagtgatggagtttttactaatggcaccttttcctgtttttaaattctagaatcttaataaatccaaagtgtacattttggtagtgatttcatttagttatttactttaaggactcccttttcaagcattaactctgcactaattttgacttatgaaaagattcagcagtaagaataaaaactgggccaaagcccaaagtaataatccttcacaaataggatggagttttaaaaatatgggcatcctgtgtgtagctttgaaaataaccaaactacttggaattaaaaagttaggtgaacatgaagattgtcataaccaaatccttgacagcttgatggatgaagagcagatgggtttatggtgtatgggaggaagcatggattttaggagggacagtatcagagagggatggttagaaagtgagtaagacaggttgctctttggaaaacaaggaaaatccctttattagaacaaggcatgaaattctgccactaggtggcgatgccctataactttacaacttagtgtacatcacacgagcactatggaagatttctccattctgcgccccaccaactccctcccctccttcatttttcaggatgacaacaccttagaggtttatggccatcaggagaatttactactaagctatatactgatgtaatgaaatctaatatatgttgtgcaatgaattatgagatgttatttagtttcaggattttattacttcaatcagttatgaccatatttccttttatatgattgctcactctttaaacataccagatgactgtataaggaacacctaataaagtctatagatgttaaaataaaaaaaaaaaaaaa

SEQ ID NO: 2907 - DNA, 4308 bp, Homo Sapiens
  NM_006295
gcgcctgacgggagcgtcgtgctcaggggtgtcctctcgtcctgcgtccgcgcccagcgccccgcgccccgcgctgttcctcgtgagaccggcgggcggcgagccgcgcggcccccggggcagtgtcggacacggcgggcgcgcactcgcaggcggggcacggccgcccccgccaggacccgcaggcccggaaacgctccctgtcacaaaggggggaacacgtgggcgccggctgccggggcggcgatcttagggaactagggtcacctggagagccgcccaccgtctctgcccgctcgactcctccgcccgggccgctcggccggtccagccgcggccggcgcctggctgtgaggtggattcccggcccagtctgaccatctccctccagtttttccacttcgttcggaccttctcataactatgtccaccctctacgtctcccctcacccagatgccttccccagcctccgagccctcatagccgctcgctatggggaggctggggagggtcccggatggggaggagcccacccccgcatctgtctccagccacccccgactagcaggactccctttcccccaccccgcctgccggccctggagcaggggcccggtgggctctgggtgtggggggccacggctgtggcccagctgctgtggccagcaggcctggggggcccagggggcagccgggcggctgtccttgtccaacagtgggtcagttacgccgacacggagttaataccagctgcctgtggagcaacgctgccggccctgggactccgaagctcggcccaggacccccaggctgtgctgggggccctgggcagggccctgagccccttggaggagtggcttcggctgcacacctacttggccggggaggcccccactctggctgacctggcggctgtcacagccttgctgctgcctttccgatacgtcctagacccacctgcccgccggatctggaataatgtgactcgctggtttgtcacgtgtgtccggcagccagaattccgagccgtgctaggagaagtggttctatactcaggagccaggcctctctctcatcagccaggccccgaggctcctgccctcccaaagacagctgctcagctcaagaaagaggcaaagaaacgggagaagctagagaaattccaacagaagcagaagatccaacagcagcagccacctccaggggagaagaaaccaaaaccagagaagagggagaaacgggatcctggggtcattacctatgacctcccaaccccacccggggaaaagaaagatgtcagtggccccatgcccgactcctacagccctcggtatgtggaggctgcctggtacccttggtgggagcagcagggcttcttcaagccagagtatgggcgtcctaatgtgtcagcagcaaatccccgaggtgtcttcatgatgtgcatcccaccccccaatgtgacaggctccctgcacctgggccatgcactcaccaacgccatccaggactccctgactcgatggcaccgcatgcgtggggagaccaccctgtggaaccctggctgtgaccatgcaggtattgccacccaggtggtggtggagaagaagctatggcgtgagcagggactgagccggcaccagctgggccgcgaggcctttctacaggaagtctggaagtggaaggaggagaaaggtgaccggatttaccaccagttgaagaagcttggcagctccttggactgggatcgagcctgtttcaccatggaccctaaactctcagcagctgtgacagaggcctttgtccggcttcacgaggaaggcatcatctatcgcagtacccgccttgttaactggtcctgcaccctcaactccgccatctctgacattgaggtggataagaaggagctgacaggtcgcaccctgctctccgtgcctggctacaaggagaaggtggagttcggggtcctcgtgtcctttgcctataaggtccaaggctcagatagcgacgaggaggtggtggtggcaacaactcggatcgagacaatgctgggagatgtggctgtagctgtgcaccccaaagataccagataccagcacctgaaggggaagaacgtgatccacccattcctgtctcggagccttcccattgtcttcgatgaatttgtggacatggactttggcacaggtgctgtgaagatcacccccgcacatgaccaaaatgactatgaagttgggcagcggcacgggctggaggccatcagcatcatggactcccggggggccctcatcaatgtgcctccgcctttcctgggcctgcccaggtttgaggccaggaaagcggtgctggtggcgctgaaggagcggggactgttccgtggcattgaggacaaccccatggtggtgccactttgcaaccggtcgaaggacgtggtagagcctctgctgcggccgcagtggtacgttcgctgcggggagatggcccaggctgccagcgccgctgtgactcggggtgacctccgcatcctgcctgaggcccatcagcgcacatggcatgcctggatggacaacatccgggagtggtgcatttccaggcagctgtggtggggccatcgcatcccagcctactttgtcactgtcagtgacccagcggtgccccctggggaggaccctgatgggcggtactgggtgagtggacgcaatgaggcggaggcccgggagaaggcagccaaggagttcggagtgtcccctgacaagatcagtctccagcaagatgaggatgtattggatacctggttctcctctggcctcttccccttatccattttgggctggcccaaccagtcagaagacctgagtgtgttctaccccgggacactgctggagaccggtcatgacatcctcttcttctgggtggcccggatggtcatgctgggcctgaagctcacgggcaggctgccctttagagaggtctacctccatgccatcgtgcgagatgctcacggccggaagatgagcaagtctctaggcaatgtcatcgatcccctggacgtcatctatggaatctccctgcagggcctccacaaccagctgctgaacagcaacctggatcccagcgaggtggagaaggccaaagaagggcagaaagctgacttcccagcggggattcctgaatgtggcaccgatgctctccggtttggattatgtgcctacatgtcccagggtcgtgacatcaacctggatgtgaaccggatactgggttaccgccacttctgcaacaagctctggaatgccaccaagtttgcccttcgtggccttgggaagggttttgtgccctcacccacctcccagcccggaggccatgagagcctggtggaccgctggatccgcagccgcctgacagaggctgtgaggctcagcaatcaaggcttccaggcctacgacttcccggccgtcaccactgcccagtacagcttctggctctatgagctctgtgatgtctacttggagtgcctgaaacctgtactgaatggggtggaccaggtggcagctgagtgtgcccgccagaccctgtacacttgcctggacgttggcctgcggctgctctcacccttcatgcccttcgtgacggaggagctgttccagaggctgccccggaggatgccgcaagctccccctagcctctgtgttaccccctacccggagccctcagagtgctcctggaaggaccccgaggcagaagccgcccttgagctggcgctaagcatcacgcgagccgtgcgctccctgcgggccgactacaacctcacccggatccggcctgactgtttcctggaagtggcggatgaggccacgggcgccctggcatcggcggtgtcgggctacgtgcaggccctggccagcgcaggtgtggtggctgttctggccctgggggctcccgccccccagggttgcgctgtggctctggcttctgatcgctgctccatccacctgcagcttcaggggctggtggaccctgcacgggagctgggcaagctgcaagccaagcgagttgaggcccagcggcaggcccagcgtctgcgggaacgccgtgctgcctcgggctatcctgtcaaggtgccgctcgaagtccaggaggcagatgaagccaagctccaacagacagaagcagagctcaggaaggtggatgaggccatcgccctattccagaagatgctgtgatccaccacccagcttcacccctcacccccagcggctcaccatggggatggcagcaataaaatattttcccacaaaaaaaaaaaaaaaaaa

SEQ ID NO: 2908 - DNA, 1944 bp, Homo Sapiens
  NM_006296
gctccgcgggccgctgcactgcgaggccgacgcagctggagagaagttaggcaggtcctagggagggcaggctcgagtgctgggcccgcctccccgcgggactgtaggcccgggggctccgcctcgtcgcagcggcaggtaggaggcggtgcgcgcggcccggcgacgggggatcctgaggcccgaagtgatgccaccaaaaagaaatgaaaaatacaaacttcctattccatttccagaaggcaaggttctggatgatatggaaggcaatcagtgggtactgggcaagaagattggctctggaggatttggattgatatatttagctttccccacaaataaaccagagaaagatgcaagacatgtagtaaaagtggaatatcaagaaaatggcccgttattttcagaacttaaattttatcagagagttgcaaaaaaagactgtatcaaaaagtggatagaacgcaaacaacttgattatttaggaattcctctgttttatggatctggtctgactgaattcaagggaagaagttacagatttatggtaatggaaagactaggaatagatttacagaagatctcaggccagaatggtacctttaaaaagtcaactgtcctgcaattaggtatccgaatgttggatgtactggaatatatacatgaaaatgaatatgttcatggtgatataaaagcagcaaatctacttttgggttacaaaaatccagaccaggtttatcttgcagattatggactttcctacagatattgtcccaatgggaaccacaaacagtatcaggaaaatcctagaaaaggccataatgggacaatagagtttaccagcttggatgcccacaagggagtagccttgtccagacgaagtgacgttgagatcctcggctactgcatgctgcggtggttgtgtgggaaacttccctgggaacagaacctgaaggaccctgtggctgtgcagactgctaaaacaaatctgttggacgagctcccccagtcagtgcttaaatgggctccttctggaagcagttgctgtgaaatagcccaatttttggtatgtgctcatagtttagcatatgatgaaaagccaaactatcaagccctcaagaaaattttgaaccctcatggaatacctttaggaccactggacttttccacaaaaggacagagtataaatgtccatactccaaacagtcaaaaagttgattcacaaaaggctgcaacaaagcaagtcaacaaggcacacaataggttaatcgaaaaaaaagtccacagtgagagaagcgctgagtcctgtgcaacatggaaagtgcagaaagaggagaaactgattggattgatgaacaatgaagcagctcaggaaagcacaaggagaagacagaaatatcaagagtctcaagaacctttgaatgaagtaaacagtttcccacaaaaaatcagctatacacaattcccaaactcattttatgagcctcatcaagattttaccagtccagatatattcaagaagtcaagatctccatcttggtataaatacacttccacagtcagcacggggatcacagacttagaaagttcaactggactttggcctacaatttcccagtttactcttagtgaagagacaaacgcagatgtttattattatcgcatcatcatacctgtccttttgatgttagtatttcttgctttattttttctctgaagatgataccaaaattccttttgataattttttaagtttccagctcttcaccgaaatgttgtattcttatttcagtgtttccttccagacatttttaaggtaattggctttaaaaagagaacatattttaacaaagtttgtggacactctaaaaaataaaattgctttgtactagaaatagtgtcatagaatagtgtcatagtacagtttggaaaacacttctgaag

SEQ ID NO: 2909 - DNA, 1698 bp, Homo Sapiens
  NM_006299
gtccgccttcgaggagaggtcggcatctttgttccctgcccggccattgttcgtgccgcgcttctagcaacgccgggccggtaaccccctctccctccttgcgcgttccgggtctcgcaagcgcctccaaggtttgtcttgaagcatagctccagctggagggtaccttttaagctgttcaaggtcaagatgaatacaaactcaaaggaggttttatccctgggtgttcaagttcccgaggcatgggaagaacttctgacaatgaaagtggaagcaaaaagtcaccttcaatggcaggaatccagactgaaacgcagtaatccactggcaagggaaatcttccgaaggcactttcgacagctgtgctaccaagagacccctggaccaagggaggctcttactcgactccaggaactttgctaccagtggttgaggccacatgtgagcacaaaggagcagattttggatctgctggtgctggagcagtttctatccattctgcccaaggagctccagggctgggtgagggaacactgtccagagagtggagaagaggctgtgattttgctggaggatctggagagagagctcgatgaaccacaacatgagatggtggcccacagacacagacaagaagtcctctgtaaagagatggtgcctctagcagagcagacaccactgacccttcagtcccagcctaaggagccacagctcacatgtgactctgctcagaagtgccattctattggagagacagatgaagtaaccaagactgaggacagagagttggtgctaaggaaagactgtcctaagatagtggaaccacatgggaaaatgtttaatgagcagacctgggaggtatcacagcaggatccctcacatggagaagttggtgaacataaggataggatagagaggcagtggggaaacctcttaggagaggggcaacacaaatgtgatgaatgtgggaagagctttactcagagctcaggtctcattcgacatcaaagaattcatactggagaaagaccttatgaatgtaatgaatgtgggaaagccttcagtcgaagttctggtctttttaatcaccgaggaatccacaatatacagaaacggtaccactgcaaggagtgtgggaaggtcttcagtcagagtgcgggtcttatccagcatcagagaatccacaaaggagaaaagccgtatcagtgcagccagtgcagtaagagctacagtcggcgttcatttctcattgaacatcagagaagccacacaggggagcgacctcaccagtgcattgaatgtgggaaaagctttaatcgacactgcaacctcattcgccatcagaagatccacacagtggctgagctggtctagggcttggctatgagcaagttttccagatcaccacccaagttgtgtggggcaggttgagactagaaaatgcctctttcttcctttctccatgaaatgtgtttgaaacaaatcctgacttaaggcccagggacttccttaaaggaaagttgggtgtttgaagctactgttttctcttttgttcattttacctctttcttactcttactagctgtgtccctcttatttataatttatttatttttttgagatggctgctaaacccttctaataatataataaatggcactgccacagccaacatgcctgaaaaaaaaaaaaaaaaaa

SEQ ID NO: 2910 - DNA, 4132 bp, Homo Sapiens
  NM_006300
agacgctctgtggagacgcgagcacttccggtgtgtgagcctgcggttgctacataaccgcgtagtttgagccatttctgcgtctggcgggtccttctgaacttgtcaccttcgcttggggtcgcaacgacccgatgatcgatgatccaagcaagggaaaagaagccttggcggagagcggaggcacaattccaccttcctttgtgctccattactcaagacactgaagactccaaaaagtaggaggaaaaatgaccacattcaaggaggcagtgaccttcaaggatgtggctgtgttcttcactgaggaggaactggggctactggaccctgcccagaggaagctgtaccaagacgtgatgcttgagaacttcacgaacctgctgtcagtggggcatcaaccattccaccctttccacttcctaagggaagaaaagttttggatgatggagacagcaacccaaagagaaggaaattcaggcggcaagactattgcggaagcaggaccacatgaagactgcccttgccagcaaatctgggaacaaactgcaagtgacttaacccagtctcaagactccatcataaataattctcacttctttgaacaaggtgatgtcccctcccaggttgaggcaggactatctataattcatacaggacagaaaccttcacagaatgggaagtgtaaacagtccttcagtgatgttgccatctttgatcctcctcagcagttccactcaggagagaagtctcatacatgcaatgagtgtggaaaaagcttctgttacatctcagctcttcgtattcaccagagagttcacttgagagagaaactctctaagtgtgacatgcgtggtaaggaattcagtcagagctcatgtctgcaaactcgtgagagagtccacactggagagaaaccattcaaatgtgagcaatgtgggaaaggcttcagatgtagagcgatacttcaagttcactgcaaattacacacaggagagaaaccttatatttgtgagaaatgtgggagggccttcattcacgatttccagcttcagaaacatcagataattcatactggggagaagccgttcaaatgtgaaatatgtggtaagagcttctgccttaggtcaagtcttaataggcattgcatggtccacacagcagagaaactgtacaaatctgaggagtgtggaaaaggcttcactgatagcctagatttgcataagcatcagataattcacacaggacagaaaccgtacaattgtaaagaatgtgggaagagcttcagatggtcctcatatcttttgatccatcagcgaatccacagtggagaaaaaccatacagatgtgaggagtgtgggaagggctacattagtaagtcaggtcttaacttgcaccagagggtccatactggagagagaccttataattgtaaggaatgtgggaagagctttagccgggcttcaagtattttgaatcataagaaactccactgccggaaaaaacccttcaaatgtgaggattgtggaaagaggcttgtacaccggtctttctgtaaagaccaacaaggagaccacaatggagaaaactcatccaaatgtgaggactgtgggaagcgctacaagaggcgcttgaatctggatataattttatcattatttttaaatgatatgtaagttgtacatatatatgggatatggtatgaaattttaatatgtgtatataatacgtaatgatcaaattgatgtaattagtgtattaccttaaacaattaacatttctttgttttgggaaaattcaaaatccattgttctagcgatttgaaaagaaacaataaattattgttgattatagtcacctttggtgctttagaacactagaatgtatttctcctatctagcagtacttatgtatcttgttacccaatctttggctatctcacctaacccctacacttccctgcttctagaaccactgttttactcactaattctatgaaatcaacttttttagcttccatatgtgtgtgaggacagttagtatttatcttaccttgcttagcttatattgtttaacatgtcctccaaagctcatctatgttgccacaaatgacacaattttgttttctttttatgcccaaagagtattctattgtgtatatatgccaccttttcttcatttatctattgatggacacataggtgggttccatatcttaactattgtgaagaatagtgctccaatgaacatggtagtgtagatatctgatccacatactgatttcctttgctttggatatactcaatagtgggattgctagatcactcgaatcttatgcctcagaggcttgacacaagagcaaaactatggaagtgtggctagggtgatatggcttcataccacctcaggcctcaagtcctcaactgcaccagagtgtccacgttggacagaatccttagtaatgaggtgtgtgataaagtctctgctcagttgtctataatctcatttgagagttcacaaaggggcaaaacattaaaaagaggcatatggtaagcacttcagtgtgtgtttatatcataatttatcacagtccatactgataatatatttcatccaggcttgtaggacagaaaacatttgtttaagttaaattcagtgtttcaccatagctcagcattctcccatcatcctaggaccatcgtagtagagaactcttgtaaattgtgcagtagggttgcaaacagaacttacgcttgtcattcaggagacaggccttagaataagagtttgttcacacatttacaaaaccctaatgatgaacatgtcaaaagtggtgaccactagaatgtcaactacaggtaccttgttttctgcatcctcaggaccttaacactgattagcacttacatgtttagtatgtgttaaatgactcaaaaggagaaaatatgatattttaaaattgcatctaggagagaaaatctacaaaaaataattcagggacacgagttaaaatgcagaatacactcagttctgcaatccaaagcattattttgggtaatcttaccctgttgcacttggctgctggcttcccctcatcctctgttctgaagtttactactagtggctttgtctaatgctccattggttgcatacaatataaattcaacaatcatttgtaactcttctcacactacaggctgaaaatggtttgttaacttgtcaataacagtccactgcatatatcacaattacatttttttcaacagtgttaaggcaaaatttatagtaatactttttacgtggcagatgtagttacgttggaaaaaacttccttagttctgaattctcatgattgcttctgtatttccatgcaggccttgatataatggccttctaattgtggtagcatttattttatcaaacaactcaggtagaagctatgccaatttgacaatttttggaaacctaacctaatattctcttcctatctctatgaaataccaagagaaacctatcggagtttggtaatttcatgaaatgtatccatgattggggtaggagtgacatttacatgctcttctttattgttggcagtaaaaataagtcttttgtaagcagtgtatatcagaatgtataaggtacaagtgttttacctggaaatgatgggataggaaattatgattatgatgttaaaactgtgaaaagtagaaaaccacatggatgatatcaccccattttaaaatggaataagtattcaacaagaatttgtgtgaaatgcatttattcctataacataagaccaataaaatgagggaaccagacatacagtaaaaggagaaaaacataatgtgagctttgtgaaatctgactgtaaccttcataacataatcaaatatctttgtgtgtttctgggactttttaatgtgtatatacgtaatttgtgaacaactattctttcctctggcaatgaatatttgctggtatttttccattttataattttatgcattttttctcagtgaacatcagttttatcaaagcagtaaatttagtgcaataaatttgcaaacttattaacgttaatcacttacctaccaggactcagaatctcagaataaaattgctctatatt

SEQ ID NO: 2911 - DNA, 1236 bp, Homo Sapiens
  NM_006303
ccgaacgcccgcagcagggtcagaagggaggtggccggtctccgtcgtgacctctgacggtttctgagcgttggcctttggcacgcgctacccccttttgctttggttctgccatgccgatgtaccaggtaaagccctatcacgggggcggcgcgcctctccgtgtggagcttcccacctgcatgtaccggctccccaacgtgcacggcaggagctacggcccagcgccgggcgctggccacgtgcaggaagagtctaacctgtctctgcaagctcttgagtcccgccaagatgatattttaaaacgtctgtatgagttgaaagctgcagttgatggcctctccaagatgattcaaacaccagatgcagacttggatgtaaccaacataatccaagcggatgagcccacgactttaaccaccaatgcgctggacttgaattcagtgcttgggaaggattacggggcgctgaaagacatcgtgatcaacgcaaacccggcctcccctcccctctccctgcttgtgctgcacaggctgctctgtgagcacttcagggtcctgtccacggtgcacacgcactcctcggtcaagagcgtgcctgaaaaccttctcaagtgctttggagaacagaataaaaaacagccccgccaagactatcagctgggattcactttaatttggaagaatgtgccgaagacgcagatgaaattcagcatccagacgatgtgccccatcgaaggcgaagggaacattgcacgtttcttgttctctctgtttggccagaagcataatgctgtcaacgcaacccttatagatagctgggtagatattgcgatttttcagttaaaagagggaagcagtaaagaaaaagccgctgttttccgctccatgaactctgctcttgggaagagcccttggctcgctgggaatgaactcaccgtagcagacgtggtgctgtggtctgtactccagcagatcggaggctgcagtgtgacagtgccagccaatgtgcagaggtggatgaggtcttgtgaaaacctggctccttttaacacggccctcaagctccttaagtgaattgccgtaactgattttaaagggtttagattttaagaatggtgctctttcatgcctattatcagtaaggggacttgtattagagtcagagtctttttatttaggccagttgtcaagtgtcaataaaagcatcatgtaatttaaaaaaaaaaaaaaaaaa

SEQ ID NO: 2912 - DNA, 9725 bp, Homo Sapiens
  NM_006306
cgcgcgggctacctcagttctcgggcgtacggcgcggcctgtcctactgccgccggcgccgcggccgtcatggggttcctgaaactgattgagattgagaactttaagtcgtacaagggtcgacagattatcggaccatttcagaggttcaccgccatcattggacccaatggctctggtaagtcaaatctcatggatgccatcagctttgtgctaggtgaaaaaaccagcaacctgcgggtaaagaccctgcgggacctgatccatggagctcctgtgggcaagccagctgccaaccgggcctttgtcagcatggtctactctgaggagggtgctgaggaccgtacctttgcccgtgtcattgtaggaggttcttctgagtacaagatcaacaacaaagtggtccaactacatgagtacagtgaggaattagagaagttgggcattctcatcaaagctcgtaacttcctcgttttccagggtgctgtggaatctattgccatgaagaaccccaaagagaggacagctctatttgaagagattagtcgttctggggagctggcgcaggagtatgacaagcgaaagaaggaaatggtgaaggctgaagaggacacacagtttaattaccatcgcaagaaaaatattgcggctgaacgcaaggaagcaaagcaggagaaagaagaggctgaccggtaccagcgcctgaaggatgaggtagtacgggctcaggtacagctgcagctctttaagctttaccataatgaagtggaaattgagaagctcaacaaggaactggcctcaaagaacaaggagatcgagaaggacaagaagcgtatggacaaggtggaggatgaactgaaggagaagaagaaggagctgggcaaaatgatgcgggagcagcagcagattgagaaggagatcaaggagaaggactcagaattgaaccagaagcggcctcagtacatcaaagccaaggagaacacctcccacaaaatcaagaagctggaagcagccaagaagtctctgcagaatgctcagaagcactacaagaagcgtaaaggtgacatggatgagctggagaaggagatgctgtcagtggagaaggctcggcaggagtttgaagaacggatggaagaagagagtcagagtcagggcagagatttgacgttggaggagaatcaggtgaagaaataccaccggttgaaagaagaagccagcaagagagcagctaccctggcccaggagctggagaaattcaatcgagaccagaaagctgaccaggaccgtctggatctggaagaacggaagaaagtagagacagaggccaagatcaagcaaaagctgcgggaaattgaagagaatcagaagcggattgagaaactggaggaatacatcaccactagcaagcagtccctagaagagcagaagaagctagagggggagctgacagaggaggtggagatggccaagcggcgtattgatgaaatcaataaggagctgaaccaggtgatggagcagctaggggatgcccgcatcgaccgccaggagagcagccgccagcagcgaaaggcagagataatggaaagcatcaagcgcctttaccctggctctgtgtacggccgcctcattgacctatgccagcccacacaaaagaagtatcagattgctgtaaccaaggttttgggcaagaacatggatgccattattgtggactcggagaagacaggccgggactgtattcagtatatcaaggagcagcgtggggagcctgagaccttcttgcctcttgactacctggaggtgaagcctacagatgagaaactccgggagctgaagggggccaagctagtgattgatgtgattcgctatgagccacctcatatcaaaaaggccctgcagtatgcttgtggcaatgcccttgtctgtgacaacgtggaagatgcccgccgcattgcctttggaggccaccagcgccacaagacagtggcactggatggaaccctattccagaagtcaggagtgatctctggtggggccagtgacctgaaggccaaggcacggcgctgggatgagaaagcagtagacaagttgaaagagaagaaggagcgcttgacagaggagctgaaagagcagatgaaggcaaaacggaaagaggcagagctgcgtcaggtgcagtctcaggcccatggactgcagatgcggctcaagtactcccagagtgacctagaacagaccaagacacgacatctagccctgaatctgcaggaaaaatccaagctggagagtgagctagccaactttgggcctcgcattaatgatatcaagaggatcattcagagccgagagagggaaatgaaagacttgaaggagaagatgaaccaggtagaggatgaggtgtttgaagagttttgtcgggagattggtgtgcgcaacatccgggagtttgaggaagaaaaggtgaaacggcagaatgaaatcgccaagaagcgtttggagtttgagaatcagaagactcgcttgggcattcagttggattttgaaaagaaccaactgaaggaggaccaagataaagtacacatgtgggagcagacagtgaaaaaagatgaaaatgagatagaaaagctcaaaaaggaggaacaaagacacatgaagatcatagatgagaccatggctcagctacaagacctgaagaatcagcatctggccaagaagtcggaagtgaatgacaagaatcatgagatggaggagattcgtaagaaactcgggggcgccaacaaggaaatgacccatttacagaaggaggtgacagccattgagaccaagcttgaacagaagcgcagtgaccgtcacaacttgctacaggcctgtaagatgcaggacattaagttgccactgtcaaaaggcaccatggatgatattagtcaggaagagggtagctcccagggggaggactcagtgagtggttcacagagaatttccagtatctatgcacgagaggccctcattgagattgactacggtgatctgtgtgaggatctgaaggatgcccaggctgaggaagagatcaagcaagagatgaacacactgcagcagaagctgaatgagcagcagagtgtgcttcagcgtattgccgcccccaacatgaaggccatggaaaagctggaaagtgtccgagacaagttccaggagacctcagatgagtttgaagcagcccgaaagcgagcaaagaaggccaagcaggcattcgaacagatcaagaaggagcgctttgaccgcttcaatgcttgttttgaatctgtggctaccaacattgatgagatctataaggccctgtcccgcaatagcagtgcccaggcattcctgggccctgagaaccctgaagagccctacttggatggcatcaactacaactgtgtggctcctgggaaacgcttccggcctatggacaacttgtcaggcggggagaagacagtggcagctctggccctgctctttgccatccacagctacaagccagcccccttcttcgtcctggatgagattgatgctgccttggataacaccaacattggcaaggtggcaaattacatcaaggagcagtcgacttgcaacttccaggccatcgtcatctctctcaaggaggagttctacaccaaggccgagagcctcattggagtctatcctgagcaaggggactgtgtgatcagcaaagtcctgaccttcgacctcaccaagtacccagatgccaaccccaaccccaatgagcagtagcagtatttttgccctcccgccctgtctggatccctaagctgtccctctcccaatctctggatatttgactcccaaccttccccctacctcctggccctttttggtgtagtcatgggatttaggcactgctaatcaagcatgaagaggaacagaggtgatgttaggtctggagcaaaaattcctgaacgacagggagtattctggcctctgaaaggaggtgctgagctgaacagggccatctgttcatcacacacacccccttcctccccctcatcacccataatcgtgggccccttgggcctcttgcccactgtgtgtgtgggtatgtatgtgtgtatgtatgtatccgcatgtgtgcatgtgagtatgtttgcaaaataataaaggatattggagacctgttttagaaggagcctaggctgaatttgattccaagagagcttaggatgacagcacccctgagctgggcaaaggtactcaggacctcataggagtcttaggcagttacctgaaactgccttcattcactcatttgtgtattcattcatttatgtattcatcagacacataccgaacaccctctatttgtcaggctctgtgcttggaatacagagttgaatcagacatgatctctaccctcctagtaaggagatacagtgggttcatgaatgactatagttagctgaatgtcatatgtactttgaatttgagaagtgggtgatcccctctaggcttcctggaggtcacatttaagctagaccttgacaaattggtaggatttggtcaggcactaggagtggagcatgagctctggggacagacagttatgggttctggtcccactttttatcacttactagttgtttgaccttgggcaagtcatttgaccttctgtgcctcagtttcctcatctgtaaaatggggctaacaatattacctacctcataggatttaatgatgtcaagctcctcactggaggccttatcccttcgtggagcccactaggtgccgacccctcagaatataaccctcatgcctggacccctgagagcttctgatcccagctattagggacagaagaagcctccaaatctggaaggtgctgaatgccctgctgactgggaaagtttcagggcactgatggggtctacctggtaagcggagggcctgaggaaacctgtagcttcaatcatgtctggtaaccgggtgcctgagccccaatctgggttgtgaggaaataggggagaggtatcctgggccacatcccagcctaacacctgtgaggttcattttaggaactaacctcattagctataaggatcatgcagaggcagcaaagccgggtgcgatgagctcagcctttactcattcacatacaccatcacactttaattccaatctgtatattgctttttaaaagttaagtccattctaattacccaaatatgcatgaattcattctccttttgagaagttagattgttaaagatagtctcattcagctaccaaccactccttgatccttcccttcttagtggctgttgtttgttgtacttccgtttagactttgttttaatgcttgtacgtacatatgtgaactcattggaaatattgtgtgtttaatgcaaatgatatattgaattgtttagcaatttgttttctttgcttaacgatgtttttgagatctgtgcatgttacttaatgtagctcaatccatcttctgtaattgctgtatagattgtcatcatatgattaccacattttacttacgcatttcttttgtgatggacattaagactgtttttaggttttgctattacaaaatactacacaggagcatcactatgcctgtgtgaaagtatatgtatgaaagtttacctagggttgattcctagaagtggaattgcaaagtcataggatatttatatattggtttttaataatacttccaaattgccctcctgtactatttactcagtatttttcttgaggttgatctgaggtctaacattgttatcctatatcattttcatcccaagtagtgatatctgtgaaatcacaggtttgatgtgtgctaattatgtattcttctaatacatattaaaagacataactatcaaaacaaaataaatttgtctgttttcaaccaaagaagtcacgtaccactggtggtactgtgtgccataatttggcaaatgctggcctttatggacgagcacaattcgggggtcagacctggttcaaattctagctgtagaaacttgtgcaagttacttcacctctgagcctaagtttccacatctgtaaaaggagataataaacacctaccttgcagtagtgaagcaaagagaaaattaaatatatatgaagcaatttggctggcatctagatcattcacagccctttaaaggtcacctttgctgttctccccactttacagataaggaaactgaggcccaaaaaggtttgaacccaggtcttccaagtcattcaagtgctttctccactgtacaggtggttatcaaccttggctgcgcatcagaatcgtttgtaaagctttttctttttcctttttaaaaagtaaagcaatatatacacaggtaaaaaaataaaatagtacagaagggcttataatgagaagcagcagttccctgcttgcacccccacatccaaaggatgtggagctctttaaaaataaattgctctggtcccacctctggaaatctgattcagccagcatggataataacccagataactaacccctacctcacaggataaaaaggattacatgagatgccttaggctaaggccctggcacacaggaacacatgtgctacaaaggagctttggggacttaagtcctgaggatccaggaggtgaggtgacttgtccaagattccactggtttagtggcagagcctagacttccactcggatctatttagtgcttgccccctgctctctcctgtcgtgccccaccacctcctggcatcacagggcaaccgttgtcaaggctatgctcacgggaggctgggcaccacagtgtttccaagagcaagctggatccgagtagattccctagggcttgttggaggaactagtttgactcccttatactgtggacgcagtagccttgctgtagggagttgaagagtactccacaacagtatcttaagtttaactgggcacttccctctggaaatcacagtgttgtgcaccaggaacacaaagatgagtcaaatctttatcctgcctttgaggagctcactgtttagttggggaaaccatttgtaaaacagccattaaccatacagtgtgatcaacactgacaggagcacaggaaaaacatctagcttatgtgaagattcagagaaggcatcctgtagtctaggtggtgatacctgaactgagtcttgagggacgggtaggaattagccagttgaggaagtagaaggaatttccagatattggaaacagtatgcatgaagacatgaaggcaagaaacagcaaaacaaatactgaagcatgaagattcctggggtggggggaaagcagcaagaaaaggtagagaggaaccagattggaagagggtcgtaaatgcatggctacagaattcagatttgttttgtaggacagtgtggttcccaaactggctgtataccacaaacaggtacggcattctgggccccggcccctaaaacattcattaagtctggggtgaagatttggaatcttgaatgcttataaaggttaccacatgactagggtacagccagatttggaaaccatagcttgaaggcagtgagggagccatgaaatggtttttaatagggggactccagatcagatgtgaacttaacctgtttctggctggctagccaaccagcatggaaaacagattaggttagatgttcatgctgtatgtgcccgtgcctgtagcttccctgttaatcagcttcttacactactatatttgcttattttgtctctgaataagctttaggcaccacaagggtgggcctggggatattttgcttaccagtatagcccctgcaaaaaagcacagtgcctgacacaaaacaggcacccagtaaagtttttgaatgaatgaatgcatgagtgaatccatttgtgagagagcgaatggagatgacaagattagctaggagactggaaaaagaccaggaggcctgcactagggcaaaggccagtaggaatagattggaggtgttaaggtgtgaactgttaaggtaagatgataacttaatgactgattattggatgtggagggtgactgagaggatagaatgagtacccatgaatagccatgattcctaccctgtcccagtcatctctttccttatccatctctgaaacaatctgcttacatcctcctcagcaactggaattcctcaagttagttagacattctgtgtgctgtgtggtctctcactgcccccccactccccacccctccacaagccattgattcattcatccagttcaataaatcttggctaagcacctccagtgtgcagtaaggctcttccaagccaggactctgactccctctttcctacctcaagagatgtttttgagggctttcccaggtaagagtcacatctcttatacaataacttatagtgagatacccagaatgtcagacttgtaagggaagactgcccaaaccccttctgaggtcctcagaggggaattaacttcctaaggtccgactgctaggaagtgttggagccagaaatggaacctaggtttcctttctatgtcatctctggagtcttgatcttgatctatcccattgtagatcaggacaggcagaggtggtcagggagaaggtgggacttaggttgaaccttgaaggtcaatgtattggacaggtcaaacaagatggttgccaattacactgcccccttctggaaacccttagcaaacctgccatgcttgcagtcccttctaaggggtttccttagcataagttgccatgctctgtaccatgtgacctcacaatcctggccacagatagctagatgtggatagtgtctggttcaagggcaaccaatctctaggctggccagtggcctgttagctggactggcataaggacttcaccttacaggggtggcatgtatcaaatggcaaatgtatgaaacaaccagatctttcagggaggcagaatgtgagctattcagaagaagtgaacgttaattagaatttaatgaggcattagtggtggtggatgaggggtggccagaaactaaacagcaaaagcaaagagaaagctgcagaaaccataagtaagcagaggtcatgagacatttgtataatgagatcacggagccacagggtggcagaagccatgaagcagcaaggcaacaatgggctagaagccatgaagcaataggagccacgaggaacagaaaccgtgagacaaaactgactatgagatccacaaagcagcagaaggcttgaatagataagatcatgagacagtagaagcgatgagactgcaagaaccacaaggtagccagaaccatgtggcaacatggcaacaggaatggaagaggcagcaggagctacaatgcagaaaagccatggattaataggaactgaagcgccgggagccatgaagctgcaggacccatgaggcagaaaaagccatgggctagcatcgaggggggcagaaagaagttagtcagtagcagtaggaggagtataaatacagccagaaaggagttgagtcaccaatttgggaagcactagagaagggagcaacagatgcctgcagctgagggggtgacaagataagccaggctctagagctgctttggatcatgaaccattttcaagtttctgttcttccatgaggctgcctgtgtagctgttcttgtcttccttatttccctgtgaatgctttaataaatccccatcactaa

SEQ ID NO: 2913 - DNA, 8901 bp, Homo Sapiens
  NM_006312
gccggcgccctaggaggcggcggcgggaggatcgcgtcccgacccgaggccgggcctgctgcgcgcccccagcccgatcggcaccgccacttgcctgagcgccccggcggcccgagcgcgccccaagcccgggcgccaccgctgccacctccgcgaggtctccctgagtctttgaggacacagcctcgctggaggcagtttctggtgccagtgacggggtggcccgtgagctgatgacgaggactggcttttaatccttggtggtgattaagagaaagcttattggggcctgggagcagctccccgccgacccccaccaccatgtcgggatccacacagcctgtggcacagacgtggagggccactgagccccgctacccgccccacagcctttcctacccagtgcagatcgcccggacgcacacggacgtcgggctcctggagtaccagcaccactcccgcgactatgcctcccacctgtcgcccggctccatcatccagccccagcggcggaggccctccctgctgtctgagttccagcccgggaatgaacggtcccaggagctccacctgcggccagagtcccactcatacctgcccgagctggggaagtcagagatggagttcattgaaagcaagcgccctcggctagagctgctgcctgaccccctgctgcgaccgtcacccctgctggccacgggccagcctgcgggatctgaagacctcaccaaggaccgtagcctgacgggcaagctggaaccggtgtctccccccagccccccgcacactgaccctgagctggagctggtgccgccacggctgtccaaggaggagctgatccagaacatggaccgcgtggaccgagagatcaccatggtagagcagcagatctctaagctgaagaagaagcagcaacagctggaggaggaggctgccaagccgcccgagcctgagaagcccgtgtcaccgccgcccatcgagtcgaagcaccgcagcctggtgcagatcatctacgacgagaaccggaagaaggctgaagctgcacatcggattctggaaggcctggggccccaggtggagctgccgctgtacaaccagccctccgacacccggcagtatcatgagaacatcaaaataaaccaggcgatgcggaagaagctaatcttgtacttcaagaggaggaatcacgctcggaaacaatgggagcagaagttctgccagcgctatgaccagctcatggaggcctgggagaagaaggtggagcgcatcgagaacaacccccggcggcgggccaaggagagcaaggtgcgcgagtactacgagaagcagttccctgagatccgcaagcagcgcgagctgcaggagcgcatgcagagcagggtgggccagcggggcagtgggctgtccatgtcggccgcccgcagcgagcacgaggtgtcagagatcatcgatggcctctcagagcaggagaacctggagaagcagatgcgccagctggccgtgatcccgcccatgctgtacgacgctgaccagcagcgcatcaagttcatcaacatgaacgggcttatggccgaccccatgaaggtgtacaaagaccgccaggtcatgaacatgtggagtgagcaggagaaggagaccttccgggagaagttcatgcagcatcccaagaactttggcctgatcgcatcattcctggagaggaagacagtggctgagtgcgtcctctattactacctgactaagaagaatgagaactataagagcctggtgagacggagctatcggcgccgcggcaagagccagcagcagcaacaacagcagcagcagcagcagcagcagcagcagcagcagcccatgccccgcagcagccaggaggagaaagatgagaaggagaaggaaaaggaggcggagaaggaggaggagaagccggaggtggagaacgacaaggaagacctcctcaaggagaagacagacgacacctcaggggaggacaacgacgagaaggaggctgtggcctccaaaggccgcaaaactgccaacagccagggaagacgcaaaggccgcatcacccgctcaatggctaatgaggccaacagcgaggaggccatcaccccccagcagagcgccgagctggcctccatggagctgaatgagagttctcgctggacagaagaagaaatggaaacagccaagaaaggtctcctggaacacggccgcaactggtcggccatcgcccggatggtgggctccaagactgtgtcgcagtgtaagaacttctacttcaactacaagaagaggcagaacctcgatgagatcttgcagcagcacaagctgaagatggagaaggagaggaacgcgcggaggaagaagaagaaagcgccggcggcggccagcgaggaggctgcattcccgcccgtggtggaggatgaggagatggaggcgtcgggcgtgagcggaaatgaggaggagatggtggaggaggctgaagccttacatgcctctgggaatgaggtgcccagaggggaatgcagtggcccagccactgtcaacaacagctcagacaccgagagcatcccctctcctcacactgaggccgccaaggacacagggcagaatgggcccaagcccccagccaccctgggcgccgacgggccacccccagggccacccaccccaccaccggaggacatcccggcccccactgagcccaccccggcctctgaagccaccggagcccctacgcccccaccagcacccccatcgccctctgcacctcctcctgtggtccccaaggaggagaaggaggaggagaccgcagcagcgcccccagtggaggagggggaggagcagaagccccccgcggctgaggagctggcagtggacacagggaaggccgaggagcccgtcaagagcgagtgcacggaggaagccgaggaggggccggccaagggcaaggacgcggaggccgctgaggccacggccgagggggcgctcaaggcagagaagaaggagggcgggagcggcagggccaccacagccaagagctcgggcgccccccaggacagcgactccagtgctacctgcagtgcagacgaggtggatgaggccgagggcggcgacaagaaccggctgctgtccccaaggcccagcctcctcaccccgactggcgacccccgggccaatgcctcaccccagaagccactggacctgaagcagctgaagcagcgagcggctgccatcccccccatcgtcaccaaagtccatgagcccccccgggaggacgcagctcccaccaagccagctcccccagccccaccgccaccgcaaaacctgcagccggagagcgacgcccctcagcagcctggcagcagcccccggggcaagagcaggagcccggcaccccccgccgacaaggaggcagagaagcctgtgttcttcccagccttcgcagccgaggcccagaagctgcctggggaccccccttgctggacttccggcctgcccttccccgtgcccccccgtgaggtgatcaaggcctccccgcatgccccggacccctcagccttctcctacgctccacctggtcacccactgcccctgggcctccatgacactgcccggcccgtcctgccgcgcccacccaccatctccaacccgcctcccctcatctcctctgccaagcaccccagcgtcctcgagaggcaaataggtgccatctcccaaggaatgtcggtccagctccacgtcccgtactcagagcatgccaaggccccggtgggccctgtcaccatggggctgcccctgcccatggaccccaaaaagctggcacccttcagcggagtgaagcaggagcagctgtccccacggggccaggctgggccaccggagagcctgggggtgcccacagcccaggaggcgtccgtgctgagagggacagctctgggctcagttccgggcggaagcatcaccaaaggcattcccagcacacgggtgccctcggacagcgccatcacataccgcggctccatcacccacggcacgccagctgacgtcctgtacaagggcaccatcaccaggatcatcggcgaggacagcccgagtcgcttggaccgcggccgggaggacagcctgcccaagggccacgtcatctacgaaggcaagaagggccacgtcttgtcctatgagggtggcatgtctgtgacccagtgctccaaggaggacggcagaagcagctcaggacccccccatgagacggccgcccccaagcgcacctatgacatgatggagggccgcgtgggcagagccatctcctcagccagcatcgaaggtctcatgggccgtgccatcccgccggagcgacacagcccccaccacctcaaagagcagcaccacatccgcgggtccatcacacaagggatccctcggtcctacgtggaggcacaggaggactacctgcgtcgggaggccaagctcctaaagcgggagggcacgcctccgcccccaccgccctcacgggacctgaccgaggcctacaagacgcaggccctgggccccctgaagctgaagccggcccatgagggcctggtggccacggtgaaggaggcgggccgctccatccatgagatcccgcgcgaggagctgcggcacacgcccgagctgcccctggccccgcggccgctcaaggagggctccatcacgcagggcaccccgctcaagtacgacaccggcgcgtccaccactggctccaaaaagcacgacgtacgctccctcatcggcagccccggccggacgttcccacccgtgcacccgctggatgtgatggccgacgcccgggcactggaacgtgcctgctacgaggagagcctgaagagccggccagggaccgccagcagctcggggggctccattgcgcgcggcgccccggtcattgtgcctgagctgggtaagccgcggcagagccccctgacctatgaggaccacggggcaccctttgccggccacctcccacgaggttcgcccgtgaccacgcgggagcccacgccgcgcctgcaggagggcagcctttcgtccagcaaggcatcccaggaccgaaagctgacgtcgacgcctcgtgagatcgccaagtccccgcacagcaccgtgcccgagcaccacccacaccccatctcgccctatgagcacctgcttcggggcgtgagtggcgtggacctgtatcgcagccacatccccctggccttcgaccccacctccataccccgcggcatccctctggacgcagccgctgcctactacctgccccgacacctggcccccaaccccacctacccgcacctgtacccaccctacctcatccgcggctaccccgacacggcggcgctggagaaccggcagaccatcatcaatgactacatcacctcgcagcagatgcaccacaacgcggccaccgccatggcccagcgagctgatatgctgaggggcctctcgccccgcgagtcctcgctggcactcaactacgctgcgggtccccgaggcatcatcgacctgtcccaagtgccacacctgcctgtgctcgtgcccccgacaccaggcaccccagccaccgccatggaccgccttgcctacctccccaccgcgccccagcccttcagcagccgccacagcagctccccactctccccaggaggtccaacacacttgacaaaaccaaccaccacgtcctcgtccgagcgggagcgagaccgggatcgagagcgggaccgggatcgggagcgggaaaagtccatcctcacgtccaccacgacggtggagcacgcacccatctggagacctggtacagagcagagcagcggcagcagcggcagcagcggcgggggtgggggcagcagcagccgccccgcctcccactcccatgcccaccagcactcgcccatctcccctcggacccaggatgccctccagcagagacccagtgtgcttcacaacacaggcatgaagggtatcatcaccgctgtggagcccagcacgcccacggtcctgaggtccacctccacctcctcacccgttcgcccggctgccacattcccacctgccacccactgcccactgggcggcaccctcgatggggtctaccctaccctcatggagcccgtcttgctgcccaaggaggccccccgggtcgcccggccagagcggccccgagcagacaccggccatgccttcctcgccaagcccccagcccgctccgggctggagcccgcctcctcccccagcaagggctcggagccccggcccctagtgcctcctgtctctggccacgccaccatcgcccgcacccctgcgaagaacctcgcacctcaccacgccagcccggacccgccggcgccacctgcctcggcctcggacccgcaccgggaaaagactcaaagtaaacccttttccatccaggaactggaactccgttctctgggttaccacggcagcagctacagccccgaaggggtggagcccgtcagccctgtgagctcacccagtctgacccacgacaaggggctccccaagcacctggaagagctcgacaagagccacctggagggggagctgcggcccaagcagccaggccccgtgaagcttggcggggaggccgcccacctcccacacctgcggccgctgcctgagagccagccctcgtccagcccgctgctccagaccgccccaggggtcaaaggtcaccagcgggtggtcaccctggcccagcacatcagtgaggtcatcacacaggactacacccggcaccacccacagcagctcagcgcacccctgcccgcccccctctactccttccctggggccagctgccccgtcctggacctccgccgcccacccagtgacctctacctcccgcccccggaccatggtgccccggcccgtggctccccccacagcgaagggggcaagaggtctccagagccaaacaagacgtcggtcttgggtggtggtgaggacggtattgaacctgtgtccccaccggagggcatgacggagccagggcactcccggagtgctgtgtacccgctgctgtaccgggatggggaacagacggagcccagcaggatgggctccaagtctccaggcaacaccagccagccgccagccttcttcagcaagctgaccgagagcaactccgccatggtcaagtccaagaagcaagagatcaacaagaagctgaacacccacaaccggaatgagcctgaatacaatatcagccagcctgggacggagatcttcaatatgcccgccatcaccggaacaggccttatgacctatagaagccaggcggtgcaggaacatgccagcaccaacatggggctggaggccataattagaaaggcactcatgggtaaatatgaccagtgggaagagtccccgccgctcagcgccaatgcttttaaccctctgaatgccagtgccagcctgcccgctgctatgcccataaccgctgctgacggacggagtgaccacacactcacctcgccaggtggcggcgggaaggccaaggtctctggcagacccagcagccgaaaagccaagtccccggccccgggcctggcatctggggaccggccaccctctgtctcctcagtgcactcggagggagactgcaaccgccggacgccgctcaccaaccgcgtgtgggaggacaggccctcgtccgcaggttccacgccattcccctacaaccccctgatcatgcggctgcaggcgggtgtcatggcttccccacccccaccgggcctccccgcgggcagcgggcccctcgctggcccccaccacgcctgggacgaggagcccaagccactgctctgctcgcagtacgagacactctccgacagcgagtgactcagaacagggcgggggggggggcggtgtcaggtcccagcgagccacaggaacggccctgcaggagcagggcggctgccgactcccccaaccaaggaaggagcccctgagtccgcctgcgcctccatccatctgtccgtccagagccggcatccttgcctgtctaaagccttaactaagactcccgccccgggctggccctgtgcagaccttactcaggggatgtttacctggtgctcgggaagggaggggaaggggccggggagggggcacggcaggcgtgtggcagccacacgcaggcggccagggcggccagggacccaaagcaggatgaccacgcacctccacgccactgcctcccccgaatgcatttggaaccaaagtctaaactgagctcgcagcccccgcgccctccctccgcctcccatcccgcttagcgctctggacagatggacgcaggccctgtccagcccccagtgcgctcgttccggtccccacagactgccccagccaacgagattgctggaaaccaagtcaggccaggtgggcggacaaaagggccaggtgcggcctggggggaacggatgctccgaggactggactgtttttttcacacatcgttgccgcagcggtgggaaggaaaggcagatgtaaatgatgtgttggtttacagggtatatttttgataccttcaatgaattaattcagatgttttacgcaaggaaggacttacccagtattactgctgctgtgcttttgatctctgcttaccgttcaagaggcgtgtgcaggccgacagtcggtgaccccatcactcgcaggaccaagggggcggggactgctggctcacgccccgctgtgtcctccctccctcccttccttgggcagaatgaattcgatgcgtattctgtggccgccatctgcgcagggtggtggtattctgtcatttacacacgtcgttctaattaaaaagcgaattatactccaaaaaaaaaaaaaaaaaaa

SEQ ID NO: 2914 - DNA, 1820 bp, Homo Sapiens
  NM_006317
gcggcgacgacggcggcggcagcgctccaactggctcctcgctccgggctccgccgtcgagccgggagagagcctccgccagcggccaggcaccagccagacgacgccagcgaccccggcctctcggcggcaccgcgctaactcaggggctgcataggcacccagagccgaactccaagatgggaggcaagctcagcaagaagaagaagggctacaatgtgaacgacgagaaagccaaggagaaagacaagaaggccgagggcgcggcgacggaagaggaggggaccccgaaggagagtgagccccaggcggccgcagagcccgccgaggccaaggagggcaaggagaagcccgaccaggacgccgagggcaaggccgaggagaaggagggcgagaaggacgcggcggctgccaaggaggaggccccgaaggcggagcccgagaagacggagggcgcggcagaggccaaggctgagcccccgaaggcgcccgagcaggagcaggcggcccccggccccgctgcgggcggcgaggcccccaaagctgctgaggccgccgcggccccggccgagagcgcggcccctgccgccggggaggagcccagcaaggaggaaggggaacccaaaaagactgaggcgcccgcagctcctgccgcccaggagaccaaaagtgacggggccccagcttcagactcaaaacccggcagctcggaggctgccccctcttccaaggagacccccgcagccacggaagcgcctagttccacacccaaggcccagggccccgcagcctctgcagaagagcccaagccggtggaggccccggcagctaattccgaccaaaccgtaaccgtgaaagagtgacaaggacagcctataggaaaaacaataccacttaaaacaatctcctctctctctctctctctctctctctatctctctctctatctcctctctctctctcctctcctatctctcctctctctctctcctatactaacttgtttcaaattggaagtaatgatatgtattgcccaaggaaaaatacaggatgttgtcccatcaagggagggagggggtgggagaatccaaatagtatttttgtggggaaatatctaatataccttcagtcaactttaccaagaagtcctggatttccaagatccgcgtctgaaagtgcagtacatcgtttgtacctgaaactgccgccacatgcactcctccaccgctgagagttgaatagcttttcttctgcaatgggagttgggagtgatgcgtttgattctgcccacagggcctgtgccaaggcaatcagatctttatgagagcagtattttctgtgttttctttttaatttacagcctttcttattttgatatttttttaatgttgtggatgaatgccagctttcagacagagcccacttagcttgtccacatggatctcaatgccaatcctccattcttcctctccagatatttttgggagtgacaaacattctctcatcctacttagcctacctagatttctcatgacgagttaatgcatgtccgtggttgggtgcacctgtagttctgtttattggtcagtggaaatgaaaaaaaaaaaaaaaaaaagtctgcgttcattgcagttccagtttctcttccattctgtgtcacagacaccaacacaccactcattggaaaatggaaaaaaaaaacaaaaaaaaaacaaaaaaatgtacaatggatgcattgaaattatatgtaattgtataaatggtgcaacagtaataaagttaaacaattaaaaagaaaaaaaaaaaaaaaaaaaaaaaaa

SEQ ID NO: 2915 - DNA, 3790 bp, Homo Sapiens
  NM_006320
actttttcacactagaatttcaaggtgtgagaggctaaaagacgtccaagtacatgaaacagaacctgcaaataagagtgaatgacgaatagaaagaccacctcaacctgtccacttccctacggccgcagaagttatgattcaaggaataatgagactctaaatcctttaaaattctacaagagcagcctttgccaaacccagcggggagtggctgctcggtgccagcgcgaggagcacgtagactgccgatgccagagaagcccggtgcgggttccgtgctttctctccgttccaggaagaccccagctcgtggccaaatcttcttgccgcttcccggtctgcgcgcctacgctgccggtttcccgacaaaagcgacggcgccctggtgaaaagcagacgcccctcatcggtttgcgccttgcagctcaactatgccccagcctcccacaagccacctgcccgcgtcctccgccaggcgtccagcccggacctgcccccgcggccgccaaggcgcacgtgaagctcccgggcggggggagcgcaaggaggcgggagtttgcggacgcgaacgcaggcctaggaagggaagcgattccagggcgcacgcgcagagcctggagactgggcggggcgtgcctcccgcaggggttacgaacgaaaggcgagcgcgtggcgctcaggagcccgcgcacgcgctgtggtctcgccccgcccatgagcgtccgcgcggccgtcgtagcatcttttcttcagacccgcccggctcgtctacttaacctagcggaggcttggagtgagagcagggaagtgtggggcgaggtgggcggggcgttgcacgcgtgcgcggccagcgaaagaagggagggggcgggagatccgagacaacgttaccccgtcaacacccaatcaggagccggcctgaccccgccccctcttctcacgttattggctgagaggcccccagatgggcggggccggccgtggggttggggagggcagggggcggggaggaggaggaaggcgctggcgggcagtgatggcggctggtgatggggacgtgaagctaggcaccctggggagtggcagcgagagcagcaacgacggcggcagcgagagtccaggcgacgcgggagcggcagcggaagggggaggctgggcggcggcggcgttggcgcttctgacggggggcggggaaatgctgctgaacgtggcgctggtggctctggtgctgctgggggcctaccggctgtgggtgcgctgggggcggcggggtctgggggccggggccggggcgggcgaggagagccccgccacctctctgcctcgcatgaagaagcgggacttcagcttggagcagctgcgccagtacgacggctcccgcaacccgcgcatcctgctcgcggtcaatgggaaagtcttcgacgtgaccaaaggcagcaagttctacggcccggcgggtccatatggaatatttgctggtagggatgcctccagaggactggccacattttgcctagataaagatgcacttagagatgaatatgatgatctctcagatttgaatgcagtacaaatggagagtgttcgagaatgggaaatgcagtttaaagaaaaatatgattatgtaggcagactcctaaaaccaggagaagaaccatcagaatatacagatgaagaagataccaaggatcacaataaacaggattgaactttgtaaacaaccaaagtcaggggccttcagaactgcaattcttactccctttcacagactgtccggagtctttgggtttgattcacctgctgcgaaaaacattcaacaaattgtgtacaagataaattaatctcactatgaagatttgaataactagacattatttatgctgccaaactcatttgttgcagttgtttgtaatgtctagtggggcttcatcatcctgaaaagaaggagacagggatttttttaaagagcaagaaagtcacaatattacttctttccttccttttttccttctttcctttcttctttctctttctttctttttaaaatatattgaagacaaccagatatgtatttgctactcaagtgtacagatctcctcaagaaacatcaagggactcctgtgtcacatactgtgtttttattttaacatgggtgagggaggcgacctgatcaggggaggtgggggtacacatcaatttgagttgttcaggctactgaaacattaaaatgtgaattcccaaacttttctttttggctttgtcagggaaaagaaaaatatctttataaagaaatctttggaaattaggagaaggaatttcaggtgggtttaagtcagagctagttccccaacagaaagatcatttgaaaccagtttttatcccttctctttccttccctttccctaaatcaaatcaatattaattgtgccttatttcacttaacatagacttgaattatttttagggaaagcccctataatgaattcagaaatcactacaagcagcattaagactgaagttggaatattctgttgaccataaaaccttgatatcattctgtgtatatagaatgtaaaaggaatattacagtgttaactgccatatatgtaatatacacaaactcaattagcattgtaatggccaaatgcattcccccatgcttttctgttttcaaaaaaattgaaaaacaaatcaactcttatccccaacagctgcctaattttaggagtctgaccctccacatctcactggtgtgggtgcatggggctgtggagtgggtgtcagtatggatgtgtctgaatgtgtgaggccttggaagggactctttctgcagatactgtaaatacaagtaccattttaataaagcatgtacaataaaccaaaataagcttgagttggactttatatacagaactgtaagccagtgcattatgatacagttgtaagattgtgcatttgattcaagataaggaaaaatcttggaaatgaaaagcaggcactggttaaccaagttgtacacattgtaccacattcagcataactttaggaagaaattccactttgtggaacattctccagaaatccaagattattcaggtaagaattggtatattaaatgtacatctttttactttctattttgatgccaactgattatactagacaattagcactccaggtggttattgaacacaaaacagtaaaagaatattgcactgatagatactaaattattattttattaggttgaaaaagcccttactaaaagcccctcatatatcaattactttatttcattatgactacttaggttccgggctggggacaagttcacttaaaaaggcaatgttatttaacaggtcaccagttaagacttctgctttgtagatacatgcagaagccatcaaacaagggggagcttttaactgcaacaataagctaaagtatgtaaaatactacattctattcagtcttggagtgttttgtagaaagttatcttcagccaaatctttgctgaagactggttgtggagtgttggtaaatgctttgtgtttttatgtaaaatattttctaaacaaaaaatgttaaaagtacatgtcctctgtagtaaactgatatctatatatatgaatcattcaagcctaaagtctagtaataaactgtacttgtgaatagagaaaccctaaatattcatgcagaaaaaattatgcggtctgttaagaaaaatgagtaatttgtgttttggacttgaaataaacagtgttctgtagataattcctcaacttca

SEQ ID NO: 2916 - DNA, 4081 bp, Homo Sapiens
  NM_006321
gtggggacgactcttctggaggaagcagcgcgggcttgaccggcgtcggcccgccgcctccgctgccgcttcgccccaatccggtccctctggcccggcctgacccggtctggcttgttcgggctcagcggccgcgaggccgcagctcccgatggaaatcatattatgtagaatacttgggtgacatctgcctgagagatctccaagaattacagaagacaaaaatactaatgcatttgagaaagcggtagttttggggggagggggaaaaagcaactgctttcctgatctgcaacttggctggatgctaagatgtcagtggacatgaatagccaggggtctgacagcaatgaagaggactatgacccaaattgtgaggaagaggaagaagaagaagaagacgaccctggggacatagaggactattacgtgggagtagccagcgatgtggagcagcagggggctgatgcctttgatcccgaggagtaccagttcacttgcttgacctacaaggaatctgagggtgccctcaatgagcacatgaccagcttagcttctgtcctaaaggtatctcattcagttgctaaacttatattagttaatttccactggcaagtttcagagatattggacagatacaagtccaattctgctcaactgcttgttgaggctcgagttcagcctaatccatcaaaacatgttcccacatcccatccccctcaccactgtgcagtgtgtatgcagtttgtgcgaaaggaaaacctactctctctggcctgtcagcaccagttttgccgcagctgctgggagcagcactgctcagttctcgtcaaggacggcgtgggcgtgggagtctcttgcatggctcaggactgtccactccgtacaccagaggactttgtgtttccattgcttcccaatgaagaattgagagagaaatacaggcgctacctcttcagggactatgtggagagtcattaccagctccagctgtgccctggtgcagactgccccatggttattcgggtacaggagcctagagctcgccgagtacagtgcaatcggtgcaacgaggtcttctgtttcaagtgtcgtcagatgtatcacgcacccacagactgtgccacaatccggaaatggctcacgaagtgtgcagacgactctgaaacagccaactacattagtgctcacactaaagactgtcccaagtgcaacatctgcattgagaagaatggaggctgcaatcacatgcaatgctccaaatgtaaacacgacttctgctggatgtgtctaggagattggaagactcatggcagtgaatactatgagtgcagtcgttacaaggagaatcctgacatcgtgaaccagagccaacaagcccaggcgagggaagccctcaagaagtacttattctactttgagaggtgggaaaaccacaataaaagcttgcagctagaggcacagacataccagcggattcacgagaagattcaggagagggtcatgaacaatctggggacatggatcgactggcagtacctacagaatgctgccaagctcttggccaagtgtcgatacaccctgcaatacacctacccatatgcatattacatggagtccggacccaggaagaagctgtttgaataccagcaggctcagctggaggctgagatcgaaaacctctcatggaaagtggagcgtgcagacagctatgacagaggggacttggagaaccagatgcatatagcggagcagcggaggagaaccctgctgaaagatttccatgacacctaagttgggatgtggatgtgccggggtgaggaagatgtggctgcaaggtctcccggctgccatactgcatgctgcaggctctgcctttcatgaccccaggcaacagccagggccccactcctgagagacactggcaacacctcttagttgatttctgttttcttctcttttcactttttgtttctaccagggtagaggccatgttgaactggcctcttttcaggacttttatttccccctggatggttgttgggagggagggaaagtgttttctgaatggctattaatagtattagatcattacaacttatgtaactttcaaaggttgtacaattatacaaaaaaaaaaaaaaggcaaactataggataacacagagccctttttgaaaataaattggcattggagtgttttaccctctagctgttttacttagaatgtaacatatgctgcctacccacctcaaaatgtctgtactgcaagagggccctgggcctctgctttccatattcacgtttggccagagttgtagtcccaaagaagagcatgggtggcagatggtagggaattgaactggcctgtgcaatgggcatggagcacaaggggtcacagcatgcctcctgccttaccgtggcagtacggagacagtccagaacatggtcttcttgccacggggtgttgttgtctctggtggtgctgcatgtctgtggctcacctttattcttgaaactgaggtttacctggatctggctactgaggctagagcccacagcagaatggggttgggcctgtggccccccaaactagggggtgtgggttcatcacagtgttgccttttgtctcctaaagatagggatctacttttgaagggaattgttcctcccaaataaatttgctttaccttggtcctttcttttgtgccagtattcaagtggtatagctctgagcagggtcacatttggccaaacctgacactgtcttgctgcattctcctttggcaaacatcagggtcagaattcaggatagcccttcctagggcactggactttctggcatgggggctgtgtttgcacaagttattttcatgttacctggagagtgtccagaggctgctctgaggctgaggtgtgttcccccttgcctggttccagctgtcagagggataccatcctagggtctgggaatccaaggccacgagactccttggtttgtggtccgagatcctgtactaaggagggtctggccagaggaacagaccagcttttgcacaatgaagcgcaagggaacaagtggtttgcctggtgtcctacctgtcctgaacctggtcctgtgggccattgaaaagttagatctgtgatctctggggtttttgtggctttgttcaatgcttccactctagggcaggcagagcagtctatactctcccaagcctgcttgacctccaagtagagctgatacagagatctgtgaatattgtgatagaaattctttggtattcatacatttcagctgcaagtcagcaatttcccaggtaccatgtaagctataaaacagtcattcttaaagacagaggatagctgtgactcatgggatcatgaggtccatggctggttgcaggttccctttttccttcctcaggttttgtctcttcctgtgttgtccccagcaagggagagactgtggggtggattgggagaacagattaggagtatagcaaatgaacccagaatggaacagtggggagctaactgtgaatgaggagagtacctgctgcaggacctggaggtcaggtgtgaatgctgtattggcacagggaataaatatcctggcgtctggagccttcacctctccgtcaagtccttcctgtgatactgccatggcacaggatctgagttgcagctctgcaccctaaatcacaccctgggcattgtctgggctgcagggctgccaggttctgtacttgtgtccagctgtggccctggatgctggagctggagggttttctgtgctcagactgtagcctgtagctcttggcctgtgtagagccccctcctgtgccctcagtggctgtcgtttgttaacatcatcaggaagatgggaaaggtcaggcagaatttttctgccctacaaagggtggaagagaaaggacacagtattttcatgaatttaccatatatctttgtttttcttcaacgaaaaagttaattgaggcaatgtcatctgctcaaagttgagtggtttattcacaataaactgtaagtttctgattataaaaaaaaaaaaaaaaaaaaa

SEQ ID NO: 2917 - DNA, 1087 bp, Homo Sapiens
  NM_006325
cgcttccgccatctttccagcctcagtcggacgggcgcggagacgcttctggaaggaacgccgcgatggctgcgcagggagagccccaggtccagttcaaacttgtattggttggtgatggtggtactggaaaaacgaccttcgtgaaacgtcatttgactggtgaatttgagaagaagtatgtagccaccttgggtgttgaggttcatcccctagtgttccacaccaacagaggacctattaagttcaatgtatgggacacagccggccaggagaaattcggtggactgagagatggctattatatccaagcccagtgtgccatcataatgtttgatgtaacatcgagagttacttacaagaatgtgcctaactggcatagagatctggtacgagtgtgtgaaaacatccccattgtgttgtgtggcaacaaagtggatattaaggacaggaaagtgaaggcgaaatccattgtcttccaccgaaagaagaatcttcagtactacgacatttctgccaaaagtaactacaactttgaaaagcccttcctctggcttgctaggaagctcattggagaccctaacttggaatttgttgccatgcctgctctcgccccaccagaagttgtcatggacccagctttggcagcacagtatgagcacgacttagaggttgctcagacaactgctctcccggatgaggatgatgacctgtgagaatgaagctggagcccagcgtcagaagtctagttttataggcagctgtcctgtgatgtcagcggtgcagcgtgtgtgccacctcattattatctagctaagcggaacatgtgcttcatctgtgggatgctgaaggagatgagtgggcttcggagtgaatgtggcagtttaaaaaataacttcattgtttggacctgcatatttagctgttttggaacgcagttgattccttgagtttcatatataagactgctgcagtcacatcacaatattcagtggtgaaatcttgtttgttactgtcattcccattccttttcgtttagaatcagaataaagttgtatttcaaatatctaaaaaaaaaaaaaaaaaa

SEQ ID NO: 2918 - DNA, 5415 bp, Homo Sapiens
  NM_006328
attggctaggccagggcgcctgcgcggcggggttctcggtcgccagccattcctgaggaggactgccggtcgttcggacgtcttgcctgtcgctggaggagaggtccgggctctccaggaaggtggctgcggcgacaaaatgaagatattcgtgggcaacgtcgacggggcggatacgactccggaggagctggcagccctctttgcgccctacggcacggtcatgagctgcgccgtcatgaaacagttcgccttcgtgcacatgcgcgagaacgcgggcgcgctgcgcgccatcgaagccctgcacggccacgagctgcggccggggcgcgcgctcgtggtggagatgtcgcgcccaaggcctcttaatacttggaagattttcgtgggcaatgtgtcggctgcatgcacgagccaggaactgcgcagcctcttcgagcgccgcggacgcgtcatcgagtgtgacgtggtgaaagactacgcgtttgttcacatggagaaggaagcagatgccaaagccgcaatcgcgcagctcaacggcaaagaagtgaagggcaagcgcatcaacgtggaactctccaccaagggtcagaagaaggggcctggcctggctgtccagtctggggacaagaccaagaaaccaggggctggggatacggccttccctggaactggtggcttctctgccaccttcgactaccagcaggcttttggcaacagcactggtggctttgatgggcaagcccgtcagcccacaccacccttctttggtcgcgaccgcagccctctgcgccgttcacctccccgagcctcttatgtggctcctctgacggcccagccagctacctaccgggcccagccgtccgtgtcactgggagctgcctacagggcccagccttctgcctctttgggtgttggctatcggactcagcccatgacagcccaggcagcctcttaccgcgctcagccctctgtctcccttggggcaccatacaggggccagctggctagtcctagctcccagtctgctgcagcttcttcactcggcccatatggtggagcccagccctcagcctcggccctttcctcctatgggggtcaggcagctgcagcttcttcgctcaactcctatggggctcagggttcctcccttgcctcctatggtaaccagccatcctcttacggcgcccaggctgcctcttcctatggggttcgtgcagctgcttcttcctacaacacccagggagcagcttcctccttaggctcctacggggctcaggcagcctcctatggggcccagtctgcagcctcctcactagcttatggagcccaggcagcttcatataatgcccagccctcggcctcttacaatgcccagtctgccccatatgctgcacagcaggctgcttcctactcttcccaacctgctgcctatgtggcacagccagccacagctgctgcctatgccagccagccagcagcctacgccgcacaagccactaccccaatggctggctcctatggggcccagccggttgtgcagacccagctgaatagttacggggcccaagcatcaatgggcctttcaggctcctatggggctcagtcggctgctgcggccactggctcctatggtgccgcagcagcctacggggcccaaccttctgccaccctggcagctccttaccgcactcagtcatcagcctcattggctgcttcctatgctgcccagcagcatccccaggctgctgcctcctaccgcggccagccaggcaatgcctacgatggggcaggtcagccgtctgcagcctacctgtccatgtcccagggggccgttgccaacgccaacagcaccccgccgccctatgagcgtacccgcctctccccaccccgggccagctacgacgatccctacaaaaaggctgtcgccatgtcgaaaaggtatggttccgaccggcgtttagccgagctctctgattaccgccgtttatcagagtcgcagctttcgttccgccgctcgccgacaaagtcctcgctggattaccgtcgcctgcccgatgcccattccgattacgcacgctattcgggctcctataatgattacctgcgggcggctcagatgcactctggctaccagcgccgcatgtagggccatcctgggatggggcaccacagggagggagggagaaaagaggtgggtagggttacagatccaggttataactactctggcccatacctttcctggttgtggtttttcatgccctctaccatgtgggccttccccaggagatgatcctgttaagtgttcggcagtaacctactttgttccttcgcctcagcagcaaatcttgctactggctctagatctgcggtttcccctctaccctgcctcccgtctccccagaatgggaatttcttttatgtttttatttttttcctggctcccttttatttttgtgcgcgatatttaaggtcgtctggatggggaagcaacctgcagctgaggtcgccggcgcctttttctttttagatgggaaggaggccaggaaagggtcagcttaaccatttcctatgtgccaagctgtgccagcagtccagggtaccctgactgtccctctgtagactgttgagactgagttcctgttgggacagtcagttggtatgtatccaagtccctgctgaccactaatgttctagctgatggtgagcggcacagtcccacttccccatctccccaagtaggtggtgttagaaaaccttaattttttttcccttttgtatggactacaaataaaacttggggcaatttgcagtttggaaacctggttgtcattgtcttgattgcattcagtgtcaaaggagccaatttgacatccaggaagacatgatagctaaagggaaggcagtcagagaacccaggactggtgaggaaaggggtttgaatgtcggaattagaaggattgccctgtggcccagaaggatttagctcatcgtcgtcctgctagcctgccatctttcagactttccagggcaggtggcctggtcctcagccctcaacttgagttagtcacaccaaaatgcagtaaatgatgcccattttcctctgcctgtgcttgaccattttcactgacttttctccagttcaggaataacctgtgttccaatgggatggttctggggtttggcctcttaggaagtggggaatgggctgctgtggtatttacaggctagtagatcctttaggcagtaggctggaatgagtgctggggctgggacccagaaaggaaccagtagtggagtgggggtaatggcgttgcctgatactgccctatggttggaataaggaagggcagagaaaacttgaagcaggtatggggcattctggccatagagctcgtattttgcctgttgagctgtaccatggagcatcctcctgtgtcctgccaacccctgccattatagtcaccggagactcctttacctatccctatctgttagggttttcagatgtcctctcgctgggtttatatttgaaggtatagaatctgggaaagggtggggtgcaagctaaccaaatagggatgctagggttgggtggggaattgaggactcttctgtgcttttattgtagggctggggatcgaggatctgggcaaaaaatatgacatttccaaccagggacaaaatggaggcttgggcttagtgatgggtaaatggaagactggttgagtgggatgataatgggagaacttactgatgctcttttgggaaaaggtgctttaaagactcgatttgggagcctactggggcaaggcgactggggaggtgtacgtgttagtcaagtggaggtcaggtgggttatcttctgcctccttcactggcttcatgtgaacttgcctgtgacagaatatcttgccctagatgtcctcttccctcttgccatcgtgcaaaagcattcgatcttatgaccgtgagttcttatttgtggatgctaactggggtaatctcagggagtactggggccatggctctttcccttgcttctctttctgctcactgctttgctttcaggtgcttagctgctcctttttatttctttgcaggactgggaaagcatgggaggaggattttgataagtttcttgttctctgcgtggtgatggggtggtctgagggccaagttaataagcctacctttggttattaccctggaaaattgagggttgatggtagggttatgattgtggcctgtgtatttgcaatttttctttgtcagtgtggctttctgtcatcttcctttttctccagtgagggttctgccactgtctcaatcccttggttcctgcaaaaaacagctaaatgtgctctcagggccagtggtgatgttctgtgttgcagccccagctcttgaaagtgacctggcccagatgagctctgcctgcttgtcatctttaggtcctgctgcccctgctgcctcagccctcaggctcctaactgctcaagccagaaggagctacaaagccaaatcatttgtcatttttctctggcagattgttttaaaatctccctcccctcttttattttaattatgccacctgtgttaatcctatagcctgcttctttgctttgtggattactgatttcaagttctataacttggggaaagttaggttgagtgaatgggaggacagacactgaatgtgtgttttggaaaaatggactctctatcttcagattattcagcttctccacctatcacctctacaacttggccttcattggagaagttttagttggcttattcctggaacaagaccacctagaggcttttagccttgtcagcctgccctcttctgaggtttggaccttgttttaaattgtgtgcatggtgggcttgagactctcttgtaatggaggtaatgggactatcactgaggggttcagcctatccaggtaggctaccgttctagtcatacccatcacttaaattctgccacagtctgcacagacggttggtcctccaggcatattgtcctattaagccaaataggtggacatcatgggatggatgaggtcatcatgaaaacagatttactggatttatggacctagtatatactatgtaacagatggaaaactgaattttacaatctataggtacctttgaaaggtcataaagggtaaaagtctatagttttccagaaaataattcttaaaactgggttttatgtctagatttaaatcatgtatctgtctgtagtgcttcaaatgtggccaggtgtggtagctcacacctgtaattcccagcgctttgggaatttgaggcaagaggattgctagaggccaggattttgagaccagcttcggcaatacggtgagaccttgtctctaccaaaagaaaagaaaaaaaaaa

SEQ ID NO: 2919 - DNA, 2637 bp, Homo Sapiens
  NM_006329
cgcccctcgccttctgcccgggcgctcgcagccgagcgcggccggggaagggctctcctcccagcgccgagcactgggccctggcagacgccccaagattgttgtgaggagtctagccagttggtgagcgctgtaatctgaaccagctgtgtccagactgaggccccatttgcattgtttaacatacttagaaaatgaagtgttcatttttaacattcctcctccaattggtttaatgctgaattactgaagagggctaagcaaaaccaggtgcttgcgctgagggctctgcagtggctgggaggaccccggcgctctccccgtgtcctctccacgactcgctcggcccctctggaataaaacacccgcgagccccgagggcccagaggaggccgacgtgcccgagctcctccgggggtcccgcccgcgagctttcttctcgccttcgcatctcctcctcgcgcgtcttggacatgccaggaataaaaaggatactcactgttaccattctggctctctgtcttccaagccctgggaatgcacaggcacagtgcacgaatggctttgacctggatcgccagtcaggacagtgtttagatattgatgaatgccgaaccatccccgaggcctgccgaggagacatgatgtgtgttaaccaaaatggcgggtatttatgcattccccggacaaaccctgtgtatcgagggccctactcgaacccctactcgaccccctactcaggtccgtacccagcagctgccccaccactctcagctccaaactatcccacgatctccaggcctcttatatgccgctttggataccagatggatgaaagcaaccaatgtgtggatgtggacgagtgtgcaacagattcccaccagtgcaaccccacccagatctgcatcaatactgaaggcgggtacacctgctcctgcaccgacggatattggcttctggaaggccagtgcttagacattgatgaatgtcgctatggttactgccagcagctctgtgcgaatgttcctggatcctattcttgtacatgcaaccctggttttaccctcaatgaggatggaaggtcttgccaagatgtgaacgagtgtgccaccgagaacccctgcgtgcaaacctgcgtcaacacctacggctctttcatctgccgctgtgacccaggatatgaacttgaggaagatggcgttcattgcagtgatatggacgagtgcagcttctctgagttcctctgccaacatgagtgtgtgaaccagcccggcacatacttctgctcctgccctccaggctacatcctgctggatgacaaccgaagctgccaagacatcaacgaatgtgagcacaggaaccacacgtgcaacctgcagcagacgtgctacaatttacaagggggcttcaaatgcattgaccccatccgctgtgaggagccttatctgaggatcagtgataaccgctgtatgtgtcctgctgagaaccctggctgcagagaccagccctttaccatcttgtaccgggacatggacgtggtgtcaggacgctccgttcccgctgacatcttccaaatgcaagccacgacccgctaccctggggcctattacattttccagatcaaatctgggaatgagggcagagaattttacatgcggcaaacgggccccatcagtgccaccctggtgatgacacgccccatcaaagggccccgggaaatccagctggacttggaaatgatcactgtcaacactgtcatcaacttcagaggcagctccgtgatccgactgcggatatatgtgtcgcagtacccattctgagcctcgggctggagcctccgacgctgcctctcattggcaccaagggacaggagaagagaggaaataacagagagaatgagagcgacacagacgttaggcatttcctgctgaacgtttccccgaagagtcagccccgacttcctgactctcacctgtactattgcagacctgtcaccctgcaggacttgccacccccagttcctatgacacagttatcaaaaagtattatcattgctcccctgatagaagattgttggtgaattttcaaggccttcagtttatttccactattttcaaagaaaatagattaggtttgcgggggtctgagtctatgttcaaagactgtgaacagcttgctgtcacttcttcacctcttccactccttctctcactgtgttactgctttgcaaagacccgggagctggcggggaaccctgggagtagctagtttgctttttgcgtacacagagaaggctatgtaaacaaaccacagcaggatcgaagggtttttagagaatgtgtttcaaaaccatgcctggtattttcaaccataaaagaagtttcagttgtccttaaatttgtataacggtttaattctgtcttgttcattttgagtatttttaaaaaatatgtcgtagaattccttcgaaaggccttcagacacatgctatgttctgtcttcccaaacccagtctcctctccattttagcccagtgttttctttgaggaccccttaatcttgctttctttagaatttttacccaattggattggaatgcagaggtctccaaactgattaaatatttgaagagaaaaa

SEQ ID NO: 2920 - DNA, 2578 bp, Homo Sapiens
  NM_006330
cggcgggcgaggggcagggcagggcggaccctggacgcgcgggcgcgcgcggaaggtagcgcggggccgcgttggcgcgcacgcgcctgagcgtgcgcccggtggggccggccgggactcgccgctcgcacgcccttgggccgcggccgggcgcccgctcttccttccgcttgcgctgtgagctgaggcggtgtatgtgcggcaataacatgtcaaccccgctgcccgccatcgtgcccgccgcccggaaggccaccgctgcggtgattttcctgcatggattgggagatactgggcacggatgggcagaagcctttgcaggtatcagaagttcacatatcaaatatatctgcccgcatgcgcctgttaggcctgttacattaaatatgaacgtggctatgccttcatggtttgatattattgggctttcaccagattcacaggaggatgaatctgggattaaacaggcagcagaaaatataaaagctttgattgatcaagaagtgaagaatggcattccttctaacagaattattttgggagggttttctcagggaggagctttatctttatatactgcccttaccacacagcagaaactggcaggtgtcactgcactcagttgctggcttccacttcgggcttcctttccacagggtcctatcggtggtgctaatagagatatttctattctccagtgccacggggattgtgaccctttggttcccctgatgtttggttctcttacggtggaaaaactaaaaacattggtgaatccagccaatgtgacctttaaaacctatgaaggtatgatgcacagttcgtgtcaacaggaaatgatggatgtcaagcaattcattgataaactcctacctccaattgattgacgtcactaagaggccttgtgtagaagtacaccagcatcattgtagtagagtgtaaaccttttcccatgcccagtcttcaaatttctaatgttttgcagtgttaaaatgttttgcaaatacatgccaataacacagatcaaataatatctcctcatgagaaatttatgatcttttaagtttctatacatgtattcttataagacgacccaggatctactatattagaatagatgaagcaggtagcttcttttttctcaaatgtaattcagcaaaataatacagtactgccaccagattttttattacatcatttgaaaattagcagtatgcttaatgaaaatttgttcaggtataaatgagcagttaagatataaacaatttatgcatgctgtgacttagtctatggatttattccaaaattgcttagtcaccatgcagtgtctgtatttttatatatgtgttcatatatacataatgattataatacataataagaatgaggtggtattacattattcctaataatagggataatgctgtttattgtcaagaaaaagtaaaatcgttctcttcaattaatggcccttttattttgggaccaggcttttattttccctgatattatttctatttaatactcttttctctcaagaaaaaaaaaaaagtttgttttttctttattgtccttcatagcaggccaagtattgcctctctgcaatagacagctactgtcaatacatgctgtaatttgacattctgggtcacagatataaggtatttaaaatctatttatgctttatagagaaaccagacattaaaacttcatgcactacttatttcgaattactgtaccttatccaaatttacacctagctattaggatcttcaacccaggtaacaggaataattctgtggtttcatttttctgtaaacaactgaaagaataattagatcatattctagtatgttctgaaatatctttaagactgatcttaaaaactaacttctaagatgatttcatcttctcatagtatagagtttactttgtacacgtttgaaaccaactactgtagaagatgaggaatctattgtaattttttgctttattttcatctgccagtggacttatttgaaattttcactttagtcaaattattttttgtattagtttttgatgcagacataaaaatagcaatcattttaaattgtcaaaatttccagattactggtaaaaattatttgaaaacaaacttatgggtaataaaggctagtcagaaccctataccataaagtgtagttaccatacagattaatatgtagcaaaaatgtatgcttgatatttctcaactgtgttaatttttctgctgtattccagctgaccaaaacaatattaagaatgcatctttataaatgggtgctaattgataatggaaataatttagtaatggactatacaggatgttaataatgaagccatatgtttatgtctggatttaaaaattttaaacaatcatttactatgtcatttttctttaccttgaagaacataaactgttatttcacttctacaaatcagcaagatattatttatggcaagaaatattccattgaaatattgtgctgtaacatgggaaagtgtaaatgtttttcatggtttctatcaatgtgaaataaaatttaattctgaaaaa

SEQ ID NO: 2921 - DNA, 1072 bp, Homo Sapiens
  NM_006331
ctcccagggagggcagcgcaagacagcaagtcatctccatttcctggcccactttcaaaatggcagccggaaggaaatttgtgattagaagccgcgctgttcttatttaagagcgttagcgcaacttccggtattgttgcaagatggccgcgcccagtgatggattcaagcctcgtgaacgaagcggtggggagcaggcacaggactgggatgctctgccacccaagcggccccgactaggggcaggaaacaagatcggaggccgtaggcttattgtggtgctggaaggggccagtctggagacagtcaaggtagggaagacatatgagctactcaactgtgacaagcacaagtctatattgttgaagaatggacgggaccctggggaagcgcggccagatatcacccaccagagtttgctgatgctgatggatagtcccctgaaccgagctggcttgctacaggtttatatccatacacagaagaatgttctgattgaagtgaatccccagacccgaattcccagaacctttgaccgcttttgtggcctcatggttcaacttttacacaagctcagtgttcgagcagctgatggcccccagaagcttttgaaggtaattaagaatccagtatcagatcactttccagttggatgtatgaaagttggcacttctttttccatcccggttgtcagtgatgtgcgtgagctggtgcccagcagtgatcctattgtttttgtggtaggggcctttgcccatggcaaggtcagtgtggagtatacagagaagatggtgtccatcagtaactaccccctttctgctgccctcacctgtgcaaaacttaccacagcctttgaggaagtatggggggtcatttgacagtagtagaacctgttctgaaaccagaaactgttgatgtcacatcctttgaccctggtctgagctgactgctggaagatgatctttctgcactgagactgtggagtttggggaagccaaggctgtacatttgctatttgtttatcctatgaatactgttcttgcaaacctggttgttttggggttcctaaagt

SEQ ID NO: 2922 - DNA, 1051 bp, Homo Sapiens
  NM_006332
ggaccgccgcctggttaaaggcgcttatttcccaggcagccgctgcagtcgccacacctttgcccctgctgcgatgaccctgtcgccacttctgctgttcctgccaccgctgctgctgctgctggacgtccccacggcggcggtgcaggcgtcccctctgcaagcgttagacttctttgggaatgggccaccagttaactacaagacaggcaatctatacctgcgggggcccctgaagaagtccaatgcaccgcttgtcaatgtgaccctctactatgaagcactgtgcggtggctgccgagccttcctgatccgggagctcttcccaacatggctgttggtcatggagatcctcaatgtcacgctggtgccctacggaaacgcacaggaacaaaatgtcagtggcaggtgggagttcaagtgccagcatggagaagaggagtgcaaattcaacaaggtggaggcctgcgtgttggatgaacttgacatggagctagccttcctgaccattgtctgcatggaagagtttgaggacatggagagaagtctgccactatgcctgcagctctacgccccagggctgtcgccagacactatcatggagtgtgcaatgggggaccgcggcatgcagctcatgcacgccaacgcccagcggacagatgctctccagccaccacacgagtatgtgccctgggtcaccgtcaatgggaaacccttggaagatcagacccagctccttacccttgtctgccagttgtaccagggcaagaagccggatgtctgcccttcctcaaccagctccctcaggagtgtttgcttcaagtgatggccggtgagctgcggagagctcatggaaggcgagtgggaacccggctgcctgcctttttttctgatccagaccctcggcacctgctacttaccaactggaaaattttatgcatcccatgaagcccagatacacaaaattccaccccatgatcaagaatcctgctccactaagaatggtgctaaagtaaaactagtttaataagcaaaaaaaaaaaaaaaaaaa

SEQ ID NO: 2923 - DNA, 1937 bp, Homo Sapiens
  NM_006337
gtacctcacggaagccggctttggccctgcggctgctaccgtcgccgcggagaaattgttggatctggcagtctaggaatgaatctcctctcagcctttaagctcacctggtcagaatccttggatgagcctgtgggaccgttcctcctagcccggtggtttggaaccagtggctttgggactgtaagaggatggacaaagattctcaggggctgctagattcatccctgatggcatcaggcactgccagccgctcagaggatgaggagtcactggcagggcagaagcgagcctcctcccaggccttgggcaccatccctaaacggagaagctcctccaggttcatcaagaggaagaagttcgatgatgagctggtggagagcagcctggcaaaatcttctacccgggcaaagggggccagtggggtggaaccagggcgctgttcggggagtgaaccctcctccagtgagaagaagaaggtatccaaagcccccagcactcctgtgccacccagcccagccccagcccctggactcaccaagcgtgtgaagaagagtaaacagccacttcaggtgaccaaggatctgggccgctggaagcctgcagatgacctcctgctcataaatgctgtgttgcagaccaacgacctgacctccgtccacctgggcgtgaaattcagctgccgcttcacccttcgggaggtccaggagcgttggtacgccctgctctacgatcctgtcatctccaagttggcctgtcaggccatgaggcagctgcacccagaggctattgcagccatccagagcaaggccctgtttagcaaggctgaggagcagctgctgagcaaagtgggatcgaccagccagcccaccttggagaccttccaggacctgctgcacagacaccctgatgccttctacctggcccgtaccgcgaaggccctgcaggcccactggcagctcatgaagcagtattacctgctggaggaccagacagtgcagccgctgcccaaaggggaccaagtgctgaacttctctgatgcagaggacctgattgatgacagtaagctcaaggacatgcgagatgaggtcctggaacatgagctgatggtggctgaccggcgccagaagcgagagattcggcagctggaacaggaactgcataagtggcaggtgctagtggacagcatcacaggcatgagctctccggacttcgacaaccagacactggcagtgctgcggggccgcatggtgcggtacctgatgcgctcgcgtgagatcaccctgggcagagcaaccaaggataaccagattgatgtggacctgtctctggagggtccggcctggaagatatcccggaaacaaggtgtcatcaagctgaagaacaacggtgatttcttcattgccaatgagggtcgacggcccatctacatcgatggacggccggtgctctgtggctccaaatggcgcctcagcaacaactctgtggtggagatcgccagcctgcgattcgtcttccttatcaaccaggacctcattgccctcatcagggctgaggctgccaagatcacaccacagtgaggagtggtggcaggactcgtgggccctctccggcctgtttcccctgccactccagcccccttgagctgggaactcaggctcctggaaaaacctgggcagtgggaggctcagctgcgggccattgatttgagcctttgagggaggatagggctggcctttgtgaagccagcagaggctgagaacctcaggcttccctagatccagagcccctccccatcttcctctctctaaaaacaaccctaccccccattgccaccttcactcctgtgtctccagctgattagcctcagactcttcttttattgtttttcttttgtaaataaaaagcaccaggttccaaaaaaaaaaaaaaaaaaa

SEQ ID NO: 2924 - DNA, 3352 bp, Homo Sapiens
  NM_006340
ctctgtggttcgggtccgctttcgtctccgtcctgctgccgttaccgccgctgctgccgccgcttgcgtcccccgctccggtctgtggtgcagccgggacccaggaccatgtctctgtctcgctcagaggagatgcaccggctcacggaaaatgtctataagaccatcatggagcagttcaaccctagcctccggaacttcatcgccatggggaagaattacgagaaggcactggcaggtgtgacgtatgcagccaaaggctactttgacgccctggtgaagatgggggagctggccagcgagagccagggctccaaagaactcggagacgttctcttccagatggctgaagtccacaggcagatccagaatcagctggaagaaatgctgaagtcttttcacaacgagctgcttacgcagctggagcagaaggtggagctggactccaggtatctgagtgctgcgctgaagaaataccagactgagcaaaggagcaaaggcgacgccctggacaagtgtcaggctgagctgaagaagcttcggaagaagagccagggcagcaagaatcctcagaagtactcggacaaggagctgcagtacatcgacgccatcagcaacaagcagggcgagctggagaattacgtgtccgacggctacaagaccgcactgacagaggagcgcaggcgcttctgcttcctggtggagaagcagtgcgccgtggccaagaactccgcggcctaccactccaagggcaaggagctgctggcgcagaagctgccgctgtggcaacaggcctgtgccgaccccagcaagatcccggagcgcgcggtgcagctcatgcagcaggtggccagcaacggcgccaccctccccagcgccctgtcggcctccaagtccaacctggtcatttccgaccccattccgggggccaagcccctgccggtgccccccgagctggcaccgttcgtggggcggatgtctgcccaggagagcacacccatcatgaacggcgtcacaggcccggatggcgaggactacagcccgtgggctgaccgcaaggctgcccagcccaaatccctgtctcctccgcagtctcagagcaagctcagcgactcctactccaacacactccccgtgcgcaagagcgtgaccccaaaaaacagctatgccaccaccgagaacaagactctgcctcgctcgagctccatggcagccggcctggagcgcaatggccgtatgcgggtgaaggccatcttctcccacgctgctggggacaacagcaccctcctgagcttcaaggagggtgacctcattaccctgctggtgcctgaggcccgcgatggctggcactacggagagagtgagaagaccaagatgcggggctggtttcccttctcctacacccgggtcttggacagcgatggcagtgacaggctgcacatgagcctgcagcaagggaagagcagcagcacgggcaacctcctggacaaggacgacctggccatcccaccccccgattacggcgccgcctcccgggccttccccgcccagacggccagcggcttcaagcagaggccctacagtgtggccgtgcccgccttctcccagggcctggatgactatggagcgcggtccatgagcagcgccgatgtggaagtggccagattctgagccgcctgactagagttagaatccctttgcccacgtccagctgaagccgacagtgaccaacgacaggtctgcccccctcctcagctgatggccacatctgcagtgctgcccatctggtggcttcccccgcccttcccatgtagcctgttctgtcatcatctgtgcgttcctgtgtagagaacatccaggccccggctgcctggtcttgccccacttgagtctggcctggactggatcccagctgttctaggcagggccgggcagagtggggcgcaggcccctgaagggcgagacccagtggctgggctgcccagggctgaggggccgcctcttgagggtacacgcctctggtcacatggccatggagccttgggtacccctgagttaagggaggacatttggccagctggtggctgggaggggagcctggctgccctgctgcttctcctgcctaataaacaggcttctcctgcaccaggtgtgatctgtccgcccaagggccagaaggccgggagcacggggatgggagcgcccgcaccctggctggaagatgaacttcccgtaagcacgtaattccctgcaggtccggcagctacacctggagtgtggggcctggtccctccccatgcccctcggtggggctctcctgggcccctcactcccactggcaatgtcacaagggcctccccaggcccctcctgcctcgggcaggccccagccctcctccttacccaacctcccatccagaaccttgctgccagggcctcccagctcgctcctgcggccaaaggccagctgtcaggtgctatgcggggtcaccagcagagtgcccgctggcaggtgggggcttccccgcttccggggtctgccccaggactcctgggtggacctcccccccccacctccgctgactcctgcaggcactggggagctctgctggaattgggggttttaaaacttcattagcagatttgtgctcttccatactgtttgtttgtttgttaggtgaaatacagtgtggtgagctgcactggtgacaacagcccttacctggctggggaggtgtctccagcagagctcactcccgcctacagccactcacaccccggggacaggaagctgtagagttggcgggccaggagggcagttgagagctggccagcggagggtgcagggaagcccagctgtgctcaactctcctgcctccgccttccaccctgggcccagggacagacagacattgccctcagaagggcagggaggaggctgtcctggagaggcctgtaggtccattcttcacccgtccctaccaggccaactcggcctgcaggaagggagacctgcagggcgctacccctgcgcccccacacacagtagggccagaacaccatcccctccaccggggtgtgccgaggacagtggggaggagaggagaggggcagcttcctcctggccccaggaagggctggcatcgggttcctggcacagcccctcctgtccaggactttatcatcggcagacctcagaagacaacacacaaaggtttcttttgtcttagcttcatttctcttaaaaaacaaggaacaagaaaacattgcaccagcgttctaagcctcaaacaaaacacaaaacaaatccccctgcgaagcaacaataaactttacatctctttggcaacaat

SEQ ID NO: 2925 - DNA, 1163 bp, Homo Sapiens
  NM_006341
ccgtgcgggaatgggcgtggcctgggcggggcgggcgctaggacccaccggagcgccgtgaacgtcaccgagcggcgccgaggccccgggttgagcgggaggcgcgatcggtccggtcggtggctccccgcggcggggccgggcccgatctcgggcgggaaccgagcgcagagccggtagcgggaaggatgaccacgctcacacgacaagacctcaactttggccaagtggtggccgatgtgctctgcgagttcctggaggtggctgtgcatctcatcctctacgtgcgcgaggtctaccccgtgggcatcttccagaaacgcaagaagtacaacgtgccggtccagatgtcctgccacccggagctgaatcagtatatccaggacacgctgcactgcgtcaagccactcctggagaagaatgatgtggagaaagtggtggtggtgattttggataaagagcaccgcccagtggagaaattcgtctttgagatcacccagcctccactgctgtccatcagctcagactcgctgttgtctcatgtggagcagctgctccgggccttcatcctgaagatcagcgtgtgcgatgccgtcctggaccacaaccccccaggctgtaccttcacagtcctggtgcacacgagagaagccgccactcgcaacatggagaagatccaggtcatcaaggatttcccctggatcctggcggatgagcaggatgtccacatgcatgacccccggctgataccactaaaaaccatgacgtcggacattttaaagatgcagctttacgtggaagagcgcgctcataaaggcagctgagggggcacctgccaccccactgatgcccaaactgtcagactttgggggatccccgcctagggcagtgctgcatggctgccctgattccaagtgctcttatcgcctctgtgtgtggatcgcccgccccagcccggggccgctcaggtctgcttggaggatgcctcccccaggagggcagtgagggatgccgcaacctcgacttctcagcctcctggggttccgccggccaacactgtctgtctcaaatactgtgctgtgagttgtttcaataaaggggccccaagggctgggctgaaaaaaaaaaaaaaaaaaaaaaaaaaaaaaaaaaaaaaaaaaaaa

SEQ ID NO: 2926 - DNA, 3632 bp, Homo Sapiens
  NM_006343
actcactgcccgggccgcccggacagggagcttcgctggcgcgcttggccggcgacaggacaggttcgggacgtccatctgtccatccgtccggagagaaattacagatccgcagccccgggatggggccggccccgctgccgctgctgctgggcctcttcctccccgcgctctggcgtagagctatcactgaggcaagggaagaagccaagccttacccgctattcccgggaccttttccagggagcctgcaaactgaccacacaccgctgttatcccttcctcacgccagtgggtaccagcctgccttgatgttttcaccaacccagcctggaagaccacatacaggaaacgtagccattccccaggtgacctctgtcgaatcaaagcccctaccgcctcttgccttcaaacacacagttggacacataatactttctgaacataaaggtgtcaaatttaattgctcaatcagtgtacctaatatataccaggacaccacaatttcttggtggaaagatgggaaggaattgcttggggcacatcatgcaattacacagttttatccagatgatgaagttacagcaataatcgcttccttcagcataaccagtgtgcagcgttcagacaatgggtcgtatatctgtaagatgaaaataaacaatgaagagatcgtgtctgatcccatctacatcgaagtacaaggacttcctcactttactaagcagcctgagagcatgaatgtcaccagaaacacagccttcaacctcacctgtcaggctgtgggcccgcctgagcccgtcaacattttctgggttcaaaacagtagccgtgttaacgaacagcctgaaaaatccccctccgtgctaactgttccaggcctgacggagatggcggtcttcagttgtgaggcccacaatgacaaagggctgaccgtgtccaagggagtgcagatcaacatcaaagcaattccctccccaccaactgaagtcagcatccgtaacagcactgcacacagcattctgatctcctgggttcctggttttgatggatactccccgttcaggaattgcagcattcaggtcaaggaagctgatccgctgagtaatggctcagtcatgatttttaacacctctgccttaccacatctgtaccaaatcaagcagctgcaagccctggctaattacagcattggtgtttcctgcatgaatgaaataggctggtctgcagtgagcccttggattctagccagcacgactgaaggagccccatcagtagcacctttaaatgtcactgtgtttctgaatgaatctagtgataatgtggacatcagatggatgaagcctccgactaagcagcaggatggagaactggtgggctaccggatatcccacgtgtggcagagtgcagggatttccaaagagctcttggaggaagttggccagaatggcagccgagctcggatctctgttcaagtccacaatgctacgtgcacagtgaggattgcagccgtcaccagagggggagttgggcccttcagtgatccagtgaaaatatttatccctgcacacggttgggtagattatgccccctcttcaactccggcgcctggcaacgcagatcctgtgctcatcatctttggctgcttttgtggatttattttgattgggttgattttatacatctccttggccatcagaaaaagagtccaggagacaaagtttgggaatgcattcacagaggaggattctgaattagtggtgaattatatagcaaagaaatccttctgtcggcgagccattgaacttaccttacatagcttgggagtcagtgaggaactacaaaataaactagaagatgttgtgattgacaggaatcttctaattcttggaaaaattctgggtgaaggagagtttgggtctgtaatggaaggaaatcttaagcaggaagatgggacctctctgaaagtggcagtgaagaccatgaagttggacaactcttcacagcgggagatcgaggagtttctcagtgaggcagcgtgcatgaaagacttcagccacccaaatgtcattcgacttctaggtgtgtgtatagaaatgagctctcaaggcatcccaaagcccatggtaattttacccttcatgaaatacggggacctgcatacttacttactttattcccgattggagacaggaccaaagcatattcctctgcagacactattgaagttcatggtggatattgccctgggaatggagtatctgagcaacaggaattttcttcatcgagatttagctgctcgaaactgcatgttgcgagatgacatgactgtctgtgttgcggacttcggcctctctaagaagatttacagtggcgattattaccgccaaggccgcattgctaagatgcctgttaaatggatcgccatagaaagtcttgcagaccgagtctacacaagtaaaagtgatgtgtgggcatttggcgtgaccatgtgggaaatagctacgcggggaatgactccctatcctggggtccagaaccatgagatgtatgactatcttctccatggccacaggttgaagcagcccgaagactgcctggatgaactgtatgaaataatgtactcttgctggagaaccgatcccttagaccgccccaccttttcagtattgaggctgcagctagaaaaactcttagaaagtttgcctgacgttcggaaccaagcagacgttatttacgtcaatacacagttgctggagagctctgagggcctggcccagggctccacccttgctccactggacttgaacatcgaccctgactctataattgcctcctgcactccccgcgctgccatcagtgtggtcacagcagaagttcatgacagcaaacctcatgaaggacggtacatcctgaatgggggcagtgaggaatgggaagatctgacttctgccccctctgctgcagtcacagctgaaaagaacagtgttttaccgggggagagacttgttaggaatggggtctcctggtcccattcgagcatgctgcccttgggaagctcattgcccgatgaacttttgtttgctgacgactcctcagaaggctcagaagtcctgatgtgaggagaggtgcggggagacattccaaaaatcaagccaattcttctgctgtaggagaatccaattgtacctgatgtttttggtatttgtcttccttaccaagtgaactccatggccccaaagcaccagatgaatgttgttaagtaagctgtcattaaaaatacataatatatatttatttaaagagaaaaaatatgtgtatatcatggaaaaagacaaggatattttaataaaacattacttatttcatttcacttatcttgcatatcttaaaattaagcttcagctgctccttgatattaacatttgtacagagttgaagttgttttttcaagttcttttctttttcatgactattaaatgtaaaaatatttgtaaaatgaaatgccatatttgacttggcttctggtcttgatgtatttgataagaatgattcattcaatgtttaaagttgtataactgattaattttctgatatggcttcctaataaaatatgaataaggaagaaaaaa

SEQ ID NO: 2927 - DNA, 1716 bp, Homo Sapiens
  NM_006344
ggtctctgtgtgttctaatccctgttcattctcatttactgtctaaagttgaggagatgggatgtcccagatgatagggctcctgggatttcagacccaagaccagcaggactccagtcacctctaccccagctctccaggacacagcgctcccaactctgagtgacgtcccacctctggtccttgcagcacaaccaacgtgggaatcacaccctccagacctcccacagctccaccccagactgggcgccggccctgcctccatttcagctgtgacaacctcagagccgtgttggcccaagcatgacaaggacgtatgaaaacttccagtacttggagaataaggtgaaagtccaggggtttaaaaatgggccacttcctctccagtccctcctgcagcgtctctgctctgggccctgccatctcctgctgtccctgggcctcggcctcctgctgctggtcatcatctgtgtggttggattccaaaattccaaatttcagagggacctggtgaccctgagaacagattttagcaacttcacctcaaacactgtggcggagatccaggcactgacttcccagggcagcagcttggaagaaacgatagcatctctgaaagctgaggtggagggtttcaagcaggaacggcaggcagttcattctgaaatgctcctgcgagtccagcagctggtgcaagacctgaagaaactgacctgccaggtggctactctcaacaacaatggtgaggaagcctccactgaagggacctgctgccctgtcaactgggtggagcaccaagacagctgctactggttctctcactctgggatgtcctgggccgaggctgagaagtactgccagctgaagaacgcccacctggtggtcatcaactccagggaggagcagaattttgtccagaaatatctaggctccgcatacacctggatgggcctcagtgaccctgaaggagcctggaagtgggtggatggaacagactatgcgaccggcttccagaactggaagccaggccagccagacgactggcaggggcacgggctgggtggaggcgaggactgtgctcacttccatccagacggcaggtggaatgacgacgtctgccagaggccctaccactgggtctgcgaggctggcctgggtcagaccagccaggagagtcactgagctgcctttggtgggaccacccggccacagaaatggcggtgggaggaggactcttctcacgacctcctcgcaagaccgctctgggagagaaataagcactgggagattggaagcactgctaacattttgaatttttttctctttaattttaaaaagatggtatagtgttcttaagcttttattttttttccaacttttgaaagtcaacttcatgaaggtataatttttacataataaaaatgcactcatttaaagagtagagatgactttgacaaatatgcatgcctaggtgactaccactccgatcgcaatagataacattgccatcgcccccaccagtcccctcatgcctctgggcagtccaaccacttccctgtttccaggccagtgatctacttctttttcactatttattggccttgcctcttctagagcttctagaacttcatataagtgaaatcatacactctcgtgtatatacttcatataagtgaatatatactctcgtgagaacttaaaaaaaaaaaaaaaaaa

SEQ ID NO: 2928 - DNA, 813 bp, Homo Sapiens
  NM_006347
gaaatccgcggaccgggctttaggttcgccggaatcccacgctcccgacttctgcttccgggtcggagccatggcggtggcaaattcaagtcctgttaaccccgtggtgttctttgatgtcagtattggcggtcaggaagttggccgcatgaagatcgagctctttgcagacgttgtgcctaagacggccgagaactttaggcagttctgcaccggagaattcaggaaagatggggttccaataggatacaaaggaagcaccttccacagggtcataaaggatttcatgattcagggtggagattttgttaatggagatggtactggagtcgccagtatttaccgggggccatttgcagatgaaaattttaaacttagacactcagctccaggcctgctttccatggcgaacagtggtccaagtacaaatggctgtcagttctttatcacctgctctaagtgcgattggctggatgggaagcatgtggtgtttggaaaaatcatcgatggacttctagtgatgagaaagattgagaatgttcccacaggccccaacaataagcccaagctacctgtggtgatctcgcagtgtggggagatgtagtccagacaaagactgaatcaggccttcccttcttcttggtggtgttcttgagtaagataatctggactggcccccgtctttgcttccctgcctgctgctgccccatttgatcaagagaccatggaagtgtcagagattcagaatccaagattgtctttaagttttcaactgtaaataaagtttttttgtatgcgtaaaaaaaaaaaaaa

SEQ ID NO: 2929 - DNA, 4880 bp, Homo Sapiens
  NM_006348
attggtccttttatggttcagacttccttcttcatcgactctccctaattctcttcactgttcatccccagcaacttttcttcccaagcatttcctgcgggcttttattaccccaggagtgccaatcaaggcgtggaacagataaagctgtgtagcaactaacgcgtgactcttgtgagtgtggagggcaaacgaagctccctgaaacctccgctctgctctcctgccttacgccgcgcggcccctgttctgaggtttaatacttgcttcacagataagcgctgcggccacgttccggtgcccaccttctccttggctagggcacgacgccagcccagggggcgcggccctgagctgctgcgagagacagctgaaagcgccggcccgacggccttggctccctcggtgcgctgggcgcagagcactcggaccctgggcgcccactgctcgagtacctgcgcggctcctagccaggcttagcccaggcgcgggctgagagtcagttcgccaggtgggcctggagccatgggctgggtgggcgggcggcgccgggattctgcgtcaccacctgggcggagccgttctgctgctgacgacatcaacccggcacctgccaacatggaaggtggcggcggcagcgtcgctgtagctggcctcggagctcgaggctctggagcggctgcagctacagtccgggaacttctgcaggacgggtgttatagtgactttttaaacgaagactttgatgtaaagacttatacttctcaatctattcatcaagctgtaattgctgaacaactagcaaaacttgcccaaggaatcagtcagttggacagagaactacacttacaggttgttgcaagacatgaagatttactggcacaagcaactgggattgagtcgttggaaggtgttcttcagatgatgcagacgagaattggggctttacagggagctgttgataggataaaagcaaaaattgttgaaccatacaataagatagttgcccggactgcacaactagcaagacttcaggttgcctgtgatttgcttcggaggattattcgtatcttgaatctcagtaagagactccaaggacaactgcaagggggaagtagagagataacaaaagctgctcagagtctcaatgaacttgattatctttctcaaggaatagatctttctggaatagaagtgatagaaaatgatctactttttattgcaagagcccgacttgaagtggaaaatcaagctaagcgcctactagagcagggtttggagactcagaatccaactcaagtcggaacagctcttcaggttttctataatcttggaactttgaaggatactattaccagtgttgtggatggatattgtgctactttagaagaaaatatcaacagtgcattagacataaaagttttgactcagccttcccagtcagctgtgagagggggacctggacgatctaccatgccaaccccaggaaatactgcagctttgcgtgcctcattctggaccaatatggagaaacttatggatcatatttatgctgtttgtggacaggtacaacatctacaaaaagtattggccaagaagagagatcctgtttctcacatttgtttcattgaagaaatagttaaggatggacaaccggaaattttctacacattttggaattcagttactcaggcactttcttctcaatttcatatggcaacaaactcttcgatgtttttgaagcaggcatttgaaggagaataccctaaattattacgtctttataatgacttatggaagcgtcttcaacaatacagtcagcatatccaagggaattttaatgcaagtggaactacagacctctatgttgacctacaacacatggaagatgatgcacaagatatattcataccaaaaaagccagattatgatccagaaaaggctttgaaagactcactacaaccctatgaggctgcttatctatcaaaatccttatctcgactcttcgatcctatcaacttggtttttcccccgggtggtcgtaatcctccttcctctgatgaacttgatggtattattaaaactatagcaagtgaactaaatgttgctgctgttgatacaaacctcacattagctgtgtcaaaaaatgtggcaaagaccatccagttatacagtgtaaaatcagagcagcttctctccacacaaggagatgcaagtcaggtgattgggcctcttactgaaggacagagaagaaatgtggcagtagtgaattcattgtataagttgcaccaatcagtaacaaaggttgtttccagtcagagctcattcccactggcagctgagcaaactataatttcagctctaaaggctattcatgctcttatggaaaatgctgtgcaacccttactcacttctgtgggagatgctatagaggccataatcatcaccatgcatcaagaagacttttctgggtcattatccagctcaggaaaacctgatgttccttgttctctgtacatgaaggagctacaaggtttcattgccagagttatgagtgactattttaaacactttgaatgcttggattttgtctttgacaacactgaggctattgcccaaagagctgttgaactttttatccgccatgccagtctcataagacctcttggtgaaggtgggaaaatgcgacttgctgctgattttgcacagatggagttggctgtgggtccattctgtagacgagtatctgatttaggaaagtcctatcggatgctgagatcattcagacctctgctcttccaggcaagtgaacatgtagccagtagtcctgcattgggggatgtgattccgttcagcatcattattcagtttttgttcacgagagcacccgctgaactgaaatctcctttccagagggcagagtggtcccacacacgcttctctcagtggctggatgaccatccatctgaaaaggacaggctcctcctcatcaggggagccctggaagcttatgttcaatcagtgagaagtagagaaggcaaagaatttgcaccagtttatcccataatggttcagctgcttcaaaaggctatgtctgctcttcagtaatgacatgaaatctttgttcatctccactttgtgctaacccattcatagttggcagttaaacacatactccaaaagactgctactatctactattttaagaatgtaattgattgttcggtatttcctatcgacgtttatttacctctttagcacttatactttagcataaaaaatgttgagttatcaccacctttcaattccatggacctgatttttccagaaagatgttttcctctttcagatttttgtacaaggctaaaatgtctttcccatccataaccaagtcctcctatgggtacataaacccaaagtccccacttcttttaaagggatatgatcaagttataacatgtaccctgcttcccccaaccctgccttcttcactaaataagcatgtagctcagtggtttccaaatttggctgcacattcataccaatcaccaggggatttttttaaaatcctgatgcccaacttgcactccacattaattaacatgtctaggagtgggagcctgacagacaccactattaaaaaaaaaaaaaatccccaaaatgattccaatagacaacaaagttgaggaaccactggcacatcccaagctaagatacaaggttaaatggcctttttaagtatgtcatactggatctttaaataaagcaaggcttttgttacactttgtcatgttattaaaagcagacctttgggctgtttaaccgtgtaacaaaaatgccacgtgaaaaataaaaatttttattgtatagcaattctctataaatagtagataatctaagtccttattttctgatggctcttgttccactattaacattgtttttaatttttaaaatcctatcagcagcctcctaattagcagtgttaggaatttgccttatgttttccatctcatctcctgaacctgttattctgagaactcataaataaaattcagccaagattaatcaatcaatcaatcaatcagtagacgtcagagataagcaacttttttttccatttatttgaaataatatacaagaatatagtgtgcaaaatttaggggcaacatcatgaagaagtgtgatgaactgaaatcaattttacagctgtgattcctaaccagaaacaccacttggtaagtaacatgaaaagccatgattgtagctcagagcaaaagcagctgtattgccaatgtatttgctctaattttagacagttggaggaaaattaaagtgcaagtgttgcactgcagtaagtgcaaagtctgcccccaccataaagattatgatgacaaaatatatttaagatacatggctgaggagatacagaacacgaagttaaaaaatacaatggtgttgactgtttgttaatagcaccattacagtgactatatcccaatgctattaactaactttaccttggcctgggctaggtctccattggaaataataacggatggctgctgccacctggtgcatcaactcagcatgccatggtaactgcagcaggtggctcttaggctgggacaccaacaccagccacctgccccatgttctggtagcctcttggcactgaccagactaggagcgcctatgtttggcacagatgctgagccatgtggtggttactagaggaaaggccgactcccagcttctgcttcatttcatcatgtgtacaatacagattaataagcagtaaggagccaatgtataaacagcagttacatattttttaaattcccctttcgtacaatttaaaataaaacatgtatacactt

SEQ ID NO: 2930 - DNA, 2017 bp, Homo Sapiens
  NM_006351
aggcattccctacccttttaatgccccgccctatgacggacccaatcggagggctctccctacccgaaaccccgctcctggagcggcttttctcaggcttgcgcggctctaggccgaagcggcggatgacgcaaccgggccgcgccgcgagaaggtcacacgattctccaacatggcggcggcggccctgcggagtggctggtgccgctgtccacggagatgcctcggcagtggaatccaatttctttccagccacaacctaccccatgggtcgacctatcagatgcgccggccgggcggagagctgccactgtccaaatcatattcttctggaaacagaaaaggctttctgtccggcttgctagataatgtcaaacaagaattagccaaaaacaaagaaatgaaagaaagtataaaaaaattccgtgacgaggccagaaggctagaagaatcagacgtgctccaggaggccagaaggaaatacaaaaccatcgagtcagaaaccgtgcggacgagcgaggtgctacggaagaagcttggggagctgacgggcaccgtgaaggagagccttcacgaagtcagtaaaagtgatctcggccggaaaatcaaggagggcgtggaggaagcagccaagacggccaagcagtcggccgagtcggtatccaaaggcggggagaagctgggcaggacagcggccttcagagccctctcccagggggtggagtccgtgaagaaggaaattgacgacagcgtcctgggacagaccgggccctaccggaggccccagcgactccggaagagaacggagtttgcgggagataagttcaaggaggagaaagtgtttgagccaaacgaggaggccctgggggtcgtgctgcacaaggactccaagtggtaccagcagtggaaggacttcaaggagaacaacgtggtgtttaaccggttcttcgagatgaagatgaagtatgacgaaagcgacaacgcgttcatccgggcatcccgggcccttacggacaaggtcaccgacttgctggggggcctgttctccaagacagagatgtcggaggtgctcacggagatcctccgggtggacccggcctttgacaaggaccggtttctgaaacagtgcgagaacgacatcatccccaatgtcctggaggccatgatttctggagagcttgacattctcaaagactggtgctatgaagctacttacagccagctggcccaccccatccagcaggccaaggcactgggtctccagttccattctcgcatcctagacattgacaacgtcgacctggccatgggcaagatgatggagcaggggccggtgctgatcatcaccttccaggcacagctggtgatggtggtcaggaaccccaaaggcgaggtggtggagggtgacccggacaaggtgctgcggatgctgtacgtgtgggcgctctgccgagaccaggacgagctcaacccctacgcggcctggcggctcctggacatctcggcctccagcaccgagcagattctctgagtgtggtgccggagccaggtagccccggcctgggtcatcaggcacagaggcaccgcaacaccacctgcggcaactccagacctctgggaacaagactgcgggctctgcccccagctctgccaggacggctgcaagaccagctggcccgggaggggacaacgggctgttgcgggtgcgcggcagctggagacactcccccgcagggccaacccctgccctgttgctctgccctgcaggggtcccggcgcctggtcacctggggtgcacacaggtcacacagtgccaagaggccccagggcccagggactccccccacagcagggtgggacccgggacccgcggctcagtggcccgctagccacgtcagccaagccactttaggtccattttttaattttaacagtgctcttccatcttgtgcataagcctgagatttggaaagaataaaacaccgaattgcagaagagcaaaaaaaaaaaaaaaaaa

SEQ ID NO: 2931 - DNA, 1980 bp, Homo Sapiens
  NM_006353
atcctcaccttccctcgccttcctgttcctggcggagccgggctccgctcgtcttctctgtcttagggctggtgctggccctgcccacgcctagggctccggcgcgtcacgggcctcagctgggattcccgcgcccctcggacggccacgagactcggacatctttccaggaacagcgtgaggaggacagaagcacccaacaggactgctcaagccacctgcgaacactgctgctaccatgcccaagagaaaggcaaaaggagatgctaaaggtgataaagcaaaggtgaaggatgagccacagaggagatcagctcggttgtctgctaaaccagctcctccaaaaccagagcccaggcctaaaaaggcctctgcaaagaagggagagaagcttcccaaagggagaaaggggaaagcagatgctggaaaggatgggaacaaccctgcaaaaaaccgagatgcctctacactccagtcccagaaagcggaaggcactggggatgccaagtgaaatgtacatttttgagagctctgtacttatagtgactctactgtttgaaatactatttttttaaatcaagttttataaaagtgtagaattttggcttttttaagttatgttgttagcacacaggacacttccttgttgtcttttgtggaaagggcaagtaccactaatagggtgtatctcagaaactgaattgaaataagggaaaataggattttctgtcctggtttttgaagattgttcttgattcccttgattcccaggagagattctctgacattcacgtgtcagccactttggcacggaagccttacagtgtggggaaccaaaacttcgtgtctcccctttccccgatgccatcagcatagacttgacttccttaaaccgagagttttgatgtggccttggcaaccctaaaatcagctgtgttaggtaacaaaactcaggctttctgttgatgacatcgagatggtgtcacttaaaagagccaagattcctgttttcagtttgtggattcatcctgctggttttactttagtccctccatgtcaaagtgggcctgagaaaagctcatacatgcctcatgtgaagtgtccaccctctctgaaaatctttcttgttcaaaacagcaacgacatatcttgttaacttttacggtgacttttggaggaggggagtttggaaattgtaaaatgttatagattgttgcctatttcctgctgaaagtaaatgtttttaaaaagtatcatataaagctgaatacaaattggtttggggggagatcctttcctacccaaagtcataaatatattctttactgccttgtggaaattttatagttttgcctttcacatttgtctttagtctgtcctgaactgatttttgtgaaaattatgagttagaaattcaacttaacatttttcatattcgaagtggttgtctctgcactatttactgaaaagttcatcctttccccagtgatttgtaacactgcctctttcataaattaaatttttgtgtatgtgtgtgggtcttttgatggtttctattctgactgacatcaatttgtctaatcttgtagcagtacagtacagtcctgattattgcaactttaggaaaaggtctgataaaaaccaagatgcctccacattttgtcataattgtaaccaatttcacctctgtctccagtatcaccacaaaattgttcttccttggagtgtcttggctattcttagccaactgttcctccatattacttctagaattagaccaacaatttataaatcaaacaaacccaagagcattgaaattttgattggatttgtattgaatttatagattaatctggtaaaccatgtcatctttacaatgttgtcttccaatacatgaatatggtacagctcttcatttacttaggcctttgaaatatctttcaataaagtttataattttctccataaaaaaaaaaaaaa

SEQ ID NO: 2932 - DNA, 2245 bp, Homo Sapiens
  NM_006354
gtacccccatcctttctctcgcccctcctacccgcagctcctggcgctcggcggggctaactgcagcgcggagatctcggccgccaagctccgcctcccgccccgggctgtgccccggggctcgcctgaggccgaccacccgcaccccacctctagcggctttgctcgaggcccaccttcttcccacccccggcaaactccagtaggctcgccctcgctgactccccgcccccgcgtcaactgcaaggggcccgcccatagccagttccggggcggttgctcacatcgaccggaactccccgccccctcccgcggcccctggggccgtaggaggccgcagcgaggaggtagagggggcgggggtcgcactagggtgtccctagagaacgaggactctgaaggcgggacatttgggcgacccccgggcggggccagccattaaacagtcccacttctgtgccagacactgaactgggctcttgacgggcatcatctcttaatcctcagaacatcccagggagctccacaggatccccatatcctgggccatgagtgagttgaaagactgccccttgcagttccacgacttcaagtctgtggatcacctgaaggtctgtccccgctacacggcagtgctggcacgctctgaggatgatggcatcggcatcgaggagctggacaccctgcagctggagctggagaccctgctgtcttctgccagccggcgcctgcgtgtgcttgaggccgaaacccagatcctcaccgactggcaggataagaaaggtgacagacgattcctgaagctgggtcgagaccatgaacttggagctccccccaaacatgggaagcccaagaagcagaaactggaagggaaggcaggacatgggccgggccctggcccaggacggcccaaatccaaaaaccttcagcccaagatccaggaatatgaattcactgatgaccctatcgacgtgccacggatccccaaaaatgatgcccccaacaggttctgggcttcagtggagccctactgtgctgacatcaccagcgaggaggtccgcacacttgaggagttactgaagcccccagaagatgaggctgagcattacaagatcccacccctggggaagcactactcccagcgctgggcccaggaggacctgctggaggagcagaaggatggggcccgggcagcggctgtggctgacaagaagaaaggcctcatggggccactgaccgaactggacactaaagatgtggatgccctgctgaagaagtctgaggcccagcatgaacagccggaagatggatgcccctttggtgccctgacgcagcgcctcctgcaggccctggtggaggaaaatattatttcccctatggaggattctcctattcctgacatgtctgggaaagaatcaggggctgacggggcaagcacctcccctcgcaatcagaacaagcccttcagtgtgccgcatactaagtccctggagagccgcatcaaggaggagctaattgcccagggccttttggagtctgaggaccgccccgcagaggactccgaggatgaggtccttgctgagcttcgcaaacggcaggctgagctgaaggcacttagtgcccacaaccgcaccaagaagcacgacctgctgaggctggcaaaggaggaggtgagccggcaggagctgaggcagcgggtgcgcatggctgacaacgaggtcatggacgcctttcgcaagatcatggctgcccggcagaagaagcggactcccaccaagaaagaaaaggaccaggcctggaagactctgaaggagcgtgagagcatcctgaagctgctggatgggtagccctcacccctgcctcaggctgattatctggcctaggggaggggaagggaggcccacttccttctttgggcacaggaaacattggcctgtggctgtccctcaaatggcggcagtctctagagggccgtggcccttcccctgaggtcttttggcctagctctgtacaaccaggacacaggaagccctgctgggctagcctgaggcctagtctctgcttggtccccgagatggggttggaggggacttcgtttctgggtcttcctcttcccctctttaccatcccccactccctaatcccctacccctgtctccccttcaaggacttctcccttgtggttttgtaaagtgcaaacttaagaataaagtgactgctgtggtttttcaaaaaaaaaaaaaaa

SEQ ID NO: 2933 - DNA, 628 bp, Homo Sapiens
  NM_006356
tgacccacttccgttacttgctgcggaggaccgtgggcagccagggtcggtgaaggatcccaaaatggctgggcgaaaacttgctctaaaaaccattgactgggtagcttttgcagagatcataccccagaaccaaaaggccattgctagttccctgaaatcctggaatgagaccctcacctccaggttggctgctttacctgagaatccaccagctatcgactgggcttactacaaggccaatgtggccaaggctggcttggtggatgactttgagaagaagtttaatgcgctgaaggttcccgtgccagaggataaatatactgcccaggtggatgccgaagaaaaagaagatgtgaaatcttgtgctgagtgggtgtctctctcaaaggccaggattgtagaatatgagaaagagatggagaagatgaagaacttaattccatttgatcagatgaccattgaggacttgaatgaagctttcccagaaaccaaattagacaagaaaaagtatccctattggcctcaccaaccaattgagaatttataaaattgagtccaggaggaagctctggcccttgtattacacattctggacattaaaaataataattatacagttaaaaaa

SEQ ID NO: 2934 - DNA, 2279 bp, Homo Sapiens
  NM_006358
gtggttctagggcaggcgggcgggtttgagagggcggggattgcgactctcacaccctgagctccggtgctcctttcctaactccactggctgcggcatctgtgggaaaagtgtggctgggtcttcgaggagccgcaccaatggcttccgtgctgtcctacgaaagcctggtccacgccgtggccggagccgtgggaagcgtgacagcaatgacagtgttttttcccctggatacagctagacttcgacttcaggttgatgagaaaagaaaatccaaaactacacacatggtgctcctggagatcattaaagaagaaggactcctggcaccatatcgagggtggtttccagtgatttccagtctctgctgctccaattttgtctatttctacacttttaatagcctcaaagcactctgggtcaaaggtcaacattctaccactggaaaagatctggtagttgggtttgttgcaggagtggttaatgtgttgctaacaactccactctgggtggtaaacaccagactgaagcttcaaggagcaaaatttaggaatgaagacattgtaccaacaaactacaaaggtatcattgatgcttttcatcagatcattcgcgatgaaggaatctcggctttatggaatggcacatttccctcattgctgttggtcttcaatcctgccatccagttcatgttttatgaaggtttaaaacggcagcttttaaagaaacggatgaagctttcttccttggatgtgttcatcattggtgcagtagccaaagcgattgccaccacggtgacctatcccctgcagacggtacagtcaattctgaggtttgggcgtcatagactaaacccagaaaacagaacattgggaagtcttcggaatattctctatcttcttcaccaacgagtaagacgttttggaataatgggactctacaaaggccttgaagccaaactgctgcagacagtcctcactgctgctctcatgttccttgtttatgagaaactgacagctgccaccttcacagttatggggctgaagcgtgcacaccaacactgagacgccttcccatgaaaaattccgaagatgctcaagagggaggtttcctcctgagtgaagagaagtgattctcccttgactctggctcctgccaccacaaatgttaccctcattggcttgaaaagcatccaagggtgcacagggagtatggccaactggacctgttgtcaccttaattgtcatgctggctggttggattttggggtggcagttggactaatgtgaaaaaaacattgctgaaaacctaaaaatgaaagtttgtgagtgtttattggttttcttaagagaaatggactattttgctctcatgtgtaatgttttctatttaaatctttcttaaatataccagctgttctctttccctgaactctcccccaggttctaggacaaatttaataacatgtaattctcctcaaatacttttgtatgtctcagtgttggtgttttcctccctaaaactaacattagggctgtgccacgggcatgactttatttttgttgggcttttttttccctgcttaaggagaggtgtcttttttggatatgagctatttattttgtgaaatgaaaattgttcacccaaatgattctcttataaactatttgtaaatgtcacttattcattagtgtttgacataatttttagaatatttattttgaatcaatcctttcattacgaaagacttgaagttttgtgtccattcttacaagccctggtcagtcaagtcccaataaatggtcagcacaaaaaagatattcttgaaaattgctctttattaaggtattacgttgagtttgcaaccagatgggaaaaatcacaaaaatgagaaggggagcagatatcttgttgaggtctggatattatctccctttataaacttggtgtaggccgtatattttgaaaataaacatctggttgaggttatttcatttggaaaccttccttagagtcctgttgctcagtgtggtccatcagacggtagtactgccacaagctgagagcttgctgggcacgcaacccagagtttctgaatcctgttccgtattttaacattcccaggtgattcacagccacattaaagttcaggagaccataggacccctgacccatgagaagaagtgattggtttcgattatagacatcaagataaagatttttctcaaaggaaagagattaatgtattaaaacaacctctgaaaaaaaaaaaaaaaaaa

SEQ ID NO: 2935 - DNA, 1259 bp, Homo Sapiens
  NM_006360
gtggtcttgcgagtggagtgtccgctgtgcccgggcctgcaccatgagcgtcccggccttcatcgacatcagtgaagaagatcaggctgctgagcttcgtgcttatctgaaatctaaaggagctgagatttcagaagagaactcggaaggtggacttcatgttgatttagctcaaattattgaagcctgtgatgtgtgtctgaaggaggatgataaagatgttgaaagtgtgatgaacagtgtggtatccctactcttgatcctggaaccagacaagcaagaagctttgattgaaagcctatgtgaaaagctggtcaaatttcgcgaaggtgaacgcccgtctctgagactgcagttgttaagcaaccttttccacgggatggataagaatactcctgtaagatacacagtgtattgcagccttattaaagtggcagcatcttgtggggccatccagtacatcccaactgagctggatcaagttagaaaatggatttctgactggaatctcaccactgaaaaaaagcacacccttttaagactactttatgaggcacttgtggattgtaagaagagtgatgctgcttcaaaagtcatggtggaattgctcggaagttacacagaggacaatgcttcccaggctcgagttgatgcccacaggtgtattgtacgagcattgaaagatccaaatgcatttctttttgaccaccttcttactttaaaaccagtcaagtttttggaaggcgagcttattcatgatcttttaaccatttttgtgagtgctaaattggcatcatatgtcaagttttatcagaataataaagacttcattgattcacttggcctgttacatgaacagaatatggcaaaaatgagactacttacttttatgggaatggcagtagaaaataaggaaatttcttttgacacaatgcagcaagaacttcagattggagctgatgatgttgaagcatttgttattgacgccgtaagaactaaaatggtctactgcaaaattgatcagacccagagaaaagtagttgtcagtcatagcacacatcggacatttggaaaacagcagtggcaacaactgtatgacacacttaatgcctggaaacaaaatctgaacaaagtgaaaaacagccttttgagtctttctgatacctgagtttttatgcttataatttttgttctttgaaaaaaaagccctaaatcatagtaaaacattataaactaaaaaaaaaaaaaaaaaaaaaaaa

SEQ ID NO: 2936 - DNA, 2798 bp, Homo Sapiens
  NM_006367
tctccggggcgtggcgaagaggggcggagtcacgagcggggcggtgagacttcctgcccagtcgcgggccagcctagcgcttcagccggcggctcatttccggtgggggcgccgcgcccagtgagggcccggaagtgggtcgcgcggagattgctgggcggttcttgccggaagcggagagcggctgatcgcagtccggaggtgaggcggaactctgaggtggtccattatggctgacatgcaaaatctggtagaaagattggagagggcagtgggccgcctggaggcagtatctcatacctctgacatgcaccgtgggtatgcagacagtccttcaaaagcaggagcagctccatatgtgcaggcatttgactcgctgcttgctggtcctgtggcagagtacttgaagatcagtaaagagattgggggagacgtgcagaaacatgcggagatggtccacacaggtttgaagttggagcgagctctgttggttacagcttctcagtgtcaacagccagcagaaaataagctttccgatttgttggcacccatctcagagcagatcaaagaagtgataacctttcgggagaagaaccgaggcagcaagttgtttaatcacctgtcagctgtcagcgaaagtatccaggccctgggctgggtggctatggctcccaagcctggcccttatgtgaaagaaatgaatgatgccgccatgttttatacaaaccgagtcctcaaagagtacaaagatgtggataagaagcatgtagactgggtcaaagcttatttaagtatatggacagagctgcaggcttacattaaggagttccataccaccggactggcctggagcaaaacggggcctgtggcaaaagaactgagcggactgccatctggaccctctgccggatcaggtcctcctccccctccaccaggcccccctcctcccccagtctctaccagttcaggctcagatgagtctgcttcccgctcagcactgttcgcgcagattaatcagggggagagcattacacatgccctgaaacatgtatctgatgacatgaagactcacaagaaccctgccctgaaggctcagagtggtccagtacgcagtggccccaaaccattctctgcacctaaaccccaaaccagcccatcccccaaacgagccacaaagaaggagccagctgtacttgaactggagggcaagaagtggagagtggaaaatcaggaaaatgtttccaacctggtgattgaggacacagagctgaaacaggtggcttacatatacaagtgtgtcaacacgacattgcaaatcaagggcaaaattaactccattacagtagataactgtaagaaacttggcctggtattcgatgacgtggtgggcattgtggagataatcaacagtaaggatgtcaaagttcaggtaatgggtaaagtgccaaccatatccatcaacaaaacagatggctgccatgcttacctgagcaagaattccctggattgtgaaatagtcagtgccaaatcttccgagatgaatgtcctcattcctacagaaggcggtgactttaatgaattcccagttcctgagcagttcaagaccctatggaacgggcagaagttggtcaccacagtgacagaaattgctggataagcgaagtgccactgggttctttgccctcccttcacaccatgggataaatctgtatcaagacggttcttttctagatttcctctacctttttgctcttaaaactgcttctctgctctgagaagcacagctacctgccttcactgaaatatacctcaggctgaaatttggggtgggatagcaggtcagttgatcttctgcaggaaggtgcagcttttccatatcagctcaaccacgccgccagtccattcttaaggaactgccgactaggactgatgatgcattttagctttgagcttttgggggttattctaccaacaaacagtccattggaaagaaaacagtccctggaattaacagatcagaatgttcacactggttaatctttttttaacaatgagcatgaaggtagcagaagctggtgtgtttccagatggttcttctaaccaaactaatttttcactgttgacaagcgaggcaagggttgcactggaccaaaggctgaggcttggccatctagcattccatacaaaattgtttcctataagcattccttttattctctattctatcctgggtctgcctcaaccgtgagataggagagtctctggtactagctgctgtagcagtgcccttcatccagggcagttaatggagtcttggaccctttctttctctgggatccctgcccagcaccttcctatagagatgactttaaaaggaaaaaaaaaaaaaaaaaaacccacatgatttcaaggagtctggcattcctgaatccttcttccctgccaggtgcctgtcacctgtcttcactgcctccttttccctgtcatgctcatcagcttatggcttctgtctaagcacctgaacagaggactgaaacctccactgcaggctggttttaggtcttgaattatgtaagaatcttgcacagcactgctaatgtaaatttcagttgtttttccctctaggacaaacacttaccaaaatatgcaacttttttttggtgggaagagagattgtcctgtgatttctacccatttcctgaggcctgtggaaataaacctttatgtacttaaagttatacagaaaatagaataaagttaataccaaacttgcaaaaaaaaaaaaaaaaaaaaaaaaa

SEQ ID NO: 2937 - DNA, 6668 bp, Homo Sapiens
  NM_006371
aggctggcgtccccgccccgaaagcactgggcccgccgcgtcgcaccgtcctctttcctttccttctccctccccttttcccttccttcgtcccttccttccttcctttcgccgggcgcgatggagccggggcgccggggggccgcggcgctgctagcgctgctgtgcgtggcctgcgcgctgcgcgccgggcgcgcccaatacgaacgctacagcttccgcagcttcccacgggacgagctgatgccgctcgagtcggcctaccggcacgcgctggacaagtacagcggcgagcactgggccgagagcgtgggctacctggagatcagcctgcggctgcaccgcttgctgcgcgacagcgaggccttctgccaccgcaactgcagcgccgcgccgcagcccgagcccgccgccggcctcgccagctatcccgagctgcgcctcttcgggggcctgctgcgccgcgcgcactgcctcaagcgctgcaagcagggcctgccagccttccgccagtcccagcccagccgcgaggtgctggcggacttccagcgccgcgagccctacaagttcctgcagttcgcttacttcaaggcaaataatctccccaaagccatcgccgctgctcacacctttctactgaagcatcctgatgacgaaatgatgaagaggaacatggcatattataagagcctgcctggtgccgaggactacattaaagacctggaaaccaagtcatatgaaagcctgttcatccgagcagtgcgggcatacaacggtgagaactggagaacatccatcacagacatggagctggcccttcccgacttcttcaaagccttttacgagtgtctcgcagcctgcgagggttccagggagatcaaggacttcaaggatttctacctttccatagcagatcattatgtagaagttctggaatgcaaaatacagtgtgaagagaacctcaccccagttataggaggctatccggttgagaaatttgtggctaccatgtatcattacttgcagtttgcctattataagttgaacgacctgaagaatgcagccccctgtgcagtcagctatctgctctttgatcagaatgacaaggtcatgcagcagaacctggtgtattaccagtaccacagggacacttggggcctctcggatgagcacttccagcccagacctgaagcagttcagttctttaatgtgaccacactccagaaggagctgtatgactttgctaaggaaaatataatggatgatgatgagggagaagttgtggaatatgtggatgacctcttggaactggaggagaccagctagcccacagcaaccaaagagacttcctcttggcgttcaggaaacacagattctttgtccttttcccaacagcccaggctgttgatacctcagagccttctctttactctccaaagtgaaagggaagcccccgtctctctaactgcatgtcatcaggggtgagcctgcctttcctatcttcacacctgccacctcatgttcacacctatctttctcaccttttttttgagatggagtctcgctctcttgcccaggctggagtgcaatggcacgttctcagctcactgcaacctccgcctcttgggttcaagcaattctgctgcatcagcctcccgagtacctgggattacaggcatgtgccaccacgcccggctaattttgtatttttagtagagacggggttttgccatgttggccaggctggtctcgaactcttgacttcagatgatccatctgccttggcctcccacagtgctgggattacaggcgtgagccaccatgcccggcctctttctcacctttacacctgtcttcttatcctcacatctgttttcacaccttcatccctgtcttcctcatgttcacacttgtcttccccatgttcatagctgcctttcttaccattttggtttgaagggcagtcttctctggcttgtttttttgtttttcccagaaaatcagtattattttttaaataagaaaaacattcctagaagatgataattgtgaaaacctcctttggcttatttgcttttccagattttagtctcctttctccccatccgggaaagatggtggaagacataggctaaatttctccagcctcacaatggtcttcacttggtctgacttgtaccaattctagcacccactgaaaaacaagttgagtagagagtgtagagtgcagaaatgtggcttttgccccactttgcatctccaaaattacaacggttggccgatcccatttgaggacaatgcttagttataagtctccgagttggaaaaggaagaaagccagagctgtctagtttcattcattctttcagtaaatatttattgagtacctactgtgtgctaggcattgacctgggaactagagatacttcacagaataacagggaaagttccctgtgctcatggagcttacattctacagggagaaagagatagccaatacataggaataaatatatacaaggtatcatgtagtgataattgctgtggagaaaaataaagcaggggagggagtaagaaatcctggagatgaggctgcagttttaaatggggcctcactgggaatgtgacgttgagcagagacgttagggaagtggatcctggacaaggcattccaggcagaggaacaggatgtgcactgccccaaagtgagaacttgctctacgtggtcaggaaagagcagggagaccaagcagagtcgtgggcaggggtagaatggaaggagaggcggctggggaggacaggtggtggagggccttggcttctgctaagtgagatgggaaccactggagggtttgaacagaggagtgccttgattgatttatattttgcaagggtcattctagctgccatattgtgaaaaactttagtggacaagggcagaaggaagagggaagacctgttaggaagctactgcaaggttccaggcttgggcctgggccacagcaacagcagtggtcaaatatctagatttattttgaaaagagccaataggatttgctgagagtttgaatgtggagtgtaagagaaggaagagttaatgatgacattaaggtttttggcctgaatagcaggaaagatggagttaccagttactgaaatagggaaggatgggctgggtaagtatggaatttggtgcaaagcaggctgtctgtggttggaatgggaggttctggctgcaaatcaaagtggagagttctctcaggtcaggtctgcagcagagctcgagacagggatctgaatgcacttggtttattgttgggggtgctctcagaaggaacctgtgaaagcctttatcagtcatttattggctgtgagaagttctctgggagtgtgggtacatttgaaggcaagtgacttcagttgagggcaagtctctggaaaagaggctgtaggcatctggcagctaccatgcatggtagtgtgttgggggtgggggtcctgggcactggctgtgtgaagggatctggcagggcaccacagcgccccctactgaaccatcagcatgtcagtggcatttaaagccatgcagctggaggggccactgagattgtctctgagtattactgagaagcaacagaaaagagccatggatggagcccttgggctctctgggaaatgggaaatcagccaaaggactgagaaggagttaccttaaggtcagagaaaaccaagagagtgtggtgttctggaagctgagctttctttattcaacctcattcccttctccaaataagccacttgtgtagttgggcccctccagggttgaaggcaagaggagaaaggcacagcgtttgggaaacaagacttttcctgcaatagcctgggaaggaataaaaggatagagtgtttgggtttttgtgtaatggtggttaattggggtggaacactcacacgttgtgctttttctgggcttcccttatcccccagaacactctaccaacctcggggaactcgggcacatccttctgtttctccttcagctctatcctgctttcctcatcccttctgacaccacgtcctcactcacctgcacaagaatccctgcatcaggttctcctttgagggtacccacccaggacagtcccctaccacttctgtcttgggctgaagttgcccacgtccacaaaatctgtactcccagcgggggtgtttggcccgaggagtcagtgttattactggtggatgcaccgtgtccacagcagcccccaatcccagcgatgcgtcagatcttacgtggcttcctgctgggggagatggccttcacccacgggatgccgggttctcctttctttcctcaccccaacctttactccaccagagaaacttccttttgaactcagtggggaagagggtgatgagacaggactagaaagtagtgggggacccagcgagtggacgccctgctccgggattcctgagtctgtaaatagtgtgcccagcagctgtgaactccccttatagcctcaggctgcagtgtccttcccagctgtgtgagaaaatgaaagccgacgtccacagggacccaggcagggttgggtgttgtgactcactccacctctgtgccctgcagaggtactgttgggtccttgtcttgtgagcctggggtgagctctctgtacatgttgttgttccacgtatgggttgacttggcatgctggggggtcctcgttcactctctgaagttggcctcctttcactggggattgaaaagcacctccacccctaccctagtgatgtcccctgaggacccgggtgatagtacagtcaatattgtcagtactttgctttgattgaaggctgtagagctgagttaccaaaatttctatttcaaaggaaaccaaaccttaaaaaaaaaaaacaaaaactgggctgggtcttccaaacctaccatgaaaccctggtgtgcaggctgcactcaatgacctcaacccaacacctccctgagtgtgcttcttggaagagcctagaagattcctggatggagaccccattggttcagcctcaagtctggcccgtcttcgaaaaaacaaacacatttgtaagctttgtgggagcttccaggcctgctctaagatgccttgcttgtcctttgacccatcagcatggagctcagtggttgctgtttggttctgcaggctggtggggaggccgcccatcgtggtggggcatctgtccagccccattgccactcagggcatccaaacaggaggcacccgctgggaagggtctaaagatactccttgtggccactgctactgttcacacttgacttgtggagaagcgaagggctgaggggaggtttgtgtacacccatgtatttaaaagtgactgactgactgaaatgagcacataccgacatatgcaacatactaataccttcctgattttcgagactttctaattactacaactaacctgttgtgctcacctctggaattcagaaagagagccactgcgagcactgaccacaagggctgccttaggaaggaaatgtgtgctttcaggagttcttattaggggaattttaagagcacaaaaattttattgaacccaccttagtgacaaacagaaaatgatttgttagattgtcagttggaaggggtttattatgactgctggtgaaataaacagtgaccagtttctgccaacatttatggaaataacgtttctaggttttaaatgtgagccgtaaactgaagctacttcagttaaaaaaaaaaaaatcaatacttaaactgtagggaaaaggtggattggtgccagagaaaacattatttaatagtgtcagaacatggaactgcaacacagtttgtagcaaggcactgagaaaaacccacaactaatccttcatcgcagctgtctgaactcttgatcatctgccatcccccaaacagtgacttctttttttctggtgactccaggcctgaatgacctagtgtggagagtttaaactatgtacaagggaggaaagaaaaaaaggaaaggaaccttaagtaagcctcagccaaaggttttatgcattggacttcctgtgcctgcccccaggggcaagactgatccccatgcctgtgcccatgacatctccctgaaagaggacaccatgacagcccggctttgccttgactgacccactgctaccccagaaataagaatcaagagcagctattgttatccttagagtgttttccgtctagggccggctcgtgaacagccacatatccttgcacctgacactgtccccacacaaatagctggctttcgttgcttgttgaatgaatgagtgagttggctctatatccccttggagctggccggtaagatattagtgcctcattttacaagaagagaataggaaggaattaagcaatttggccaacagatacaagatagattccagagttttatctcccactttagggtggcagccagtaggccaaactccaaagaccgttgctgatgtctttttctgcctcccctctttgggttagtgtggtatgtacaagctcactcttgttgaaaattagaaaatagttgaaaacaaaaggtttttgtttttctttttaaatcacattaaatgttttacattgcttaaaaaaaaaaaaaaaaaa

SEQ ID NO: 2938 - DNA, 3194 bp, Homo Sapiens
  NM_006372
agcgcgggagagagaaagagaggagccgactcggcagggactgggggaccgggccgagagtgcgagcgagcgagggagggagtgagggagcgtgcgagccagaaggggaaaggcggccactcgtgcctgagcgaccgcagaggggagtgggagcagtggggtaaaggagcggggggcgggaataagaaaggccgagagaaggcggacagaggctagtggtggtggtggtggtagggggagaaggaggagctggaggagggcaggggctgagggagtgagtgaagcggacgcgcgagggaggggagggaagggaagggaagggaagggggggtcacgcgggggcgcgcgcgcgcaccgggagcgcgctcggaggcgagtggaactggatcgggtttgctgccagcggcgtgagcttcggccgccattttacaacagctccactcgcgccggacacagggagcagcgagcacgcgtttcccgcaacccgataccatcggacaggatttctccgcctcagcccaacggggagatctctggaaacatggctacagaacatgttaatggaaatggtactgaagagcccatggatactacttctgcagttatccattcagaaaattttcagacattgcttgatgctggtttaccacagaaagttgctgaaaaactagatgaaatttacgttgcagggctagttgcacatagtgatttagatgaaagagctattgaagctttaaaagaattcaatgaagacggtgcattggcagttcttcaacagtttaaagacagtgatctctctcatgttcagaacaaaagtgcctttttatgtggagtcatgaagacttacaggcagagagaaaaacaagggaccaaagtagcagattctagtaaaggaccagatgaggcaaaaattaaggcactcttggaaagaacaggctacacacttgatgtgaccactggacagaggaagtatggaggaccacctccagattccgtttattcaggtcagcagccttctgttggcactgagatatttgtgggaaagatcccaagagatctatttgaggatgaacttgttccattatttgagaaagctggacctatatgggatcttcgtctaatgatggatccactcactggtctcaatagaggttatgcgtttgtcactttttgtacaaaagaagcagctcaggaggctgttaaactgtataataatcatgaaattcgttctggaaaacatattggtgtctgcatctcagttgccaacaataggctttttgtgggctctattcctaagagtaaaaccaaggaacagattcttgaagaatttagcaaagtaacagagggtcttacagacgtcattttataccaccaaccggatgacaagaaaaaaaacagaggcttttgctttcttgaatatgaagatcacaaaacagctgcccaggcaaggcgtaggttaatgagtggtaaagtcaaggtctgggggaatgttggaactgttgaatgggctgatcctatagaagatcctgatcctgaggttatggcaaaggtaaaagtgctgtttgtacgcaaccttgccaatactgtaacagaagagattttagaaaaggcatttagtcagtttgggaaactggaacgagtgaagaagttaaaagattatgcgttcattcattttgatgagcgagatggtgctgtcaaggctatggaagaaatgaatggcaaagacttggagggagaaaatattgaaattgtttttgccaagccaccagatcagaaaaggaaagaaagaaaagctcagaggcaagcagcaaaaaatcaaatgtatgacgattactactattatggtccacctcatatgccccctccaacaagaggtcgagggcgtggaggtagaggtggttatggatatcctccagattattatggatatgaagattattatgattattatggttatgattaccataactatcgtggtggatatgaagatccatactatggttatgaagattttcaagttggagctagaggaaggggtggtagaggagcaaggggtgctgctccatccagaggtcgtggggctgctcctccccgcggtagagccggttattcacagagaggaggtcctggatcagcaagaggcgttcgaggtgcgagaggaggtgcccaacaacaaagaggccgcggggtacgtggtgcgaggggtggccgcggtggaaatgtaggaggaaagcgcaaagctgatgggtacaaccagccagattccaagcggcgccagaccaataatcagaactggggctcccaacccattgctcagcaaccgctccaaggtggtgatcattctggtaactatggttacaaatctgaaaaccaggagttttatcaggatacttttgggcaacagtggaagtagaaacagtagggcctctgtaaaattggagactgataggttgatcagaaactcaccctaaatctgaacgggtgccgctataatttgtgacatctggcaagatttccctttatgtatatattttaacaatccgcttggacacgaacaaagccacacttctaactgcttctggcgaactgattttatttttaatttttttcaataaagatattcttagatactgaaagaaatagttaatgagtttgcatttgtgcttgagaaaatttggctcaagtccatttggctgtagtgtcaacgatgtttccagtagtgtttagatttggtgtcttcaaaggtagttgattaaaaccaagtgtgtctttaatatcttgtatcagaataactttgtatgttaccaacttaaattgctagaataaggtaaattgatacacaactgctatttttaatttagaactttgacctaatttgggttttcaaaaccattttggctacttgtattctttatgctgttgtttatttcaataaaaaattcacacctaaatgtatacttactaaaattgtgtttacaattcgtttttcacaaaatttcctgcaaatttggttcaaattgtatagcatgtcaaggccaattaaagggttttgtgccttgttaattcttgtgtggaatatgtctgcacattacacaacactgatttattgcagttttctgcttctggtttaaagtgctattttacaacagacttcatgttcccatcaaaaataaaaagataatacatgtagtaag

SEQ ID NO: 2939 - DNA, 2758 bp, Homo Sapiens
  NM_006373
ctcgcccggcgccccgcccctcccgctggatcccgcagccgcggctcttcccgacgcgttccgccttccccagctgtgcactctccatccagctgtgcgctctcgtcgggagtcccagccatgtccgacgagagagaggtagccgaggcagcgaccggggaagacgcctcttcgccgcctccgaaaaccgaggcagcgagcgacccccagcatcccgcggcctccgaaggggccgccgccgccgccgcctcgccgccactgctgcgctgcctagtgctcaccggctttggaggctacgacaaggtgaagctgcagagccggccggcagcgcccccggcccctgggcccggccagctgacgctgcgtctgcgggcctgcgggctcaacttcgcagacctcatggctaggcaggggctgtacgaccgtctcccgcctctgcctgtcactccgggcatggagggcgcgggtgttgtgatcgcagtgggcgagggagtcagcgaccgcaaggcaggagaccgggtgatggtgttgaaccggtcagggatgtggcaggaagaggtgactgtgccctcggtccagaccttcctgattcctgaggccatgacctttgaggaagctgctgccttgctcgtcaattacattacagcctacatggtcctctttgacttcggcaacctacagcctggccacagcgtcttggtacacatggctgcagggggtgtgggtatggctgccgtgcagctgtgccgtacagtggagaatgtgacagtgttcggaacggcctcggccagcaagcacgaggcactgaaggagaatggggtcacacatcccatcgactatcacacgactgactacgtggatgagatcaagaagatttcccctaaaggagtggacattgtcatggaccctctgggtgggtcagatactgccaagggctacaacctcctgaaacccatgggcaaagtcgtcacctatggaatggccaacctgctgacgggccccaaacggaacctgatggccctggcccggacatggtggaatcagttcagcgtgacagctctgcagctgctgcaggccaaccgggctgtgtgtggcttccacctgggctacctggatggtgaggtggagctggtcagtggtgtggtggcccgcctcctggctctgtacaaccagggccacatcaagccccacattgactcagtctggcccttcgagaaggtggctgatgccatgaaacagatgcaggagaagaagaatgtgggcaaggtcctcctggttccagggccagagaaggagaactagggcaagtggctgtgagaccctagagaccagcgaagggagaagttgggaagctacgttctgttggccaccagacttgcatttcagcctctgtcataatgctctgccctccctcccccgaaggtctctgtggtgatgaccgctctcccctgcccctccccgcttcctgacctctgaagaggttgggaagtgaccatttggatgtctgggccctgccaaggcgacagggagggtcagagggaggccggctgcttcctgcccccaccctttccccgggcctgctgtgctgcttttgtgccaaggttagccagtcccccctgttgtgttccatgtgctttcacctctgcctcatctttcctcccgtccctgccccgccacctccccaaagaattgaaacgtcagctcaggatatggggccaatctctgtgagtccagcatgtacctgtctctccctagtgtcccttcagcctgggctgaccagtgcccgcctctgggcttgaccagttcccaatctcgtcctctgtccccaacttcttaagcacaattgggcttcttccatctccaggttttctgccattcttaaccaaggctgcctcttccaacagggcgggaatcagacctactcccctaggtcacaactctgggaaggatacagagcccccacccttcactgagttctctggatttgttctcagtgccttagcaacgaaaacctgtgcttgtgtgtgtgtggcggcggggagggaggatcctgtttcccacctccttctcctcccctgtactccccagtgccttccttgttctggtggagctggggtttctctcctccccagtcccacaacactgccaaaaatctgtgtatgtgccattgggtggggcagccccaagcctcctggggaggcagggcaaaaacaggtgccctcatcgtggtctgtgccatgtcccgtctctatggtggttgaggagaaaggcggggaagcttcctcagccttgcagatatgtgtggcatttactagccagagctctgaaaggcagtgctgtctgtttcttgtactgggaccaaagtaaaaatccaagcacattccccttgcagttaggggaggccctactgccttctcaaagcagagaggcagcttatcaaactcagcccaaaactctgtttacatgggtggggagatggagcagggaagtacagagtgggatggtcaggacctgggccattgcaaccaaaatggggacttcctgggtagggaggtcactccctctactcactgagctaggattagggagggttattgccccaaccattgcaatgggaggtggagggacaggctcagcctcctcattgtctaaatgaggcctaaatgtgtgaagtgcgatttctgcttttgtgtaccccaccaccccattaccacagctgcctttgtgtgtttgtgtcaataaaaagccaaaccctggg

SEQ ID NO: 2940 - DNA, 2198 bp, Homo Sapiens
  NM_006374
gcgacgccgagcaccgccctcgccgtcgcctccgggctttctccggtcgctgccgccaccaccgttgcttcgcgggctgggaggcccggggtccccgggcgaacagaggctgcggtggactgacgccgcaggggcgagctagccggctccgcgcctctccgcgggatccagacgcctcctggggctgctggcggagggtctgaggcggcgcggccatggctcacctccggggatttgccaaccagcactctcgagtggaccctgaggagctcttcaccaagctcgaccgcattggcaagggctcgtttggggaggtctacaagggcatcgataaccacacaaaggaggtggtggccatcaagatcatcgacctggaggaggccgaggatgagatcgaggacatccagcaggagatcactgtcctcagtcagtgcgacagcccctacatcacccgctactttggctcctacctaaagagcaccaagctatggatcatcatggagtacctgggcggcggctcagcactggacttgcttaaaccaggtcccctggaggagacatacattgccacgatcctgcgggagattctgaagggcctggattatctgcactccgaacgcaagatccaccgagacatcaaagctgccaacgtgctactctcggagcagggtgacgtgaagctggcggactttggggtagcagggcagctcacagacacgcagattaagaggaacacattcgtgggcacccccttctggatggcacctgaggtcatcaagcagtcggcctacgacttcaaggctgacatctggtccctggggatcacagccatcgagctggccaagggggagcctccaaactctgacctccaccccatgcgcgtcctgttcctgattcccaagaacagcccacccacactggagggccagcacagcaagcccttcaaggagttcgtggaggcctgcctcaacaaagacccccgattccggcccacggccaaggagctcctgaagcacaagttcatcacacgctacaccaagaagacctccttcctcacggagctcatcgaccgctataagcgctggaagtcagaggggcatggcgaggagtccagctctgaggactctgacattgatggcgaggcggaggacggggagcagggccccatctggacgttcccccctaccatccggccgagtccacacagcaagcttcacaaggggacggccctgcacagttcacagaagcctgcggagcccgtcaagaggcagccgaggtcccagtgcctgtccacgctggtccggcccgtcttcggagagctcaaagagaagcacaagcagagcggcgggagcgtgggtgcgctggaggagctggagaacgccttcagcctggccgaggagtcctgccccggcatctcagacaagctgatggtgcacctggtggagcgagtgcagaggttttcacacaacagaaaccacctgacatccacccgctgaagcgcactgctgttcagataggggacggaaggtcgtttgtttttgttctgagctccataagaactgtgctgacttggaaggtgccctgtgctatgtcgtgcctgcagggacacgtcggatcccgtgggcctcacatgccaggtcaccaggtcaccgtctccttccacccctgcagtgtgctgttgtgcacgtcagggacgctgttctctatgcccactgccctcctccctctcctggcccagcagtattgctcacgggggctccagccgccggcgtggccctcatgagctacgcctgggtcttctgcagactcatgcagccctatggccgctcagaccaaggcgcagagcaactatcagggcagctctgcctcctcctcccatgaggtggggagaggcaacagggcagcccccagaggagtgtcctggccgctgtcctcccggggcccatgatggccatagatttgccttgtggtgttggatcaggtactgtgtctgctcataagtacttgtgtcatccagaatgttttgttttttaagaaaattgaattacttgtttcctgaaatattctgaggttaatatgttagttttcatagaacattgagaggcccctgccactttcaataaagacctgacttggagacaaaaaaaaaaaaaaaaaaaaaaaaaaaaaaaaaaaaaaaaaaaaaaaaaaaaaaaaaa

SEQ ID NO: 2941 - DNA, 4095 bp, Homo Sapiens
  NM_006375
gtgtgtgagagtccagccttgggccagagtgccgggtctaggcctggaagcgcgaggcgggcatttcggaagagagtggcgcggcgtggggcgccgcgagggcactacgagcccaggaactgccgcgccggcccgattttccgcggctgtataaggactagcgcttcggtagccggggagctggagggaacctgatttgagatcaattcttggagaacacaaagaagtgtgatggattgaaccagctgccctttgaccctgctaacaacaacgagcccctgcagtttggtagtgccagtggccctctggtcacagaaggcctcattgagaatggaggggaatcaagcaagaaaagaaagagaacaaatactccttcagccgataacagtagaactctgaacgtggattccactgcaatgacactacctatgtctgatccaactgcatgggccacagcaatgaataatcttggaatggcaccgctgggaattgccggacaaccaattttacctgactttgatcctgctcttggaatgatgactggaattccaccaataactccaatgatgcctggtttgggaatagtacctccaccaattcctccagatatgccagtagtaaaagagatcatacactgtaaaagctgcacgctcttccctccaaatccaaatctcccacctcctgcaacccgagaaagaccaccaggatgcaaaacagtatttgtgggtggtctgcctgaaaatgggacagagcaaatcattgtggaagttttcgagcagtgtggagagatcattgccattcgcaagagcaagaagaacttctgccacattcgctttgctgaggagtacatggtggacaaagccctgtatctgtctggttaccgcattcgcctgggctctagtactgacaagaaggacacaggcagactccacgttgatttcgcacaggctcgagatgacctgtatgagtgggagtgtaaacagcgtatgctagccagagaggagcgccatcgtagaagaatggaagaagaaagattgcgtccaccatctccacccccagtggtccactattcagatcatgaatgcagcattgttgctgaaaaattaaaagatgattccaaattctcagaagctgtacagaccttgcttacctggatagagcgaggagaggtcaaccgtcgtagcgccaataacttctactccatgatccagtcggccaacagccatgtccgccgcctggtgaacgagaaagctgcccatgagaaagatatggaagaagcaaaggagaagttcaagcaggccctttctggaattctcattcaatttgagcagatagtggctgtgtaccattccgcctccaagcagaaggcatgggaccacttcacaaaagcccagcggaagaacatcagcgtgtggtgcaaacaagctgaggaaattcgcaacattcataatgatgaattaatgggaatcaggcgagaagaagaaatggaaatgtctgatgatgaaatagaagaaatgacagaaacaaaagaaactgaggaatcagccttagtatcacaggcagaagctctgaaggaagaaaatgacagcctccgttggcagctcgatgcctaccggaatgaagtagaactgctcaagcaagaacaaggcaaagtccacagagaagatgaccctaacaaagaacagcagctgaaactcctgcaacaagccctgcaaggaatgcaacagcatctactcaaagtccaagaggaatacaaaaagaaagaagctgaacttgaaaaactcaaagatgacaagttacaggtggaaaaaatgttggaaaatcttaaagaaaaggaaagctgtgcttctaggctgtgtgcctcaaaccaggatagcgaataccctcttgagaagaccatgaacagcagtcctatcaaatctgaacgtgaagcactgctagtggggattatctccacattccttcatgttcacccatttggagcaagcattgaatacatctgttcctacttgcaccgtcttgataataagatctgcaccagcgatgtggagtgtctcatgggtagactccagcataccttcaagcaggaaatgactggagttggagccagcctggaaaagagatggaaattctgtggcttcgagggcttgaagctgacctaaatctctttgcctaacaacttgggatcctgaagataaatatgtgttggacaagcatagaaagtgatttatatttttaatggttttcaagtggaagttcctttgaatttgtcagttcattcctggaaaatcttttgagttaaaataaggatcctaggacagcacctcgaactacaggccctaaagagaaattgcctcaaaccacaagtgctgtaacttcctcccctttctgtcaattggttgtctttaaatattgcaaaagtcctgatgctaaacagtatttggagtgttttcagtgtctgtactactgttgtagaccttggtatttttttaaacactgttaactgaaatgttttgatgatttgtatgtgatttgtgtttctaaacttctctttacattaatgttgttactggtgaaaggcatgagagcagcactaagtcctctgtgtaactgccattgtctttccaatccccagtagaccagtaaataaataacacatcagtgtcttctagaaggtgcctgaccaggttcaccttttaaacgacaaagcatggtttgtggctttttgcaaaattactatgaaccaaaagttgacaaatgttccaaagttattttctctaacatatcacattaaagatctgtttcagaattgtaaaaagtacatctagatgtgtttacagaaagcaagtatccagtatgactggcatgtgttcatgctattcagaatcacttgtaaatagtctgcttttaaaggagggcatgttcagttttctgtgaattaaaatatgctcatgtgtgggcacacacgcacaaacacacacacgcacgcacacagtggcagaagggatttatattaatattctttcccctctggccttcttacagtctgttggtccctttgcttctgttgtcagtgtgttgaattgcaaaccgagtactgctgtaaatactatgtttacttcatgctgaatgtttgcaaagacttgatataagtattaatagtaatgaatcaatgaataaataatgagctagggtttgtgaggctttctacaaataggtcagctccacctggagtgcgaattgccagagacaccttggtagtgcccatcggcaaatcgcaatggcagcatgtgagtggaccattcagaaacttctgcttggtggaaagtaaacagagaggatggaggtttggggcgaatgtcctgaggcagagatggtctttattgtgtgtggtggtggttgtggtatttataataatgcaagcataccctcccttgagtctcaattgaagataaaagaatgtactgagcaagcaaagccaatggagagtatttcacaaaaatactttgtaaatgagatgccagtagtgttcaaagttgtatttttaaaagataaatattcctttttatacctcagttttgtgtcctgtttttaatgacttacgctctaagtaatccattagtagttatctcagttccttcctttgggttactagaatgttggaaaaagatgccaagtctgtcttgacaactggaaacagggttccacagcagcccattcgtgctgaaaactggcttccccctgaagcaccctgctgtggcaccagcaggaagctcaggttaattttacactagcttgctcactgatgcatctctcatcaatgctacggaaggctttgattcatcagtctcgggctcttggaatacctaattttaataatatctatgaaatcaagggaaactttccatttacagttatttcttgtttaaataaactaaattaatttttaggggagagcagtaggaaaaagagctaatgcatgcggggtttaatacctaggtgatgggttgaggtgcagcaaaaccaccatggcacacgttcacctatgtaacaaacctgcacatcctgcacatgtaccccggaacttacttaaaa

SEQ ID NO: 2942 - DNA, 4642 bp, Homo Sapiens
  NM_006378
gctgtaacactcaccgtgaaggtctgcagcttcactcccgagccagcgagaccacgaacccaccagaaggaagaaactctgaacacatctgaacatcagaagggacagactccagacgcgccaccactctgctaacaccagatagtggaaagaaaccatgtgctgaaatgtttgacgacactgatggtttgactctgctaactggaatggcttattgtgcaagaaagtacacctggtcgggtcctggggctcatctctagcaccagcaaagatttctgaagacgtctttctagaaatgactggaaagtttcaagaggcataagatacagcatttcttctgaggccctgaagaagtatcaagtgggctttgacattgcggtggtgagagcgacccctcctcacctggagaactgggaaatgtggattctcagggaccgcgctgttcacgagctccaggctgtgctgctggccctggtcctggggcgctgagccgcatctgcaatagcacacttgcccggccacctgctgccgtgagcctttgctgctgaagcccctggggtcgcctctacctgatgaggatgtgcacccccattagggggctgctcatggcccttgcagtgatgtttgggacagcgatggcatttgcacccataccccggatcacctgggagcacagagaggtgcacctggtgcagtttcatgagccagacatctacaactactcagccttgctgctgagcgaggacaaggacaccttgtacataggtgcccgggaggcggtcttcgctgtgaacgcactcaacatctccgagaagcagcatgaggtgtattggaaggtctcagaagacaaaaaagcaaaatgtgcagaaaaggggaaatcaaaacagacagagtgcctcaactacatccgggtgctgcagccactcagcgccacttccctttacgtgtgtgggaccaacgcattccagccggcctgtgaccacctgaacttaacatcctttaagtttctggggaaaaatgaagatggcaaaggaagatgtccctttgacccagcacacagctacacatccgtcatggttgatggagaactttattcggggacgtcgtataattttttgggaagtgaacccatcatctcccgaaattcttcccacagtcctctgaggacagaatatgcaatcccttggctgaacgagcctagtttcgtgtttgctgacgtgatccgaaaaagcccagacagccccgacggcgaggatgacagggtctacttcttcttcacggaggtgtctgtggagtatgagtttgtgttcagggtgctgatcccacggatagcaagagtgtgcaagggggaccagggcggcctgaggaccttgcagaagaaatggacctccttcctgaaagcccgactcatctgctcccggccagacagcggcttggtcttcaatgtgctgcgggatgtcttcgtgctcaggtccccgggcctgaaggtgcctgtgttctatgcactcttcaccccacagctgaacaacgtggggctgtcggcagtgtgcgcctacaacctgtccacagccgaggaggtcttctcccacgggaagtacatgcagagcaccacagtggagcagtcccacaccaagtgggtgcgctataatggcccggtacccaagccgcggcctggagcgtgcatcgacagcgaggcacgggccgccaactacaccagctccttgaatttgccagacaagacgctgcagttcgttaaagaccaccctttgatggatgactcggtaaccccaatagacaacaggcccaggttaatcaagaaagatgtgaactacacccagatcgtggtggaccggacccaggccctggatgggactgtctatgatgtcatgtttgtcagcacagaccggggagctctgcacaaagccatcagcctcgagcacgctgttcacatcatcgaggagacccagctcttccaggactttgagccagtccagaccctgctgctgtcttcaaagaagggcaacaggtttgtctatgctggctctaactcgggcgtggtccaggccccgctggccttctgtgggaagcacggcacctgcgaggactgtgtgctggcgcgggacccctactgcgcctggagcccgcccacagcgacctgcgtggctctgcaccagaccgagagccccagcaggggtttgattcaggagatgagcggcgatgcttctgtgtgcccggataaaagtaaaggaagttaccggcagcattttttcaagcacggtggcacagcggaactgaaatgctcccaaaaatccaacctggcccgggtcttttggaagttccagaatggcgtgttgaaggccgagagccccaagtacggtcttatgggcagaaaaaacttgctcatcttcaacttgtcagaaggagacagtggggtgtaccagtgcctgtcagaggagagggttaagaacaaaacggtcttccaagtggtcgccaagcacgtcctggaagtgaaggtggttccaaagcccgtagtggcccccaccttgtcagttgttcagacagaaggtagtaggattgccaccaaagtgttggtggcatccacccaagggtcttctcccccaaccccagccgtgcaggccacctcctccggggccatcacccttcctcccaagcctgcgcccaccggcacatcctgcgaaccaaagatcgtcatcaacacggtcccccagctccactcggagaaaaccatgtatcttaagtccagcgacaaccgcctcctcatgtccctcttcctcttcttctttgttctcttcctctgcctctttttctacaactgctataagggatacctgcccagacagtgcttgaaattccgctcggccctactaattgggaagaagaagcccaagtcagatttctgtgaccgtgagcagagcctgaaggagacgttagtagagccagggagcttctcccagcagaatggggagcaccccaagccagccctggacaccggctatgagaccgagcaagacaccatcaccagcaaagtccccacggatagggaggactcacagaggatcgacgacctttctgccagggacaagccctttgacgtcaagtgtgagctgaagttcgctgactcagacgcagatggagactgaggccggctgtgcatccccgctggtgcctcggctgcgacgtgtccaggcgtggagagttttgtgtttctcctgttcagtatccgagtctcgtgcagtgctgcgtaggttagcccgcatcgtgcagacaacctcagtcctcttgtctattttctcttgggttgagcctgtgacttggtttctctttgtccttttggaaaaatgacaagcattgcatcccagtcttgtgttccgaagtcagtcggagtacttgaagaaggcccacgggcggcacggagttcctgagccctttctgtagtgggggaaaggtggctggacctctgttggctgagaagagcatcccttcagcttcccctccccgtagcagccactaaaagattatttaattccagattggaaatgacattttagtttatcagattggtaacttatcgcctgttgtccagattggcacgaaccttttcttccacttaattatttttttaggattttgctttgattgtgtttatgtcatgggtcatttttttttagttacagaagcagttgtgttaatatttagaagaagatgtatatcttccagattttgttatatatttggcataaaatacggcttacgttgcttaagattctcagggataaacttccttttgctaaatgcattctttctgcttttagaaatgtagacataaacactccccggagcccactcaccttttttctttttctttttttttttttaactttattccttgagggaagcattgtttttggagagattttctttctgtacttcgttttacttttctttttttttaacttttactctctcgaagaagaggaccttcccacatccacgaggtgggttttgagcaagggaaggtagcctggatgagctgagtggagccaggctggcccagagctgagatgggagtgcggtacaatctggagcccacagctgtcggtcagaacctcctgtgagacagatggaaccttcacaagggcgcctttggttctctgaacatctcctttctcttcttgcttcaattgcttacccactgcctgcccagactttctatccagcctcactgagctgcccactactggaagggaactgggcctcggtggccggggccgcgagctgtgaccacagcaccctcaagcatacggcgctgttcctgccactgtcctgaagatgtgaatgggtggtacgatttcaacactggttaatttcacactccatctccccgctttgtaaatacccatcgggaagagactttttttccatggtgaagagcaataaactctggatgtttgtgcgcgtgtgtggacagtcttatcttccagcatgataggatttgaccattttggtgtaaacatttgtgttttataagatttaccttgtttttatttttctactttgaattgtatacatttggaaagtacccaaataaatgagaagcttctatccttaaaaaaaaaaaaaa

SEQ ID NO: 2943 - DNA, 6468 bp, Homo Sapiens
  NM_006380
gagatcagcgctgggacggaacccgggttcctctcgaaccgggattgtgacgcttttggcctggctggccgctgttttctgtcccactttttactcgggcctgcgtccgctgccgccgtccctcagtttgcccccggaggaggcagggcggccgtgccttctgccgtgcgcccgcgtggctgccaccgcccctccgaatcctccggggccgcagaggggttcgctacggagggaggtgggggccttcgggaggaggaggcggaggaggcggaggaggagggaaggaagatggcggccgtggaactagagtggatcccagagactctctataacaccgccatctccgctgtcgtggacaactacatccgctcccgccgagacatccgctccttgcccgagaacatccagtttgatgtttactacaagctttaccaacagggacgcttatgtcaactgggcagtgaattttgtgaattggaagtttttgctaaagtactgagagctttggataaaagacatttgcttcatcattgttttcaggctttgatggatcatggtgttaaagttgcttcagtcttggcctactcattcagtaggcggtgctcttatatagcagaatcagatgctgcagtaaaggaaaaagccattcaggttggctttgttttaggtggctttctttcagatgcaggctggtacagtgatgctgagaaagtttttctgtcctgccttcagttgtgtactctacacgatgagatgcttcattggtttcgtgcagtagaatgttgtgtgaggttgcttcatgtgcgaaatggaaactgcaaatatcatttgggtgaagaaacatttaaattagctcagacatatatggataaactatcaaaacatggccagcaagcaaataaagctgcactctatggagaactgtgtgcactcctatttgcaaaaagtcactatgatgaggcatacaaatggtgcatcgaggcaatgaaagaaattacagcaggcttaccagtgaaagttgtggtggatgtcttaagacaagcttctaaggcttgtgtagtaaaacgtgaatttaagaaggcagaacagttaattaaacatgcagtgtatttggcacgggatcattttggatccaaacacccaaaatattctgatacactgctagattatgggttctacttactcaatgtagataatatctgtcagtctgttgcaatttatcaggcagcccttgacattagacagtcagtgtttggtggcaaaaatatccacgtagcaacagctcatgaagatttggcctactcttcttatgtccaccagtatagctctgggaaatttgacaatgcactatttcatgcagaaagagctattggtatcattacccacatcctacctgaagatcatcttcttttggcttcttcaaagagggtgaaagcacttattttagaggagattgcaattgattgtcataataaggaaactgaacagaggctgcttcaagaagctcatgatttgcacctgtcttcactccaactagctaaaaaagcttttggggaatttaatgtacagactgcaaaacactatggaaaccttggaagactttatcagtcaatgagaaaatttaaggaagctgaagaaatgcacatcaaagcaattcagattaaagaacaacttcttggtcaagaagattatgaagtagccctttcagtgggacatctggcttctttatataattatgacatgaatcagtatgaaaatgctgagaaactttatttgcgatctatagcaattgggaagaaactttttggtgagggctacagtggactagaatatgattatcgaggtctcattaaactttacaactccattggaaattacgagaaagtgtttgaatatcacaatgttctgtctaactggaaccggttgcgagatcggcaatattcagtgacagatgctcttgaagatgtcagcaccagcccccagtccactgaagaagtggtgcagtccttcctgatttctcagaatgtcgagggaccgagctgctgagggaggacctcagttaaccaattaccttttcccggattccagggaattcatactgtgaaatcaaaaccatgttgttttggggggctggaatttgcattgaaacactggtccagtccattgaagaccctattttgggtgatccctatcttgcagaatgtctgtaggaataagcatatattcagttatattcagcatgtaccgcatgtgtaagtagtctggcccacattttcaacctagtagaacaaacaacaggaaatcttttttttgttgtttttaaaaaattcattttgcagaaagcctgaaagaaaaaaaatacccctaaataaaactatttaagagtttaaaagagttgcattcttattatgtaaggatgattttaacaactttttaatatgtaattcttccatgtggaggtattcaatactgtagtgtaaagaaattttatgcggaaaatctttatatgcagtatagaaaagttaacacaagtactaataaaagagggacatcccgacttacgtttttctaccttgcccagataagtggatacaaccactctatattacaaggaaaggactgtcagattcatctgaactggaccagtgttgatctgtaatgtaatagaaaatctgatagaccagcacttctgacttttttttttttggtacaacaatgcaagatgctctgatagcatttgctaacaggaccaggaggatctaaaaaggaccagcctaatgtagaaggtggttatttggaccagaggctttagattattattttagatcctacatatacttttatcagtagaatgatttcatttagatgtataatgaaaaaggataatgcaaaaattatgtaatagataccaaattagggaagtttggcaatttcaatggcatatttttagtcaaggtacacagatggcagtgccataagcaagtctataaatatcggctgcagccatccccctcattttaaatgttgccctaataatcaatgcagttaacaagtatattggctgtgtgtcatgaaatagttcatgttcagatggaaatgttaggttactgtatggtttatggagattaatgaaaatgaatgcccaaaaataagtcttagaaaatcctccatttttatggtaaatagtaatacaactaggtcatttcatttgaaatctaggagtcaaatggaaagatcccctaataatacacctatttcactaacttgtctttctgtttattgggttttgatttgattttttgtaagccagtcaggttatttaatgatgaggtaataatcaaatttaagaatttgtgacatgtagcaattcaagaaacaaaaaggtattttgctgttacctcaattcttactgtagtagcccatctgatgcttctatagttaagaatctgggttccccccctattttcaggggttcatgacttggctgttaaagatgttgctcctagctaatgcttggagtagtctgtgggtgaatggatgtgtgttgaattttagttttcttttaacatgcatgttgggtgagaggggaaaaaaatctaagctgtctgccacattgagtacagaaaagttgtagatttcaaattttattaatattttaagcacttttttgaacttcccaaccttgtttgaagctgttatttgcagtcctattagttttgagccattgcatttaagttccctaggagggggttggttgggggatgtactgaaagagatgaagcaaacccacaccctaagatggtaactgtgtgatttagaaacctgagtttactcctcaaatcgaattattttctttttaaattttggaaagagtaaattgacgtacttgcagtttatgaagctgccccccacccctcagttaattgcagtctaatgtcaagaggcacttctttattaattaccaaatagtctttgtgaccaaggactaacatttttaagttactcagctctatcctcatgggcctatatatttaatacctccaaagatattttcaggataggctttgtatacttttattggttatttagaatccagtggtatgtttgtggtataggaatgtcatggtaaattgtttttcaataaatattttgaaacatgtttccatatgaagtttttttttcaatctgtattttttggttttgtgcacatacagcatttcctaggataaaaataaacaaatgacttacagcctcatcctccctaactccatttgaactcaacttagctcacactcagtgataaaacaacatggtatgtagaagcctaggatcacagggtgataatgtcaattggcagccagttgtgtttttttgaaacatcattattggcagtttctccttatcaccactgctttaatgtagtttttttgtaaatccatatactttaatgcatacactctagcttaagaaaacattgccattttggttagggatatgacttaatgtgctattatttctggttctaatgaagaataataccctatgactttaagtgtaagattcatcctttaagtagggatgtttaggataagttagatgtgtgccactatgatttattgggtttcttaaaaatcttgaagaaaataataaaatttatctcacaataagttaacttgcgcaaactttttacatatggtgaggtgcgtaaggaagccctggccaacttaaagatttttctggaggttcagcaaagttatgttaaattaggggcctttggtctcatccttctctgactcttctacccagtcttttcctaaagttcggtgctactccagttgggtgcatcagggagctccgtcagcactcgcatgtgtcgctcaggtggccactcatgcctgcattccatttaatagagtcaattggaatttttagagcataatctttatggatcctcaaagctgactttgccaaagggattgagacccttactaccatcaaatctctgtctctgcttggttaaaaattggctcactattgctttgtagtaacccctgcccaggtattttttcacttgtgaaaataatttgagaaagacctttgttcctagcctgttgggaaaagtttataattttatgaaaattaagtacagaggctgcgatcttagaaataatgaaggtgccatttggctgctccttaatagtgcagacagaaaactgcagtgaacacatgccaaaacatgattgaagcctttggctgaaactttatacatagaaataatgatttgctcataacaggtatcattaactgccactttttatgttttccctagaatttgtagccttgctgcttgcttttcttctgggtggcaaagttactactggaaaaacactataagtacaaagtttttggggttttatctttgctttagaagtggatgtgtacttcacctcttggctgtggaggaacttagttgccaggaaattttttttttttttttcagacggagtttcgctcttgttgcccaggctgggagggcaatggcaccgtcttggctcactgcaacctccgcctcccgggttccagcgattctcctgcctcagccttccgagtagctgggattacaggctcctgccaccacgcctggctaggaaattttttgttgttaatatgacatttggattaatctccagcttcaacagtacttcttttgtccataaatctcaggaatgttttaggcagaaaactggttttaccctgttgataatcagaaggagtgtgctttaggatttattgcataatactattctttaattgcaatcctaggtatctatagcatgagtggccttagtgagtttgttgaagtgcacatgtttttcaagagtaaaatttaagattaaaaatatatcctatatatagatatctagaaaacttggtttgtggtgcacagttaagtgttggatcactaaataaccattgcaggtaccgtttgtgtaacattactcatttctgtatattccttttatgggaagatattttgccatggtaactaaaacttttcagttctacttttatgatgtgaatgaatgctacgttttattaaatattaccaggtcagtactatttttatactttattaagcaacaggggattttagtttaataggctcaaaataaaaagttcttaatggaacagttaaaaacaaaacactaacaatctttacgtgaaaatccccactaatagtgccacaataatttctatagaaatatctaaggtcattaaatagatttttgaagacggttcttcattgtgtcaggatgacctttcatatcattctcaccaacttgtagtgcccaccgttatttgtaactattaaaccatactaagtatgtttgtaaccagcattgtgatatattctgtacttgtattgctaaaaatgaattattgacctaataaatatagtgttcctgc

SEQ ID NO: 2944 - DNA, 995 bp, Homo Sapiens
  NM_006384
ggctgggaacgcctggcagcttttaggagggggcgggcccgggggtggtggccccaggagcggttgccgcggggaccgggcagtgacgcggcccaagggcggaagtgagaaagttgtctgcgtctcgaggcgagttggcggagctgtgcgcgcggcggggcgatggggggctcgggcagtcgcctgtccaaggagctgctggccgagtaccaggacttgacgttcctgacgaagcaggagatcctcctagcccacaggcggttttgtgagctgcttccccaggagcagcggagcgtggagtcgtcacttcgggcacaagtgcccttcgagcagattctcagccttccagagctcaaggccaaccccttcaaggagcgaatctgcagggtcttctccacatccccagccaaagacagccttagctttgaggacttcctggatctcctcagtgtgttcagtgacacagccacgccagacatcaagtcccattatgccttccgcatctttgactttgatgatgacggaaccttgaacagagaagacctgagccggctggtgaactgcctcacgggagagggcgaggacacacggcttagtgcgtctgagatgaagcagctcatcgacaacatcctggaggagtctgacattgacagggatggaaccatcaacctctctgagttccagcacgtcatctcccgttctccagactttgccagctcctttaagattgtcctgtgacagcagccccagcgtgtgtcctggcaccctgtccaagaacctttctactgctgagctgtggccaaggtcaagcctgtgttgccagtgcgggccaagctggcccagcctggagctggcgctgtgcagcctcaccccgggcaggggcggccctcgttgtcagggcctctcctcactgctgttgtcattgctccgtttgtgtttgtactaatcagtaataaaggtttagaagtttgaccctaaaaaaaaaaaaaaaaaaa

SEQ ID NO: 2945 - DNA, 2512 bp, Homo Sapiens
  NM_006385
cagggcgggacttgtggcgtcttcgcagcggtcattttggctgccctcccggaggtccgttctgtctgtcagccgctttggtacgctgcatcgggatcgaagtgacggaccgtgaaggcgcgagagtcaggtctgagggtcgggggcagagccgcccgcgaggccggcctggggatagcgatgctcgggttccccccgggtcgcccgcagctcccggtccagctccgcccacagactcggatggcgaccgcactgagggacccggcttcggttcccatagctacagaggtgcttttcaaacttacacagggaagtgtgacctttgaagatgtggccgtgtacttctcctgggaggaatgggatctccttgatgaggctcagaaacacctgtacttcgatgtgatgctggagaactttgcacttacgtcctccctgggttgttggtgtggagtggaacatgaggaaacaccttctgaacagagaatttctggagaaagagtgccacagttcaggacttccaaagaaggttcatcttcccagaatgccgactcctgtgaaatatgttgcctggtcttgagagatattttgcacttggctgaacaccaaggaacaaactgcgggcagaaactacacacatgtggaaaacaattctacatcagtgcaaatcttcaacagcaccagaggcagcacattacagaggcacctttcagaagttatgtggacactgcctcgtttacacagagttgcatagtccatgtgtcggagaaaccctttacctgcagggagatcaggaaagacttcctggccaacatgaggtttctccatcaagacgccactcaaacaggggagaagccaaataacagtaacaagtgtgcggtggccttttacagtggaaaaagtcatcacaactggggaaaatgcagtaaagcctttagccacatagacacacttgttcaggaccagagaatcctcactagagaaggactttttgagtgcagtaaatgtgggaaagcatgtacgcgaagatgtaacctcattcagcaccagaaagtccacagtgaagaaaggccttatgaatgcaatgaatgtggaaaattctttacctactactccagtttcattatacatcagagagttcatactggagaaaggccttatgcgtgccctgaatgtgggaaatcgtttagtcagatatacagcctcaatagccataggaaagttcacactggagaaaggccttatgaatgtggggaatgtgggaaatcttttagccaaaggtccaacctcatgcagcatcgcagagttcacactggagaaaggccttatgaatgcagcgaatgtgggaaatcttttagccaaaactttagcctgatctaccaccagagagttcacactggagaaagacctcatgagtgcaatgaatgtggaaaatcctttagccgaagctccagcctcattcaccaccggagacttcacactggagaaagaccctatgagtgcagtaaatgtgggaagtcatttaagcaaagctccagcttcagttcacatcggaaagtccacacaggggaaaggccttatgtgtgtggggaatgtgggaaatcctttagccatagctccaaccttaagaaccaccagagagttcacactggagaaagacctgttgagtgcagtgaatgtagcaaatcctttagctgtaaatctaacctcattaaacacctgagagttcacactggagaaaggccttatgagtgcagtgaatgtgggaaatcctttagccaaagttctagcctcattcaacaccgcagagttcacacgggaaaaaggccttatcagtgcagtcaatgtgggaaatcctttggctgcaaatctgtcctcattcaacaccagagagttcacattggagaaaagccttagctgtactgagaatatgcaatttccttttagtgtaattatactgaaggagtacacctgtgagagagacaagtacctgatttggaagccccaacatctaaggatatacagtgggcggattccccttaagttccaggtatgtgttacactttctaacatgccatttagaaagtgttagactttctcacctgccatttatggctcttgccgtttatgtcactgacagtttctgaggcagaagccgtatcatgtctaccacctgtgaggtccacacagtgtgtatcatttacctcctgaacctgctcaaggaagcagacctctgcttctccccatttgctagaagaaatcatgaatagtctgagtcttcctctctgacaagttagggcatggacttgacccagctttgtgccagagaacccaatatgagtgttgttggcagcttgccaagaaggactgtctttttcaagacatactggtttcatgtgacacctccatggatttttttccagcctctaagtcaccaacttgggaactgcttgtctcacgttgctttgttttttacaataataaaagcattattatttaagctacctttatcttg

SEQ ID NO: 2946 - DNA, 4105 bp, Homo Sapiens
  NM_006387
ttccggccggcttccgcagacggcgctggtggtcgatcgtgtggcgccggaggacgttccccgcggccggagccatggagatgccgctgccccccgatgaccaggagcttcgaaatgtcatcgacaagctcgcccagttcgtggctcgcaatgggcccgagtttgagaagatgactatggagaagcagaaggacaaccccaaattctcgtttcttttcggaggcgaattctacagttactacaagtgcaagctggcgctggagcagcagcagctcatctgcaagcagcagaccccggagctggagccagccgccaccatgccacccctgccacagcccccgctggcccccgccgcgcccatcccgccggcccagggcgcgccatccatggacgagctcatccagcagagccagtggaacctccagcagcaggagcagcacttgctggcgctcagacaggagcaagtgacagcggccgtggcccacgcggtggagcagcagatgcagaagcttctggaggagacccagctagacatgaacgagtttgacaacctcctgcagcccatcatcgacacgtgcaccaaggacgccatctcggccgggaagaactggatgttcagcaatgccaagtccccgccgcactgtgagctgatggccggccacctccggaaccgcatcacggctgatggggcacacttcgagctgcggctgcacctcatctacctgatcaatgacgtgctgcaccactgccagcgcaagcaggcccgggagctgctggccgccctgcagaaggtcgtggtgcccatctactgcaccagcttcttggccgtggaggaagacaagcagcagaagatcgcccggctcctgcagctctgggagaaaaacggctacttcgatgactccatcattcagcagctacagagcccagccctggggcttggtcagtaccaggccaccctcatcaacgagtactcctcagtggtccagccggtgcagctggccttccagcagcagatccagaccctcaagacgcagcacgaggagtttgtcaccagcctggcccagcagcagcagcagcagcaacagcagcagcagcagctccagatgccgcagatggaggctgaagtcaaggccacgcctccaccgcctgctccacccccggccccagcacctgcccctgccatcccgcccaccacccagcctgatgacagcaagcctcccatccagatgcctggctcttcagagtacgaagctccaggaggggtccaggatcctgcagctgccggcccccggggccccgggccacacgaccagatcccaccaaacaagcccccttggtttgaccagcctcaccccgtggctccttggggccagcagcagccgccagagcagccaccctacccgcaccaccagggcggcccaccccactgccccccctggaacaacagccatgagggcatgtggggcgagcagcgcggtgaccccggctggaacggccagcgcgacgcgccctggaacaaccagcccgacgccgcctggaacagccagttcgagggcccctggaacagccagcacgagcagccgccctggggcgggggccagcgcgagccacccttccgcatgcagcggcccccacacttccgggggcccttcccgccccaccagcagcacccgcagttcaaccagcctccgcacccccacaacttcaaccgcttcccgccccgcttcatgcaggacgacttcccgccacggcaccccttcgagcggccgccctatccccaccgcttcgactacccccagggggacttccctgccgaaatggggccccctcaccaccaccctggccaccgcatgcctcatcctggcatcaacgagcacccgccttgggctggaccccagcaccctgacttcggccctcccccccatggcttcaacgggcagcccccacacatgcggcgacagggcccaccccacatcaaccacgatgaccccagcctggtccccaatgtgccctacttcgatctccctgctgggctgatggcccccctcgtgaagctggaagatcacgagtacaagcctttggaccctaaagacatccgcctcccaccccccatgccgcccagcgagaggctgctggctgcagtggaggccttctacagccccccgtcccacgacaggcccaggaacagtgaaggctgggagcagaacggcctctatgagttcttccgagcaaaaatgcgggcccggcggaggaaaggccaggagaagaggaacagcggaccctcgaggtctcggagcagatccaagagtcgagggcgttcttcctcccgctccaactcaagatcctccaagtcttcaggctcgtactcaaggtcaaggtcgcgctcctgctcccgttcctactcccgctccagatctagaagtcggagcaggtcgcgctcctccagaagccgctcccggtcccagtcgcggtcccggtccaagtcgtactccccaggaagaagacgccggtcacggtccaggagccccaccccgccttcctctgctggtctgggttctaattcggcgcctcccatccctgactcaaggctcggagaagagaacaaaggccatcagatgctggtgaagatgggctggagcggctcaggcggcctcggtgcgaaggagcaagggatccaggaccccatcaagggcggggacgtccgggataagtgggaccagtataaaggcgtgggcgtggctctggatgacccctatgagaactaccgcaggaacaagagctactccttcatcgcccgcatgaaggccagggacgagtgtaagtaggcgcccatgccgggagccgcgccggtggccagcggtgccggctgtgggaccttcctggctgactggcagaggaagattgcagtgacagctcagttcttacaccgtctccacttgtggagagccacaggaagagaaggaagaccagcgcatgcccagtgggaacgccgtgctccatggcgtggagggcacgggtgccacccacaaaccacaccaggaggcgctgcagccaccagggccccaggctcgttttcctttatagcgaagcaaaaaacacaagaccctccgcccgagtaaattcttcagccacgaagggatggatgtgcatctgccctaagtcagattgaagcctcctcctaggctccaggaggagcatgtgcaggaagggttggcctgagccagagccggcaccccagctccttcctccagctccccgcacccaccggccctgacctggcttcccctcggctgtgtagggacaaagccgaagcccagtgccatgactgcccgcggattgaaaaacagaaacacaaaactttgacttgacttgcgaagtgaagcagggttttcatttttactctccttggtttaggtctagaaagaagaatactgacctgagaggaggcccagtgagattctgaaacctaattcttcgaaggcgtactggcccttagttcagttattttagttgtataagttgatattttttttctggaatgtagccatttgctgttatctgggaaacaagattctaacaggaaaccagcctaagacacttcaggttgagcgctgcctcggagtctgtgcccgtcgcgtcccctgcttgagttttgcacttggaagaaccctgcaccggctggcgtgtgcgacggcccagtcccatccagagcatggagcccgaccccagccagcgccttccactccatcatttcatttcacacccccgaagggaggggaggccaggaggggagctgctcctgccagaagctggtgggtgaccgttgggaatcggccacacctggtgtccatgggcagcctggtgcaattccattcatttgtacagaaacatttttgaaaaattcttttcaataagatgcaaaatcttccaacttttcaacccaacgtgatgaatatttgattttgttctagatttcctgtagctgtgaattgttaaaatgtatgattcaggataaaacgtaaacacgtgctgttagtaatttcttgtggatttcattgttttgccttcaaataaagcctttttttaaagacctttaaaaaaaaaa

SEQ ID NO: 2947 - DNA, 4622 bp, Homo Sapiens
  NM_006389
aatgagcgcgcgccgcgtccggggccggctggtgcgcgagacgccgccgagaggttggtggctaatgtaacagtttgcaaaccgagaggagttgtgaagggcgcgggtggggggcgctgccggcctcgtgggtacgttcgtgccgcgtctgtcccagagctggggccgcaggagcggaggcaagaggggcactatggcagacaaagttaggaggcagaggccgaggaggcgagtctgttgggccttggtggctgtgctcttggcagacctgttggcactgagtgatacactggcagtgatgtctgtggacctgggcagtgagtccatgaaggtggccattgtcaaacctggagtgcccatggaaattgtcttgaataaggaatctcggaggaaaacaccggtgatcgtgaccctgaaagaaaatgaaagattctttggagacagtgcagcaagcatggcgattaagaatccaaaggctacgctacgttacttccagcacctcctggggaagcaggcagataacccccatgtagctctttaccaggcccgcttcccggagcacgagctgactttcgacccacagaggcagactgtgcactttcagatcagctcgcagctgcagttctcacctgaggaagtgttgggcatggttctcaattattctcgttctctagctgaagattttgcagagcagcccatcaaggatgcagtgatcaccgtgccagtcttcttcaaccaggccgagcgccgagctgtgctgcaggctgctcgtatggctggcctcaaagtgctgcagctcatcaatgacaacaccgccactgccctcagctatggtgtcttccgccggaaagatattaacaccactgcccagaatatcatgttctatgacatgggctcaggcagcaccgtatgcaccattgtgacctaccagatggtgaagactaaggaagctgggatgcagccacagctgcagatccggggagtaggatttgaccgtaccctggggggcctggagatggagctccggcttcgagaacgcctggctgggcttttcaatgagcagcgcaagggtcagagagcaaaggatgtgcgggagaacccgcgtgccatggccaagctgctgcgtgaggctaatcggctcaaaaccgtcctcagtgccaacgctgaccacatggcacagattgaaggcctgatggatgatgtggacttcaaggcaaaagtgactcgtgtggaatttgaggagttgtgtgcagacttgtttgagcgggtgcctgggcctgtacagcaggccctccagagtgccgaaatgagtctggatgagattgagcaggtgatcctggtgggtggggccactcgggtccccagagttcaggaggtgctgctgaaggccgtgggcaaggaggagctggggaagaacatcaatgcagatgaagcagccgccatgggggcagtgtaccaggcagctgcgctcagcaaagcctttaaagtgaagccatttgtcgtccgagatgcagtggtctaccccatcctggtggagttcacgagggaggtggaggaggagcctgggattcacagcctgaagcacaataaacgggtactcttctctcggatggggccctaccctcaacgcaaagtcatcacctttaaccgctacagccatgatttcaacttccacatcaactacggcgacctgggcttcctggggcctgaagatcttcgggtatttggctcccagaatctgaccacagtgaagctaaaaggggtgggtgacagcttcaagaagtatcctgactacgagtccaagggcatcaaggctcacttcaacctggatgagagtggcgtgctcagtctagacagggtggagtctgtatttgagacactggtagaggacagcgcagaagaggaatctactctcaccaaacttggcaacaccatttccagcctgtttggaggcggtaccacaccagatgccaaggagaatggtactgatactgtccaggaggaagaggagagccctgcagaggggagcaaggacgagcctggggagcaggtggagctcaaggaggaagctgaggccccagtggaggatggctctcagcccccaccccctgaacctaagggagatgcaacccctgagggagaaaaggccacagaaaaagaaaatggggacaagtctgaggcccagaaaccaagtgagaaggcagaggcagggcctgagggcgtcgctccagccccagagggagagaagaagcagaagcccgccaggaagcggcgaatggtagaggagatcggggtggagctggttgttctggacctgcctgacttgccagaggataagctggctcagtcggtgcagaaacttcaggacttgacactccgagacctggagaagcaggaacgggaaaaagctgccaacagcttggaagcattcatatttgagacccaggacaagctgtaccagcccgagtaccaggaagtgtccacagaggagcagcgtgaggagatctctgggaagctcagcgccgcatccacctggctggaggatgagggtgttggagccaccacagtgatgttgaaggagaagctggctgagctgaggaagctgtgccaagggctgttttttcgggtagaggagcgcaagaagtggcccgaacggctgtctgccctcgataatctcctcaaccattccagcatgttcctcaagggggcccggctcatcccagagatggaccagatcttcactgaggtggagatgacaacgttagagaaagtcatcaatgagacctgggcctggaagaatgcaactctggccgagcaggctaagctgcccgccacagagaagcctgtgttgctctcaaaagacattgaagctaagatgatggccctggaccgagaggtgcagtatctgctcaataaggccaagtttaccaagccccggccccggcctaaggacaagaatgggacccgggcagagccacccctcaatgccagtgccagtgaccagggggagaaggtcatccctccagcaggccagactgaagatgcagagcccatttcagaacctgagaaagtagagactggatccgagccaggagacactgagcctttggagttaggaggtcctggagcagaacctgaacagaaagaacaatcgacaggacagaagcggcctttgaagaacgacgaactataacccccacctctgttttccccattcatctccacccccttcccccaccacttctatttatttaacatcgagggttgggggaggggttggtcctgccctcggctggagttcctttctcacccctgtgatttggaggtgtggagaaggggaagggagggacagctcactggttccttctgcagtacctctgtggttaaaaatggaaactgttctcctccccagccccactccctgttccctacccatataggccctaaatttgggaaaaatcactattaatttctgaatcctttgcctgtgggtaggaagagaatggctgccagtggctgatgggtcccggtgatgggaagggtatcaggttgctggggagtttccactcttctctggtgattgttccttccctcccttcctctcccaccatgcgatgagcatcctttcaggccagtgtctgcagagcctcagttaccaggtttggtttctgagtgcctatctgtgctctttcctccctctgcgggcttctcttgctctgagcctcccttccccattccccatccagctcctttccccctgggtttccttggcttcctgcagcaaattgggcagttctctgccccttgcctaaaagcctgtacctctggattggcggaagtaaatctggaaggattctcactcgtatttcccacccctagtggccagaggagggaggggcacagtgaagaagggagcccaccacctctccgaagaggaaagccacgtagagtggttggcatggggtgccagcatcgtgcaagctctgtcataatctgcatcttcccagcagcctggtaccccaggttcctgtaactccctgcctcctcctctcttctgctgttctgctcctcccagacagagcctttccctcaccccctgaccccctgggctgaccaaaatgtgctttctactgtgagtccctatcccaagatcctggggaaaggagagaccatggtgtgaatgtagagatgccacctccctctctctgaggcaggcctgtggatgaaggaggagggtcagggctggccttcctctgtgcatcactctgctaggttgggggcccccgacccaccatacctacgcctagggagcccgtcctccagtattccgtctgtagcaggagctagggctgctgcctcagctccaagacaagaatgaacctggctgtgtcagtcattttgtcttttccttttttttttttttttgccacattggcagagatgggacctaagggtcccacccctcaccccacccccacctcttctgtatgtttgaattctttcagtagctgttgatgctggttggacaggtttgagtcaaattgtactttgctccattgttaattgagaaactgtttcaataaaatattcttttctacagttaaaaaaaaaaaaaaaaaaaa

SEQ ID NO: 2948 - DNA, 1992 bp, Homo Sapiens
  NM_006392
cgcgcgccggagcgcgctagccgcattgcgagccgaacccgggagctggcgccatggtgctgttgcacgtgctgtttgagcacgcggtcggctacgcgctgctggcgctgaaggaagtggaggagatcagtctgctgcagccgcaggtggaggagtctgtgctcaacctgggcaaattccacagcatcgttcgtctggtggccttttgtccctttgcctcatcccaggttgccttggaaaatgccaacgccgtgtctgaaggggttgttcatgaggacctccgcctgctcttggagacccacctgccgtccaaaaagaagaaagtactcttgggagttggggatcccaagattggtgccgcaatacaggaggagttagggtacaactgccagactggaggagtcatagctgagatcctgcgaggagttcgtctgcacttccacaatctggtgaagggtctgaccgatctgtcagcttgtaaagcacagctggggctgggacacagctattcccgtgccaaagttaagtttaatgtgaaccgggtggacaatatgatcatccagtccattagcctcctggaccagctggataaggacatcaataccttctctatgcgtgtcagggagtggtacgggtatcactttccggagctggtgaagatcatcaacgacaatgccacatactgccgtcttgcccagtttattggaaaccgaagggaactgaatgaggacaagctggagaagctggaggagctgacaatggatggggccaaggctaaggctattctggatgcctcacggtcctccatgggcatggacatatctgccattgacttgataaacatcgagagcttctccagtcgtgtggtgtctttatctgaataccgccagagcctacacacttacctgcgctccaagatgagccaagtagcccccagcctgtcagccctaattggggaagcggtaggtgcacgtctcatcgcacatgctggcagcctcaccaacctggccaagtatccagcatccacagtgcagatccttggggctgaaaaggccctgttcagagccctgaagacaaggggtaacactccaaaatatggactcattttccactccaccttcattggccgagcagctgccaagaacaaaggccgcatctcccgatacctggcaaacaaatgcagtattgcctcacgaatcgattgcttctctgaggtgcccacgagtgtattcggggagaagcttcgagaacaagttgaagagcgactgtccttctatgagactggagagataccacgaaagaatctggatgtcatgaaggaagcaatggttcaggcagaggaagcggctgctgagattactaggaagctggagaaacaggagaagaaacgcttaaagaaggaaaagaaacggctggctgcacttgccctcgcgtcttcagaaaacagcagtagtactccagaggagtgtgaggagatgagtgaaaaacccaaaaagaagaaaaagcaaaagccccaggaggttcctcaggagaatggaatggaagacccatctatctctttctccaaacccaagaaaaagaaatctttttccaaggaggagttgatgagtagcgatcttgaagagaccgctggcagcaccagtattcccaagaggaagaagtctacacccaaggaggaaacagttaatgaccctgaggaggcaggccacagaagtggctccaagaaaaagaggaaattctccaaagaggagccggtcagcagtgggcctgaagaggcggttggcaagagcagctccaagaagaagaaaaagttccataaagcatcccaggaagattagaatgcaaatggacattctctgggaggtggggcataccatagcccaaggtgacatttcccaccctgtgccgtgttccccaataaaaacaaattcacaagaaaaaaaaaaaaaaaaaaaaaaaaaaaaaaaaaaaaaaaaaaaaaaaaaaaaaaaa

SEQ ID NO: 2949 - DNA, 5059 bp, Homo Sapiens
  NM_006395
ctttgcgcacgcgcgccgcttcccagtggcaagcgcgggcaggaccgcgttgcgtcatcggggcgcgcgcctcagagagagctgtggttgccggaagttgagcggcggcaagaaataatggcggcagctacgggggatcctggactctctaaactgcagtttgccccttttagtagtgccttggatgttgggttttggcatgagttgacccagaagaagctgaacgagtatcggctggatgaagctcccaaggacattaagggttattactacaatggtgactctgctgggctgccagctcgcttaacattggagttcagtgcttttgacatgagtgctcccaccccagcccgttgctgcccagctattggaacactgtataacaccaacacactcgagtctttcaagactgcagataagaagctccttttggaacaagcagcaaatgagatatgggaatccataaaatcaggcactgctcttgaaaaccctgtactcctcaacaagttcctcctcttgacatttgcagatctaaagaagtaccacttctactattggttttgctatcctgccctctgtcttccagagagtttacctctcattcaggggccagtgggtttggatcaaaggttttcactaaaacagattgaagcactagagtgtgcatatgataatctttgtcaaacagaaggagtcacagctcttccttacttcttaatcaagtatgatgagaacatggtgctggtttccttgcttaaacactacagtgatttcttccaaggtcaaaggacgaagataacaattggtgtatatgatccctgtaacttagcccagtaccctggatggcctttgaggaattttttggtcctagcagcccacagatggagtagcagtttccagtctgttgaagttgtttgcttccgtgaccgtaccatgcagggggcgagagacgttgcccacagcatcatcttcgaagtgaagcttccagaaatggcatttagcccagattgtcctaaagcagttggatgggaaaagaaccagaaaggaggcatgggaccaaggatggtgaacctcagtgaatgtatggaccctaaaaggttagctgagtcatcagtggatctaaatctcaaactgatgtgttggagattggttcctactttagacttggacaaggttgtgtctgtcaaatgtctgctgcttggagccggcaccttgggttgcaatgtagctaggacgttgatgggttggggcgtgagacacatcacatttgtggacaatgccaagatctcctactccaatcctgtgaggcagcctctctatgagtttgaagattgcctagggggtggtaagcccaaggctctggcagcagcggaccggctccagaaaatattccccggtgtgaatgccagaggattcaacatgagcatacctatgcctgggcatccagtgaacttctccagtgtcactctggagcaagcccgcagagatgtggagcaactggagcagctcatcgaaagccatgatgtcgtcttcctattgatggacaccagggagagccggtggcttcctgccgtcattgctgcaagcaagagaaagctggtcatcaatgctgctttgggatttgacacatttgttgtcatgagacatggtctgaagaaaccaaagcagcaaggagctggggacttgtgtccaaaccaccctgtggcatctgctgacctcctgggctcatcgctttttgccaacatccctggttacaagcttggctgctacttctgcaatgatgtggtggccccaggagattcaaccagagaccggaccttggaccagcagtgcactgtgagtcgtccaggactggccgtgattgcaggagccctggccgtggaattgatggtatctgttttgcagcatccagaagggggctatgccattgccagcagcagtgacgatcggatgaatgagcctccaacctctcttgggcttgtgcctcaccagatccggggatttctttcacggtttgataatgtccttcccgtcagcctggcatttgacaaatgtacagcttgttcttccaaagttcttgatcaatatgaacgagaaggatttaacttcctagccaaggtgtttaattcttcacattccttcttagaagacttgactggtcttacattgctgcatcaagaaacccaagctgctgagatctgggacatgagcgatgatgagaccatctgagatggccccgctgtggggctgacttctccccggccgcctgctgaggagctctccatcgccagagcaggactgctgaccccaggcctggtgattctgggcccctcctccataccccgaggtctgggattcccccctctgctgcccaggagtggccagtgttcggcgttgctcgggattcaagataccaccagttcagagctaaataataaccttggccttggccttgctattgacctgggacttggtcctccatgcagtttttatttcttgtcacagtgactgatagccatcccccaggatcctttccccttggccctgagggggtgacccaacacagaccaaatggggaaatgagcaaccagctcctgcccagagccactgcgggaggtggcaccctcatccccggaatgtgctgcccaccgcaccgcaggctcctcctgtgggggccctgggcatgggtgagggtgggaccccgtgagcgcactgcaccctggccctggtggagcgggaggaggaggagagccgagctgggtacgagactaaagggcccacatgacccagtgacgccagatttccaccaaggactgagtgagctgctcagacatggctttctgcctcccagcctgtcctccactgtgggcatagcatctgtgcctgcctgcctgcttgagggagaggagtttctgctgctgccttgagctggggggaagagcccaggggcagatcctggcagctgcctggatggggctcctccctgcccttatgagcaggccaggcccagaaaggccgagcctgggctgccttcctgccccagccgagggaggggtcagacggctctaccatgggtaactcaggcaagagctggttttcctctttattctgggtgtgtgcagctgtgaggccccaacccaggagaggccatggcctaggtacctgtgaccaccctgcccccgtgtagagggcatcgtctttcctgctattttattctttcagcttttgtcttaggcccagaatcaaagtgaaaattgagtcgagctgacccttacaacagtaggatttagtagggtagatttcaaatgaggcttcgcttctcccaaagtagccagtccaagttccagtggctgtcgttcagctcatgggagcttcatggggacacagccggcacaggtgcagggcccgagtccgcccacccagcctggcgctgaaactgcacacgtacactatgtggtttaagagcactttattattgttcttaaggctacttttaagtacaaaaaaagatggcctgccaaacctttttttttcttcttccaggaaaaacaggccacagagaatggtatattacagatttacacacatgaagagaaggtcagagcgcactgcaggcagcgcggctctgggaagaacttcacggagccccttcttagagcagggagggggctttctcagtgaaatgtttggttttctgctgcctcctctgccccaggcccccctccagggtactgcctatcccagataggtcagtgcaccagggacccggccgccagcaccgccgacccctcccagagtgacgcccttgttcactgacaaagagacctgtcccaggagtgtcctccaccgagccggtcagctgtgggtggttttcctgttacgacgctcagtagcctgtagcaataacaaactcgtggctatgaatgcagatgcagtgttctcatagaataactgttcctgcacttttacagacaaatctacgacaaaaaaaaagatcaactttttttttccgaacaacaaaaaaaatgaatgattacaataggaaagggaaaaattaaatagctacatatcattaacaaattaatgttcttcaaaaaatacctacaaatttctctgtacattctttacgcacagcgtaacgatggtctcaaaatcacccatatagaaaagtgttctcaacgatttttcctacagaaaatataggggcctgaatgccaaagcttggaagcccagtacagtgggagtgaaatgtgtgcggggcaaggagaagggcttttctttcctccacttttcaaaggcctgcagccactctgtgactacaagagccagtcctccgaccttttcacccagtgccaatttccaaaattcaacagctaaaaactgtaaaaccgggggtcatacggtgtgcagagtccacaaagccttgcaggtgaggtgaccacgcccacgtcacctggtcaggtgccatcgtcgtgagcctctggtgggccaggtgggacacagcacaccccagggggaggggatagaaacgctcattgaccaaaaaggagcagctgtgacctccacagctgtgtctgtcatgcttgcttcatctaatttctagttagtagctattaatatagcaaataataaatgcagtaataacagtataaagtcagaggaatgtatactgccttggccccagcgtacgaggaagcgtataaaacaccatatcacagattgtctgtcagtaatctgctgttcagccaagagagttcaaagggagcagtttctgcatgtagggaagttggaagacacaaaccccacctcccctgggagcttgtaacaaagcagacagggatgcaaaaataaatgatgtcagcctgcagccaaactccagcatcccacaccgcagctgacccactgctcatcgcgagggcctgccaggagctggcctcccgcactacttgtgagtaaagtgaatatcaaataccaatcttagagtacaactgtaccagcagtaagtatatctaggactgtaactgacaaaaataaactaattctgaaaagaaaaaaaaaa

SEQ ID NO: 2950 - DNA, 953 bp, Homo Sapiens
  NM_006399
caagagagagagagagcgtgcaagccccaaagcgagcgacatgtccctttggggagcagtccctctgcaccccagagtgaggaggacgcaggggtcagaggtggctacagggcaggcagaggaggcacctgtagggggtggtgggctggtggcccaggagaagtcaggaagggagcccagctggtgacaagagagcccagaggtgcctggggctgagtgtgagagcccggaagatttcagccatgcctcacagctccgacagcagtgactccagcttcagccgctctcctccccctggcaaacaggactcatctgatgatgtgagaagagttcagaggagggagaaaaatcgtattgccgcccagaagagccgacagaggcagacacagaaggccgacaccctgcacctggagagcgaagacctggagaaacagaacgcggctctacgcaaggagatcaagcagctcacagaggaactgaagtacttcacgtcggtgctgaacagccacgagcccctgtgctcggtgctggccgccagcacgccctcgccccccgaggtggtgtacagcgcccacgcattccaccaacctcatgtcagctccccgcgcttccagccctgagcttccgatgcggggagagcagagcctcgggaggggcacacagactgtggcagagctgcgcccatcccgcagaggcccctgtccacctggagacccggagacagaggcctggacaaggagtgaacacgggaactgtcacgactggaagggcgtgaggcctcccagcagtgccgcagcgtttcgaggggcgtgtgctggaccccaccactgtgggttgcaggcccaatgcagaagagtattaagaaagatgctcaagtcccatggcacagagcaaggcgggcagggaacggttatttttctaaataaatgctttaaaagaaaaaaaaaaaaaaa

SEQ ID NO: 2951 - DNA, 1757 bp, Homo Sapiens
  NM_006400
gagacttcctgctcatctgccgctccctttgccgccgccttagcccgggacccgaacccagcctctcccctacccgaacaccggccccggctccaccgaggcccgggtcccccagcccgtctcgccgccgccatggcggaccctaaatacgccgaccttcccggcattgccaggaatgagccagatgtttatgaaactagcgacctacctgaggatgatcaagcggagttcgatgcgtttgcacaagagctggaggagctgacaagcacaagtgtggaacacatcattgtcaatcctaatgctgcctatgacaagttcaaggacaagagagtggggacaaagggacttgatttctcagatcgtattggaaaaaccaagaggacaggatatgaatctggagaatatgagatgcttggagagggtctgggagtgaaggagacaccccagcaaaagtaccagcgcctactgcatgaggtccaagagctgacaactgaagttgaaaaaatcaagacgacagtgaaggagtcagccacagaggagaagctgacccctgtgttgctggctaaacagctggcagccctgaagcagcagctggttgcttcccacctggagaagctgctgggaccagatgctgcaatcaaccttaccgaccccgatggcgccctggctaagcgcctactactgcagctggaagcaacaaagaacagcaaagggggatcagggggaaaaaccactgggacccccccagatagcagccttgtcacttatgaactacattctcggcctgagcaggacaagttctctcaagctgccaaagtcgcagaacttgaaaagcgcctgacagagctggagacagctgtacgttgtgatcaggatgctcagaatcccctttctgcaggtctacagggagcctgtctcatggagactgtagagctgttgcaagcaaaggtgagcgccctagaccttgcagttttggatcaagtggaggctcggctacagagtgtcctgggaaaggtgaacgagattgccaagcataaagcctctgtagaagatgcagatacacaaagcaaggtgcaccagctatatgaaactatacagcgctggagccccattgcctccaccctccctgagctggtgcagagacttgtcaccatcaagcagctgcacgagcaagccatgcagtttggtcagctcctgacacacttggataccacccagcagatgattgctaattccttgaaggacaataccaccctcttgacccaggtgcagacaaccatgcgtgaaaacctggccacagttgaggggaactttgccagcattgatgaacggatgaagaagctgggaaagtgagcacatttgggagctggagaacaggggttatccctacccctgtgaactctgttaacagcttacatagggtttcccctttactataactctagcatccccatcccatttgacactgggggcaagggttcttcttgcatgtggggtttatacccctcccctgatgaatacagagtggtagctaggggttggttatcatcagaaggtggtctcccctcaggcctgggggataaggacgtgggcccagccacatgccaactcatgtccaatactgctttgcctggtgtggggaaggattgggtcttgtcccccaacacagcttctgtggctgactgtaatactgtacaactgtttctgaccattaaatgctgttgtactctgaaaaaaaaaaaaaaaaaaaaaaaaaa

SEQ ID NO: 2952 - DNA, 855 bp, Homo Sapiens
  NM_006402
gaggcccggctgcagacctctcccgagaggggaataatccgtgccggccggttccgccatggagccaggtgcaggtcacctcgacggtcaccgcgcggggagcccaagccttcgtcaggctctgtgcgacggaagcgcagtgatgttttccagtaaagaacgcggacgttgcaccgtgatcaattttgtccctttggaggcgccgttacggtccacgccccgctcgcgtcaagtgactgaggcctgtggtggagaaggacgtgccgtgccgctgggttctgagccggagtggtcggtgggtgggatggaggcgaccttggagcagcacttggaagacacaatgaagaatccctccattgttggagtcctgtgcacagattcacaaggacttaatctgggttgccgcgggaccctgtcagatgagcatgctggagtgatatctgttctagcccagcaagcagctaagctaacctctgaccccactgatattcctgtggtgtgtctagaatcagataatgggaacattatgatccagaaacacgatggcatcacggtggcagtgcacaaaatggcctcttgatgctcatatctgttcttcagcagcctgtcataggaactggatcctacctatgttaattaccttatagaactactaaagttccagtagttaggccattcatttaatgtgcattaggcacttttctgtttatttaagagtcaattgctttctaatgctctatggaccgactatcaagatattagtaagaaaggatcatgttttgaagcagcaggtccaggtcactttgtatatagaattttgctgtattcaataaatctgtttggaggaaaaaaaaa

SEQ ID NO: 2953 - DNA, 1623 bp, Homo Sapiens
  NM_006409
acttccgggatctgtcagccgctccctctgggcttccgtcctccgcccgcgcccgacggagcctgttcgcgtcgactgcccagagtccgcgaatcctccgctccgagcccgtccggactcccccgatcccagctttctctcctttgaaaacactaagaataatgtcactgcatcagtttttactagagccaatcacctgtcatgcctggaacagggatcgtactcagattgccctcagtcccaataatcacgaagtgcacatctataagaagaacgggagccagtgggtgaaagctcatgaactcaaggagcacaacggacacatcacaggtattgactgggctcccaagagcgaccgcattgtcacttgtggggcagaccgcaatgcctatgtctggagtcagaaagatggtgtttggaagccaaccctggtgatcctgagaattaatcgcgcagctacttttgtgaagtggtcccccctagagaacaaatttgctgtgggaagtggagcacgactcatttctgtttgttactttgagtctgaaaatgactggtgggtgagcaagcacattaaaaagccgattcgctccacagtcctcagcttggattggcatcccaacaacgttttgctggcagcaggatcatgtgacttcaaatgcagagtgttttctgcctacattaaagaagtggatgaaaagccagccagcacgccctggggcagcaagatgccttttgggcagctgatgtcagagtttggtggcagtggcactggtggctgggtccacggggtaagcttctctgccagtgggagccgcctggcctgggtcagccacgacagcaccgtgtctgttgctgatgcctcaaaaagtgtgcaggtctcgactctgaagacagagttcctgccgctcctaagtgtgtcatttgtctcagagaacagcgtcgtggctgctggccatgactgctgcccaatgctctttaactacgatgaccgcggctgcctgaccttcgtctccaagttagatattccaaaacagagcatccaacgcaacatgtctgccatggaacgcttccgcaacatggacaagagagccacaactgaggaccgcaacacggccttggagacgctgcaccagaatagcatcactcaagtctctatttatgaggtggacaagcaagattgtcgcaaattttgcactactggcatcgatggagccatgacaatttgggatttcaagaccctcgagtcttccatccagggcctccggataatgtgaagctgagtgagcctccgccatccagcatgacaaactgtggccgaccgcagctgtgccgtggcacgatggcgaggaagccagccccaaggaaacactgaaaacacatatcacgccaatgccgtgtggttttgtttgaatataaaattggtgaaagtgttggtttttttaaggcagtaatttttttgtttgtttttttgcgatttcattccattcttgaccaaagcttctctttaagtagtttattatggaaaattgtcacactaacttaaaagacagggtgagggagatatgtaaattgtccactagaaaattaaataaaagaactgaatgtggaaaaaaaaaaaaaaaa

SEQ ID NO: 2954 - DNA, 1404 bp, Homo Sapiens
  NM_006410
aggtcccgcccctgtgggcggggcgaggcagcgtcgccgcgaggccacccggaagaccaagccggcatggccgaaacagaagccctgtcgaagcttcgggaagacttcaggatgcagaataaatccgtctttattttgggcgccagcggagaaaccggcagagtgctcttaaaggaaatcctggagcagggcctgttttccaaagtcacgctcattggccggaggaagctcaccttcgacgaggaagcttataaaaatgtgaatcaagaagtggtggactttgaaaagttggatgactacgcctctgcctttcaaggtcatgatgttggattctgttgcctgggtaccaccagagggaaagctggggcggagggatttgttcgtgttgaccgagattatgtgctgaagtctgcagagctggcaaaagctggagggtgcaaacatttcaacttgctatcctctaaaggagctgataaatcaagcaattttttatatctacaagttaagggagaagtagaagccaaggttgaagaattaaaatttgatcgttactctgtatttaggcctggagttctgttatgtgataggcaagaatctcgcccaggtgaatggctggttagaaagttctttggctccttaccagactcttgggccagtgggcattctgtgcctgtggtgaccgtggttagagcaatgctgaacaatgtggtgagaccaagagacaagcagatggaactgctggagaacaaggccatccatgacctggggaaagcgcatggctctctcaagccatgaccacattggagaaatggtttttattgtcaaccttaacacccatcaccaaatcggtaatttcagggtctaaaaaaagtcagcatgttttaactttgttgttttactatcctcaggcatccattccaatcaagaaatgatggtgctctgcatcagtggttcagagcctggttatacatatagatcactcagggagctttggaaaaataaagatttgtcagccctatctcaaacttgaatcaaaatttctggggtgtgggcacaataatctgtaattttctttgtttatacttcccctgatgccactggttccgatgccactggctggggggcctgctttgaaatgcttgtctgcagagtcacagcagccatgaaaaccttatgaccgtgcaaatgagctctgctctaaaattgttgacattcatgtctctgagttacaaaagtgctaattcactacatgtaattgtgtaagtaaacattgtgcctttactacttctttatgtaatagaagttatatacctaagcttatataatacatggggaggattaaataaaggaataaagatgaatggacaactcctaaaaaaaaaaaaaaaaaaaaaaaaaaaaaaa

SEQ ID NO: 2955 - DNA, 1576 bp, Homo Sapiens
  NM_006412
ccagccccgccgccctcgcaataaggggcctgagcgcgcgggggagaagcgggagcgggagcgggagcgagctggcggcgccgtcgggcgccgggccgggccatggagctgtggccgtgtctggccgcggcgctgctgttgctgctgctgctggtgcagctgagccgcgcggccgagttctacgccaaggtcgccctgtactgcgcgctgtgcttcacggtgtccgccgtggcctcgctcgtctgcctgctgcgccacggcggccggacggtggagaacatgagcatcatcggctggttcgtgcgaagcttcaagtacttttacgggctccgcttcgaggtgcgggacccgcgcaggctgcaggaggcccgtccctgtgtcatcgtctccaaccaccagagcatcctggacatgatgggcctcatggaggtccttccggagcgctgcgtgcagatcgccaagcgggagctgctcttcctggggcccgtgggcctcatcatgtacctcgggggcgtcttcttcatcaaccggcagcgctctagcactgccatgacagtgatggccgacctgggcgagcgcatggtcagggagaacctcaaagtgtggatctatcccgagggtactcgcaacgacaatggggacctgctgccttttaagaagggcgccttctacctggcagtccaggcacaggtgcccatcgtccccgtggtgtactcttccttctcctccttctacaacaccaagaagaagttcttcacttcaggaacagtcacagtgcaggtgctggaagccatccccaccagcggcctcactgcggcggacgtccctgcgctcgtggacacctgccaccgggccatgaggaccaccttcctccacatctccaagaccccccaggagaacggggccactgcggggtctggcgtgcagccggcccagtagcccagaccacggcagggcatgacctggggagggcaggtggaagccgatggctggaggatgggcagaggggactcctcccggcttccaaataccactctgtccggctcccccagctctcactcagcccgggaagcaggaagccccttctgtcactggcctcagacacaggcccctggtgtcccctgcagggggctcagctggaccctccccgggctcgagggcagggactcgcgcccacggcacctctgggagctgggatgataaagatgaggcttgcggctgtggcccgctggtgggctgagccacaaggcccccgatggcccaggagcagatgggaggaccccgaggccagacgcacactgtccgagccctctgctcagccgcctgggacccaccagggtgcagctgggctccagggtccagcccacaagctgcatcaggctctctgggagaggaggggcctggagggccaggagtcccagactcacgcaccctgggccacagggagccgggaatcggggcctgctgctcctgctggcctggaagactctgtggggtcagcactgtactccgttgctgtttttttataaacacactcttggaagtggcaaaaaaaaaaaaaaaaaaaaaaaaaaaa

SEQ ID NO: 2956 - DNA, 2780 bp, Homo Sapiens
  NM_006415
gcgcttgtgacccgccttccggaaggaagcggctaactatggcgaccgccacggagcagtgggttctggtggagatggtacaggcgctttacgaggctcctgcttaccatcttattttggaagggattctgatcctctggataatcagacttcttttctctaagacttacaaattacaagaacgatctgatcttacagtcaaggaaaaagaagaactgattgaagagtggcaaccagaacctcttgttcctcctgtcccaaaagaccatcctgctctcaactacaacatcgtttcaggccctccaagccacaaaactgtggtgaatggaaaagaatgtataaacttcgcctcatttaattttcttggattgttggataaccctagggttaaggcagcagctttagcatctctaaagaagtatggcgtggggacttgtggacccagaggattttatggcacatttgatgttcatttggatttggaagaccgcctggcaaaatttatgaagacagaagaagccattatatactcatatggatttgccaccatagccagtgctattcctgcttactctaaaagaggggacattgtttttgtagatagagctgcctgctttgctattcagaaaggattacaggcatcccgtagtgacattaagttatttaagcataatgacatggctgacctcgagcgactactaaaagaacaagagatcgaagatcaaaagaatcctcgcaaggctcgtgtaactcggcgtttcattgtagtagaaggattgtatatgaatactggaactatttgtcctcttccagaattggttaagttaaaatacaaatacaaagcaagaatcttcctggaggaaagcctttcatttggagtcctaggagagcatggccgaggagtcactgaacactatggaatcaatattgatgatattgatcttatcagtgccaacatggagaatgcacttgcttctattggaggtttctgctgtggcaggtcttttgtaattgaccatcagcgactttccggccagggatactgcttttcagcttcgttacctcccctgttagctgctgcagcaattgaggccctcaacatcatggaagagaatccaggtatttttgcagtgttgaaggaaaagtgcggacaaattcataaagctttacaaggcatttctggattaaaagtggtgggggagtccctttctccagcctttcacctacaactggaagagagcactgggtctcgcgagcaagatgtcagactgcttcaggaaattgtagatcaatgcatgaacagaagtattgcattaactcaggcgcgctacttggagaaagaagagaagtgtctccctcctcccagcattcgggttgtggtcacggtggaacaaacagaggaagaactggagagagctgcgtccaccatcaaggaggtagcccaggccgtcctgctctaggcagagtcccgggaccatggcctcctgccacacaacacgcagagaggactcaagactcccgctggccatggagtggcctgaaagagagcaagaacatgtggatctttgataggattgttaccaaatggtgtcagtatggaccaattgtgtgaccatgagaaggatgcttattttttttaaaaagaaaacacatctaaaagcccaggaactgatttttttaagaggaaaactaatgacagtgtataactgatgtttaaattgtgcatttagtactatttaaatgttttcttatactagtattttatattcttttgttgtcgtttaaaactggagcttcagtgtctcttccctccctctaatagtaatggttcagtaagcactccttaactccttagtatttcatagaaaaatgactgcaacattaaagctaagaggaacacttcaacatatgtggtacaaatttatattgaagatctaaataaaccacgtattttccagtcttcgttgtgtgaagctaaatggtggctaaaaggaacactttttgtgtgattattataaactttgcattgtatttgaatcttagaacttttgtacacactaaatattgatgtcacaccatttctaatctgagcatccttagccagagaatattcattatacttcctaagtgagcaataatttaaatcagaagctattttattttaatgtaattaacctttctttacatttcttatgtgttcacctctaatctgttttaggaagagagttggttattatgttgatcccataatataaatcatatcctttatattttagaatatctcaaatgtattccttttttgtatggtgggtttgcctagggacgtgtaactacaggcttttactaagccaaggaaaaagagaatttttcttttcatcttacaaattccagatatctacaaaagatgtgaaagcactaaaaataccatttttaagcagtactttacctgttttttctttagcaaaccaggttatgtggtgtaaaggtttgttatacgtgccacaatatagcatataaatattatgccatcattccttctcttgttaaaggtagaagaataaaattgtgatttttataacctgtgcttattactcaaatggtcttcaacatctttttaaacaacacatactttttgaatgttcagtttctattttgcttgaggtattttgtacatatgtgccttgtgattgctgctgctttaaaggataaagtactctttgggggatgagtctggtttgttttgttttattttttaatgaaataaacctatattcctgatt

SEQ ID NO: 2957 - DNA, 2844 bp, Homo Sapiens
  NM_006418
atgaggcccggcctctcatttctcctagcccttctgttcttccttggccaagctgcaggggatttgggggatgtgggacctccaattcccagccccggcttcagctctttcccaggtgttgactccagctccagcttcagctccagctccaggtcgggctccagctccagccgcagcttaggcagcggaggttctgtgtcccagttgttttccaatttcaccggctccgtggatgaccgtgggacctgccagtgctctgtttccctgccagacaccacctttcccgtggacagagtggaacgcttggaattcacagctcatgttctttctcagaagtttgagaaagaactttccaaagtgagggaatatgtccaattaattagtgtgtatgaaaagaaactgttaaacctaactgtccgaattgacatcatggagaaggataccatttcttacactgaactggacttcgagctgatcaaggtagaagtgaaggagatggaaaaactggtcatacagctgaaggagagttttggtggaagctcagaaattgttgaccagctggaggtggagataagaaatatgactctcttggtagagaagcttgagacactagacaaaaacaatgtccttgccattcgccgagaaatcgtggctctgaagaccaagctgaaagagtgtgaggcctctaaagatcaaaacacccctgtcgtccaccctcctcccactccagggagctgtggtcatggtggtgtggtgaacatcagcaaaccgtctgtggttcagctcaactggagagggttttcttatctatatggtgcttggggtagggattactctccccagcatccaaacaaaggactgtattgggtggcgccattgaatacagatgggagactgttggagtattatagactgtacaacacactggatgatttgctattgtatataaatgctcgagagttgcggatcacctatggccaaggtagtggtacagcagtttacaacaacaacatgtacgtcaacatgtacaacaccgggaatattgccagagttaacctgaccaccaacacgattgctgtgactcaaactctccctaatgctgcctataataaccgcttttcatatgctaatgttgcttggcaagatattgactttgctgtggatgagaatggattgtgggttatttattcaactgaagccagcactggtaacatggtgattagtaaactcaatgacaccacacttcaggtgctaaacacttggtataccaagcagtataaaccatctgcttctaacgccttcatggtatgtggggttctgtatgccacccgtactatgaacaccagaacagaagagattttttactattatgacacaaacacagggaaagagggcaaactagacattgtaatgcataagatgcaggaaaaagtgcagagcattaactataacccttttgaccagaaactttatgtctataacgatggttaccttctgaattatgatctttctgtcttgcagaagccccagtaagctgtttaggagttagggtgaaagagaaaatgtttgttgaaaaaatagtcttctccacttacttagatatctgcaggggtgtctaaaagtgtgttcattttgcagcaatgtttaggtgcatagttctaccacactagagatctaggacatttgtcttgatttggtgagttctcttgggaatcatctgcctcttcaggcgcattttgcaataaagtctgtctagggtgggattgtcagaggtctaggggcactgtgggcctagtgaagcctactgtgaggaggcttcactagaagccttaaattaggaattaaggaacttaaaactcagtatggcgtctagggattctttgtacaggaaatattgcccaatgactagtcctcatccatgtagcaccactaattcttccatgcctggaagaaacctggggacttagttaggtagattaatatctggagctcctcgagggaccaaatctccaacttttttttcccctcactagcacctggaatgatgctttgtatgtggcagataagtaaatttggcatgcttatatattctacatctgtaaagtgctgagttttatggagagaggcctttttatgcattaaattgtacatggcaaataaatcccagaaggatctgtagatgaggcacctgctttttcttttctctcattgtccaccttactaaaagtcagtagaatcttctacctcataacttccttccaaaggcagctcagaagattagaaccagacttactaaccaattccaccccccaccaacccccttctactgcctactttaaaaaaattaatagttttctatggaactgatctaagattagaaaaattaattttctttaatttcattatgaacttttatttacatgactctaagactataagaaaatctgatggcagtgacaaagtgctagcatttattgttatctaataaagaccttggagcatatgtgcaacttatgagtgtatcagttgttgcatgtaatttttgcctttgtttaagcctggaacttgtaagaaaatgaaaatttaatttttttttctaggacgagctatagaaaagctattgagagtatctagttaatcagtgcagtagttggaaaccttgctggtgtatgtgatgtgcttctgtgcttttgaatgactttatcatctagtctttgtctatttttcctttgatgttcaagtcctagtctataggattggcagtttaaatgctttactcccccttttaaaataaatgattaaaatgtgctttgaaaaaaaaaaaaaaaaaaaaaaaaaaaaaaa

SEQ ID NO: 2958 - DNA, 7212 bp, Homo Sapiens
  NM_006421
gcggtgcctctgagagccgccgccacctcgtccctcagttcccggcagacagccgcccgggccgggctccctcaccgccaccagggccggagggacgagtgagaggggcggccgggacgcgacccccgggccgggagaagcggaggcccgacgggcgcggccctcgaggtacggcttcttgggggcggcgaggacctcgacgcccttcgccgacaccgcggctggtcccgctcgcccgccccttcctgatcctgccgctgccctccacgcctccaatcccccacctccaccccctctcctttctctcttctcttccttcctctcctcctcctcccctccagccgctgggagccgcgggtcggacgagccgccgcctccttctctgcgtccatgtatgaggggaagaagacgaagaacatgttcctgacccgggctctggagaagatattggccgacaaggaagtgaagaaggcgcatcactcccagctgcgcaaagcttgcgaggtggcgttagaggaaataaaagcggaaactgaaaaacagagtcctcctcatggagaagcaaaagctggatcaagcacccttccaccagtgaaatcaaagacaaattttattgaagcagacaagtacttcttgccttttgagttggcatgccagtccaaatgtcctcgcatagttagtacatctctagattgcttacagaaacttattgcttatgggcacttgactggcaatgctccagatagtacaacaccaggcaaaaaattaattgatagaattattgaaacaatatgtggctgctttcagggccctcagacagatgaaggagttcagctgcagataataaaggctttacttactgcagtaacatcacaacacatagaaattcatgaagggactgtactgcaagctgtgagaacatgttacaatatctacttagcaagcaaaaatctcatcaatcagacaacagccaaagctactctcactcagatgctaaatgttatctttgcacgcatggaaaaccaagcattacaggaagcaaaacaaatggaaaaagaaaggcatcggcagcatcatcatctgttacagtctccagtaagccatcacgagcctgaatcacctcaacttagatatttgccacctcagactgttgatcatatatcccaagaacacgaaggggaccttgacctccatacaaatgatgtagataaaagtcttcaggatgacacagagcctgaaaatggatctgatatttccagtgcagaaaatgaacagactgaagctgatcaggcaactgcagctgaaacattatctaaaaatgaagtgttatatgacggagaaaaccatgattgtgaggaaaagccacaagacattgtacagaacattgtagaagaaatggtgaacattgttgttggagatatgggagaagggactactataaatgcaagtgcagatggcaacattggaactatagaggatggtagtgacagtgaaaatattcaagcaaatggaattccaggaacaccaatttctgttgcatatacaccatccttacctgatgatagattgtcagtctcttccaatgatactcaggaatctggaaattcttcaggaccttcacctggtgctaagttttcccacattttacaaaaggatgcctttctagtattcaggtcattgtgtaaactgtcaatgaaaccactgtcagatggaccaccagatccaaagtctcatgaactacgatccaagattctttcattgcagttacttctatccattctgcagaatgcaggacctattttcaggacaaatgagatgtttattaatgctattaagcagtatctttgtgttgcactctcaaaaaatggagtctcatctgttccagaggtttttgagctttctctttctatatttcttactttgttgtcaaatttcaagacacatctgaagatgcaaattgaggtgttctttaaagaaattttcttatacattttggaaacttctaccagctcatttgatcacaaatggatggttattcagacactgacgaggatttgtgcagatgctcagagtgtagtggatatttatgtaaactatgactgtgacttaaatgcagccaatatatttgaaagactagtaaatgatctatcaaaaattgctcaaggaaggggcagtcaagaacttggtatgagtaatgttcaggaattgagcctgaggaaaaaaggtttagaatgcttagtgtcgattttgaagtgtatggttgaatggagtaaggatcagtatgtgaatcccaactcccagacaactcttggtcaggaaaaaccctcagagcaagagatgagtgaaatcaaacaccctgagacaataaacagatacggaagtttaaattccctggagtcaacatcatcatcaggaataggcagctacagtacacagatgtctggcactgataatccagaacaatttgaggtcctaaagcaacaaaaagaaataatagaacaagggatagatttatttaataagaaaccaaagagaggaatacagtacctccaagaacaagggatgcttggcaccacacctgaagatattgcccaattcttacatcaagaggaaagattagactctactcaagtgggtgagttcctgggagataatgataaatttaacaaagaagtcatgtatgcatatgtggaccaacatgacttttcaggaaaagacttcgtttcagcccttcgtatgtttctagaaggatttcgtcttccaggggaagctcagaaaatcgatcgattaatggaaaaatttgctgcaagatacctagaatgcaaccaaggacaaactctctttgctagtgcggatacagcttatgttttggcttattcaattatcatgttgaccacagaccttcacagtccacaggtgaaaaataaaatgacaaaggaacaatacattaagatgaatagaggtatcaatgacagtaaagaccttcctgaagagtatctatcagccatctataatgaaatagctgggaaaaagatatcaatgaaagaaacaaaagaactaacaatccctacaaaatcaagtaaacagaatgtagccagtgaaaaacaaagaagacttctgtataacttagaaatggagcagatggccaagacagctaaagcactcatggaggccgtgagccatgttcaggcaccctttacaagtgcaacacatttggagcatgtgaggcccatgtttaagttggcttggacgccttttctggctgcattcagtgtgggtctacaagattgtgatgatactgaagtagcctctctttgcctggaaggtataagatgtgcaatcagaattgcatgcattttcagcattcagctggagagagatgcatatgtccaggcactagcaagatttaccttactcacagtgagttccggtattactgaaatgaaacagaagaacattgacacaataaaaacacttatcacagtggctcatacagatggaaattatttaggaaattcatggcatgagattctgaagtgcatcagtcagttggagctggcacagcttataggaactggagtgaaacctcgatacatttctggaacagtgcgaggcagagaaggatctcttactggaacaaaagatcaggctcctgatgaatttgtgggtttagggctagttggaggaaatgtggactggaaacagatagcaagtattcaggaatccattggagaaaccagttctcagagtgttgttgttgctgtagatagaatattcacaggatctacaaggctagatggaaatgccattgtggattttgtccgttggctctgtgctgtgtctatggatgaattactttccacgacacacccaagaatgtttagtctacaaaaaatagtagaaatatcatattacaacatgggaagaataagattacagtggtctcgaatttgggaagttattggagatcattttaataaggttgggtgtaatcctaatgaagatgtagctatttttgcagtagactccttgaggcagttgtcaatgaagttcttagagaaaggggagcttgctaacttcagattccagaaggatttcttaagaccttttgaacatataatgaaacggaacaggtctccaacaattcgagatatggttgtacggtgtatagcacagatggttaattctcaagctgctaacattcgatctggatggaagaacattttctctgtatttcatctagctgcatctgatcaagatgaaagcatagtggaacttgcattccaaacaaccgggcacattgtcacccttgtatttgaaaaacactttccagcgaccattgattctttccaggatgcagtgaagtgtttgtctgaatttgcgtgcaatgcagctttcccagacacaagtatggaagcaattcgacttattcgccattgtgcaaaatatgtgtctgatagacctcaggctttcaaggaatacacaagcgatgatatgaacgtagcacctgaagacagggtgtgggtgagaggatggttcccaattctctttgagttatcctgtatcatcaatagatgcaaattagatgtaagaaccaggggtttaacagtaatgtttgaaataatgaaaacatatggccacacttatgagaaacactggtggcaggatttatttagaattgttttcagaatctttgacaatatgaaattgccagaacaacagacagagaaagctgaatggatgacaacaacttgcaatcatgcactttatgcaatctgtgatgtattcactcagtatttagaagtactcagtgatgtacttttggatgacatttttgctcagctctactggtgtgtgcagcaagacaatgagcagttagcgcgatctggtacaaactgtttagagaatgttgttattctgaatggtgaaaaatttaccctagaaatctgggataaaacttgcaactgcacactggatatcttcaaaaccacaatcccacatgcgctgttgacctggcgacccaattctggagaaactgcccccccacctccatctcctgtaagtgaaaagccattggatacaatatcacagaagtctgtagatattcatgattctattcaaccaaggtctgtggataacagaccacaagcaccactggtttctgcgtctgctgttaatgaagaagtcagcaaaattaaatctacagcaaaatttccagaacaaaaattgtttgctgccctgttgattaaatgtgttgtgcagctggaactcatccagactatcgacaacattgtcttcttcccagccacaagtaagaaagaagatgcagaaaacttagctgcagcacagagagatgcggtggactttgatgttcgcgttgatactcaagaccaaggaatgtaccgctttttaacatcacaacaactttttaagctactggactgcttattagagtcacatagatttgcaaaagcgtttaattccaacaacgaacagaggactgccctgtggaaagcaggattcaaaggcaaatccaagcccaaccttctgaagcaggagaccagcagcctggcctgtgggctgcgcattctcttccggatgtacatggatgagagccgcgttagtgcctgggaggaggtccagcagaggcttttgaatgtctgcagtgaagcactaagttacttcctcactctaacatcagaaagtcatcgagaagcctggactaacttactgcttttgtttctaactaaagttctaaagataagtgataataggtttaaagctcatgcatcattctactaccctctcttatgtgaaattatgcaatttgacttgattcctgaacttcgtgctgttcttagaagattttttctgcgaatcggagtagtttttcagatatcacaaccacctgaacaggaacttggaataaacaagcaatgatgggaacttaatatttttgttggcatttacatccctctgctctttaaaaggacgctggagctgaggtttcctacctgaaaaatgatttctctggattgcagtgtctgagttactggtaaagatgcttagaagtcttactcaaacttgcaacactccagtcccttttagtgctggtggattttgtgtgttatattggcctcatgttgagcagaaagcctgtttaaacagtgtcagctcatgctcacgggtccttccctgtcttccacggcaggaaaagccccacgtttttggcaggtgtggaagtgaaacttacccaaagaactatagatgtaaagattgaacttctacaagaagtacaactcaggagagctgtattttgaaggataaaatgtttataattggggagtggggagagaagaagaaattattgttcatggtaaaagatatttagcaactatggtattcttattctgaagatttttgcacactcaggctatctgagatactggtaatcatcctgtgaaaaatgtacagagatgcaggtctgtaatataaaaatcttaaaacattatatagttcttcctgcactgttttctttattttcttattcatttgctaaatacccataatattttgtcaaatgcactaaacatttgggtggaactttcttttttattttatagggatttttagttttgccctttttggtaggtggtgattttgaggctgtaacatgcccagaagctgttgtggccgacacttcaacaatagggaaaaaaaggtagaaaatatccctactgacagtaactacctgtcacatatttctcttaggacttttaaagatgagccattaaaatagaatgatcctttatggaccaaaacttgaatcactgcaaaatgaatccagattgctgtcattttcttttcttttgggtggtggggcttgatgtagattttactctatgtacagaatttaacgttgaatatattaaaataacaaatctggcatggtttgcggaggttagatttactggaaatgtattcatactgtgaattgtgctctgatggttaaaagacaagattgtcaagcattccgtattaacagtggatgtagaaaattttttcagatggacaaaatgtatatggtacagatgtaaagttttctatgtaaaaaattctgtacaactttctgtacaatattgattcccatctggcatattctaatcaggttataggtcaataaagtttttgaattatttcatcagtgcaatc

SEQ ID NO: 2959 - DNA, 821 bp, Homo Sapiens
  NM_006423
gggtggggccggcgtcgggcggggccggcggggtcttcagggtaccgggctggttacagcagctctacccctcacgacgcagacatggcagcgcagaaggaccagcagaaagatgccgaggcggaagggctgagcggcacgaccctgctgccgaagctgattccctccggtgcaggccgggagtggctggagcggcgccgcgcgaccatccggccctggagcaccttcgtggaccagcagcgcttctcacggccccgcaacctgggagagctgtgccagcgcctcgtacgcaacgtggagtactaccagagcaactatgtgttcgtgttcctgggcctcatcctgtactgtgtggtgacgtcccctatgttgctggtggctctggctgtctttttcggcgcctgttacattctctatctgcgcaccttggagtccaagcttgtgctctttggccgagaggtgagcccagcgcatcagtatgctctggctggaggcatctccttccccttcttctggctggctggtgcgggctcggccgtcttctgggtgctgggagccaccctggtggtcatcggctcccacgctgccttccaccagattgaggctgtggacggggaggagctgcagatggaacccgtgtgaggtgtcttctgggacctgccggcctcccgggccagctgccccacccctgcccatgcctgtcctgcacggctctgctgctcgggcccacagcgccgtcccatcacaagcccggggagggatcccgcctttgaaaataaagctgttatgggtgtcattcaggaaataaaaaaaaaaaaaaa

SEQ ID NO: 2960 - DNA, 3570 bp, Homo Sapiens
  NM_006425
aggaaattagtgcgcatgtgccggtcatccggaagttaccgcagtggccgccggaattaggcgaaaagccggaagtaaacattacgagattggcttggattctgtcggatggacttggggctagctgcggcggggctggaggaggccagataaccatgtcagccacagttgtagatgcagttaatgctgcacccctatcggggtccaaagaaatgagtttggaagaaccaaagaagatgaccagagaggactggagaaagaagaaggagctagaagaacagcgaaaattgggcaatgctcctgcagaagttgatgaagaaggaaaagacatcaacccccatattcctcagtatatttcttcagtgccatggtatattgatccttcaaaaagacctactttaaaacaccagagaccacaaccagaaaaacaaaagcagttcagctcatctggagaatggtacaagaggggtgtaaaagagaattccataattactaagtaccgcaaaggagcatgtgaaaattgtggggccatgacacacaaaaagaaagactgctttgagagacctaggcgagttggagccaaatttacaggtactaatatagctccagatgaacatgtccagcctcaactgatgtttgactatgatgggaagagggatcggtggaatggctacaatccagaagaacacatgaaaattgttgaagagtatgccaaagttgatttggcaaaacgaacattgaaagcccagaaactccaagaggaattagcctcaggaaaattagtggaacaggctaattctccaaaacaccagtggggagaagaggaaccaaattctcagatggaaaaagatcataatagtgaagatgaggatgaagataaatatgcagatgatattgacatgcctggacagaattttgactccaagagacgaattactgtccggaatctcaggattcgagaagatattgcaaaatatttgaggaatttagatccaaattctgcctactatgatccaaaaactagagcaatgagagagaatccttatgccaatgcaggaaagaatccagatgaagtgagttatgctggagataactttgttaggtacacaggagataccatttcaatggctcagacacagttgtttgcatgggaagcctatgacaagggatctgaagtgcatctacaggcagatcctacaaagctagagctgttgtataagtccttcaaagtcaaaaaagaagatttcaaagaacagcagaaagaaagcatcctggaaaagtatggtggccaagaacatttggatgcccctccagctgaattgcttttagcccagactgaagactatgtggagtactcaagacatgggacagtcatcaaaggacaggagcgggctgttgcctgctctaagtatgaggaggatgtgaagatccacaatcacacacatatctggggatcgtactggaaagaaggccgatggggatacaaatgctgtcactcttttttcaagtattcctattgtactggagaagctgggaaggagattgttaactctgaggagtgtattataaatgagataactggggaagaatctgtgaaaaaacctcaaaccctcatggagctgcatcaagaaaaactgaaagaggaaaagaagaagaagaaaaagaaaaagaagaagcatcgaaagagcagttcagatagtgatgatgaagaaaagaagcatgaaaaattgaaaaaggcactgaacgcagaggaggcccgccttcttcatgtcaaggagaccatgcagattgatgagaggaagcggccttacaatagcatgtatgaaactcgagaacctactgaagaggaaatggaggcatatagaatgaaacgtcagaggccagatgaccccatggcctctttccttggacagtagcaactagtcagaagaccatccaagatagatgcagctgatacattcttttcagcttcttattgatgattgtagatagaaaaatccttgtttattcttcttgctgcctggctttaataaatatttcagatgcctcacagtaagttcactcctttccatactgaggaaacaagaaaagaagaagaggcacatgaagtgtgcttttgggaatagaatttaaaattggattaagattttatttccagttttttttatttatttatttttttttttgagacggagtcttgctctgtcgcccaggctgaagtgcggtggcgcgatctcggctcactgcaagctccacctcccaggttcacgccattctcctgcctcagcctccctagtagttgggactacaggcgcccgccaccatgctcagctaattttttgtatttttagtagagacggtttcatcgtgttagccaggatggtctcgatctcctgaccttgtgatccacccgcctcagcctcccaaagtgctgagattacaggcgtgagccaccgcgcctggcctatttccagttttatgtgagtcatgtaaaaaagccttggctctctacctattaagaatgtctctttctctgtatttattaagcttcaaactttattgcttcgatttttgtggccctatatttagtattagcacaccttggttttgagaaaaaaacagggctttgtttttttaaataattactagcaactctgtgactacatttatttttattttttttagagacaggatcttgctatgttgcccaggctagagagcagtggcttttcacagacaaagtcataatgccctgcagtcttgggctcaagcgattctctcttccttggcctctggagtagactaaatgtgttagtctttgaatggaaaacaactattttctcatcattgggtcaatattgactgatcagtagtaggtcttttaccattctggacataagtctaggtgtagaaatcctttcctttatcatagaggatatggtttacattaccgtttgttttcattgtgattgcccctatgtaacaatcatgaatattagattttttaaattgtagaatatcctaatatttatagccagcagctgttactttgtttgtaaaatttgcaaaaaaacaaaacctgaagttggtttattgaaagaattataaggatagcttctagggatattagtaatagattgccatgatcctgaagcctcttctcagaacactgtgaagataatactgacagtagaatcagtgaaaacagcctaacaaaacctctgacatcagtatatcaacttttaacagcccactcactggcttttctaaactaccaaaaaccacctgtaggatactgcattaagtcagcatctcagaaacagtggtgtgagtaactgagtcaaattgtcaagtactttggatatacatagtgtcgagctttagattggtatgaaattaaacagcaatgcaaatagatttaattcctatttactttaagaatgaaaaacaatgttcattttcctacctaaacagggtggttcaacataaaggctgatgttgtgtccgttttgtattttatcttttgttaaagatacataaatgacaatacttaactgtgaaaaaaaaaaa

SEQ ID NO: 2961 - DNA, 2732 bp, Homo Sapiens
  NM_006426
ggcgggaccggaacggagccgtgcggccccgcgcgctcgcagtctgtctcccgccgtccccacgcacgcgtcccggctcacgcgtccccccgcccgcccgcccgcccgcccgcccccgcttgtgccgcccctaccagagacccccaggagcaggatgtccttccagggcaagaaaagcatcccccggatcacgagtgaccgccttctgatcagaggtgggaggatcgtgaatgacgaccagtccttttacgctgatgtgcacgtggaagatggcttgataaaacaaatcggagaaaacctcatcgtccctgggggcatcaagaccattgacgcccacggcctgatggtccttcctggtggcgttgacgtccacacaaggctgcagatgcctgtcctgggcatgacaccggctgacgacttctgtcagggcaccaaggcagcgctagcaggaggaaccaccatgatcttggaccacgtcttccccgacacgggtgtgagcctgctggcggcctacgagcagtggcgggagcgggcggacagcgcggcctgctgcgactactccctgcacgtggacatcacccgatggcatgagagcatcaaggaggagctggaggccctggtcaaggagaagggtgtgaactccttcctggtcttcatggcatacaaggaccggtgccagtgcagcgacagccagatgtacgagatcttcagcatcatccgggacctgggggccttggcccaggtgcacgctgagaacggggacatcgtggaggaggagcagaagcggttgctggagctcggcatcactggccccgagggccacgtgctcagccaccccgaggaggtggaggctgaggcggtgtaccgagctgtcaccatcgccaagcaggcaaactgcccgctgtacgtcaccaaggtgatgagcaagggggcggccgacgccatcgctcaggccaagcgcagaggggtggtcgtgtttggggagcccatcaccgccagcctgggcaccgacggttcacactactggagcaagaactgggccaaggccgcagccttcgtcacatcaccccctgtcaacccagaccccaccacggcggaccacctcacctgcttgctgtccagcggggacctccaggtgacaggcagcgcccactgcaccttcaccactgcccagaaggctgtgggcaaggacaacttcgcgctgatccccgagggcaccaacggcattgaggagcgcatgtcgatggtctgggagaaatgtgtggcctctgggaagatggacgagaatgagttcgtcgcggtgaccagtacaaatgctgccaaaatcttcaatttttacccaaggaaggggcgagtggctgtgggctctgacgctgacctggtcatatggaaccccaaggccaccaagatcatctctgccaagacccacaatctgaacgtggagtacaacatcttcgagggagtggagtgccggggagcgcctgccgtggtcataagtcagggccgagtggcgctggaggacgggaagatgtttgtcaccccgggggcgggccgcttcgtccctcggaaaacattcccggactttgtctacaagaggatcaaagctcgcaacaggctggcggagatccacggtgtgccccgtggactgtatgacgggcccgtccacgaggtgatggtgcctgccaagccagggagtggcgctccggcccgcgcgtcctgcccaggcaagatctccgtccctcctgtgcgcaacctacatcagtcggggttcagcctatctgggtctcaggctgatgaccacatcgcccgacgcacagcacagaagatcatggcaccacctggcggccgctccaacatcacctctctctcctagacgcccaggaccggccctgtgagccgtgctggccccacccgaggccgcgggggccccagggcactcgcccccctccttagcattttcttttgtagaagtttctcgaaggtgcttggcggtcttgccttccccctccccacaggctctccttgtggggtcccaggtcctgctgccaagagcccctcaagagaagggctgaacctggggagatgtcactgccagggtgaggtggagccacatggcagggacaatgccggcagcctgagcccaggcaccccagtgcccgctgggcccagcctggggacagggaacctgccgggctcacagtgtgggagcagctggacaccaggcttcttggtgaaccggcgaggggccgagtcccgcctggtgggcatttgccgccgcctccccaccaccagtcactgcctcgcagagccctacactcccgcagccgctcctcagaggcctgtgcccatcgcaggcctgggaggaaagtgggcgcagagccctcctgctcacacagctgctgagacttcagggacccatcagaacttggtgcagcacagccccgcccgtggagggtcccttttacgcaccccaaggcccacacctaagcttccatgtagccctcatccagggaagttttgcgatcctttaggaagacactgtcctcttattacagattgtgtatttccgtaggcttcttagtagcagctttgtacactgaggacactgtagccaggaacctgtgcatgccacccaccgcctggacaggcagtcatcctgcctctgatgtgaatcaggcccattaaagacgtctgggtttgaagccgcctgtgcatggaaaaaaaaaaaaaaa

SEQ ID NO: 2962 - DNA, 790 bp, Homo Sapiens
  NM_006427
tgtgacgtcacggcgtcgttggtaaggggctggcggccggggagctgcgtagctcccggccccgcggccatgcccaagcggagctgccccttcgcggacgtggccccgctacagctcaaggtccgcgtgagccagagggagttgagccgcggcgtgtgcgccgagcgctactcgcaggaggtcttcgagaagaccaagcgactcctgttcctcggggcccaggcctacctggaccacgtgtgggatgaaggctgtgccgtcgttcacctgccagagtccccaaagcctggccctacaggggccccgagggctgcacgtgggcagatgctgattggaccagacggccgcctgatcaggagccttgggcaggcctccgaagctgacccatctggggtagcgtccattgcctgttcctcatgcgtgcgagccgtggatgggaaggcggtctgcggtcagtgtgagcgagccctgtgcgggcagtgtgtgcgcacctgctggggctgcggctccgtggcctgtaccctgtgtggcctcgtggactgcagtgacatgtacgagaaagtgctgtgcaccagctgtgccatgttcgagacctgaggctggctcaagccggctgccttcaccgggagccacgccgtgcatggcagccttccctggacgagcgctcggtgttcacactgaactgtggggtcgacgggaggggtgccttttacatgttctattttgtatcctaatgacagaatgaataaacctctttatatttgcacaagaaaaaaaaaaaaaaaaaaaa

SEQ ID NO: 2963 - DNA, 1161 bp, Homo Sapiens
  NM_006428
agtcagcggtgggaggagggccaggcgcggcagatcggcttccggttccggtgggctctgaaccctgaaaggctcgcgatgcctctacacaagtatcccgtgtggctctggaagcggctgcagctgcgggagggcatctgttcccgcctgcccggccactacctgcgctccctggaggaggagcggacgcccactcccgtgcactataggcctcatggggccaagttcaagatcaaccccaagaacgggcagcgggagcgtgtggaggacgtgcccattcccatctactttccccccgaatcccagcgggggttgtggggcggcgagggctggatcctgggccaaatatatgccaacaacgacaagctctccaagaggctgaagaaagtgtggaagccacagctgtttgagcgagagttctacagtgagatcctggacaagaagttcacagtgactgtgaccatgcggaccctggacctcatcgatgaggcttatgggctcgacttttacatcctcaagaccccgaaggaggacctgtgctccaagtttgggatggacctgaagcgagggatgctgctgcggcttgcccggcaggacccccagctgcaccccgaggaccccgagcggcgggcagccatctacgacaagtacaaggaatttgccatcccagaggaggaggcagagtgggtgggcctcacgctggaggaggccattgagaagcagagacttttggaggagaaggaccctgtacccctgttcaagatctatgtggcggagctgatccagcagctgcagcagcaggcactgtcagagccggcggtggtgcagaagagagccagtggccagtgaccacacagctcctccatgcctgaccaacaggcccagctttccctgccaggccctttgcactgaggacacagatcccggggagctgtgagggccaccggtgggcagtgggtggatcctggtttcgtgtgctgcccatgcaccttccagcccggggccagcttggcagggatccccaggaggcctgggccgcccagaggctcctctcaggctgggccccgacgtttgcggcagtgttccttgtgcccgtggggccgggagcgagtaaagtctgggccaggctgtgtgtgtgtaaaaaaaaaaaaaaaaaaaaaa

SEQ ID NO: 2964 - DNA, 1948 bp, Homo Sapiens
  NM_006429
atagagtagcggaagtggtccgttctcttcctctcccggcccaagcttctgggtatttctattgcgcgaggcattgtgggttgctgggcggcccggtctcggagaagaggggagagtggcgggccgctgaataagcttccaaaatgatgcccacaccagttatcctattgaaagaggggactgatagctcccaaggcatcccccagcttgtgagtaacatcagtgcctgccaggtgattgctgaggctgtaagaactaccctgggtccccgtggcatggacaagcttattgtagatggcagaggcaaagcaacaatttctaatgatggggccacaattctgaaacttcttgatgttgtccatcctgcagcaaagactttggtagacattgccaaatcccaagatgctgaggtgggtgatggcaccacctcagtgaccttgctggctgcagagtttctgaagcaggtgaaaccctatgtggaggaaggtttacacccccagatcatcattcgagctttccgcacagccacccagctggcagttaacaagatcaaagagattgctgtgaccgtgaagaaggcagataaagtggagcagaggaagctgctggaaaagtgtgccatgaccgctctgagctccaagctgatctcccagcagaaagctttctttgctaagatggtggtggatgcagtgatgatgctcgatgatttgctgcagcttaaaatgattggaatcaagaaggtacagggtggagccctcgaggattctcagctggtagctggtgttgcattcaagaagactttctcttacgctgggtttgaaatgcaacccaaaaagtaccacaatcccaagattgcccttttgaatgtcgagctcgagttgaaagctgagaaagacaatgctgagataagagtccacacagttgaggattatcaggcaattgttgatgctgagtggaacattctctatgacaagttagagaagatccatcattctggagccaaagttgtcttgtccaaactccccattggggatgtggccacccagtactttgctgacagggacatgttctgtgctggccgagtacctgaggaggatctgaagaggacaatgatggcctgtggaggctcaatccagaccagtgtgaatgctctgtcagcagatgtgctgggtcgatgccaggtgtttgaagagacccagattggaggcgagaggtacaatttttttactggctgccccaaggccaagacatgcaccttcattctccgtggcggcgccgagcagtttatggaggagacagagcggtccctgcatgatgccatcatgatcgtcaggagggccatcaagaatgattcagtggtggctggtggcggggccattgagatggaactctccaagtacctgcgggattactcaaggactattccaggaaaacagcagctgttgattggggcatatgccaaggccttggagattatcccacgccagctgtgtgacaatgctggctttgatgccacaaacattctcaacaagctgcgggctcggcatgcccaggggggtacatggtatggagtagacatcaacaacgaggacattgctgacaactttgaagctttcgtgtgggagccagctatggtgcggatcaatgcgctgacagcagcctctgaggctgcgtgcctgatcgtgtctgtagatgaaaccatcaagaacccccgctcgactgtggatgctcccacagcagcaggccggggccgtggtcgtggccgcccccactgagaggcaccccacccatcacatggctggctggctgctgggtgcacttaccctccttggcttggttacttcattttacaaggaaggggtagtaattggcccactctcttcttactggaggctatttaaataaaatgtaagacttcagataactttgtaaattaaaaaaaaaaaaa

SEQ ID NO: 2965 - DNA, 2349 bp, Homo Sapiens
  NM_006430
cttctccgcctccgcctcctcccgacgccggcgccgctttctggaaggttcgtgaaggcagtgagggcttaccgttattacactgcggccggccagaatccgggtccatccgtccttcccgagccaacccagacacagcggagtttgccatgcccgagaatgtggcaccccggagcggggcgactgccggggctgccggcggccgcgggaaaggcgcctatcaggaccgcgacaagccagcccagatccgcttcagcaacatttccgccgccaaagcggttgctgatgctattagaacaagccttggaccaaaaggaatggataaaatgattcaagatggaaaaggtgatgtaaccattacaaatgatggtgctaccattctgaaacaaatgcaagtattacatccagcagccagaatgctggtggagctgtctaaggctcaagatatagaagcaggagatggcaccacatcagtagtcatcattgctggctccctcttagattcttgtaccaagcttcttcagaaagggattcatccaaccatcatttctgagtcattccagaaggccctggaaaagggcattgaaatcttgactgacatgtctcgacctgtggaactgagtgacagagaaactttgttaaatagtgcaaccacttcactgaactcaaaggtggtttctcagtattcaagtctgctttctccaatgagtgtaaatgcagtgatgaaagtgattgacccagccacagccaccagtgtagatcttagagatattaaaatagttaagaagcttggtgggacaattgatgactgtgagttggtggaagggctggttctcacccaaaaagtgtcaaattctggcataaccagagttgaaaaggccaagattgggcttattcagttttgcttatctgctcccaaaacagacatggataatcaaatagtggtttctgactatgcccagatggaccgagtgctgcgagaagagagagcctatattttaaatttagtgaagcaaattaaaaaaacaggatgtaatgtccttctcatacagaaatctattctaagagatgctcttagtgatcttgcattacactttctgaataaaatgaagatcatggtgattaaggatattgaaagagaagacattgaattcatttgtaagacaattggaaccaagccagttgctcatattgaccaatttactgctgacatgctgggttctgctgagttagctgaggaggtcaatttaaatggttctggcaaactgctcaagattacaggctgtgccagccctggaaaaacagttacaattgttgttcgtggttctaacaaactggtgattgaagaagctgagcgctccattcatgatgccctatgtgttattcgttgtttagtgaagaagagggctcttattgcaggaggtggtgctccagaaatagagttggccctacgattaactgaatattcacgaacactgagtggtatggaatcctactgcgttcgtgcttttgcagatgctatggaggtcattccatctacactagctgaaaatgccggcctgaatcccatttctacagtaacagaactaagaaaccggcatgcccagggagaaaaaactgcaggcattaatgtccgaaagggtggtatttccaacattttggaggaactggttgtccagcctctgttggtatcagtcagtgctctgactcttgcaactgaaactgttcggagcattctgaaaatagatgatgtggtaaacactcgataatctggataactgactagcaccattatgatcaccagtattgtggctggaatggaagaagatcaccttggtgttccttgtttggaagattatttcctctgaatttctgggcttggtcttccagttggcatttgcctgaagttgtattgaaacaatttaatgaaaatattaaatatttggtttcaaaaggcagatttatcttctcccaacattctgttatttctgatacttttgaaaaactaataaaaactaataaaagaagcgtaaaaagtgagtttacatgttgaggaaaaaaatggcccaatatgctcatcactgataaatgctccctggccttaaaaactaccaacatataatatatatgctgtcttaaaagttaatgatccaagtggcacctctctgaacctactttggcttgggaggctgcccagttaaaacaaaaataagttaatggtacagaaagagaatgaaaaatgaaagcctccttttatcctatcatcctaattccttttcccagtaataatgactgctgtgttggattccttctgcaaataaaagtgtatacataaaaaaaaaaaaaaaa

SEQ ID NO: 2966 - DNA, 1962 bp, Homo Sapiens
  NM_006431
agggcgtgtggcgtcacttccggcttccttcagtccgctggtcccgagcacgagctgtgaggggattcacttgtgtgcggaactcctcggaaccatggcgtccctttcccttgcacctgttaacatctttaaggcaggagctgatgaagagagagcagagacagctcgtctgacttcttttattggtgccatcgccattggagacttggtaaagagcaccttgggacccaaaggcatggacaaaattcttctaagcagtggacgagatgcctctcttatggtaaccaatgatggtgccactattctaaaaaacattggtgttgacaatccagcagctaaagttttagttgatatgtcaagggttcaagatgatgaagttggtgatggcactacctctgttaccgttttagcagcagaattattaagggaagcagaatctttaattgcaaaaaagattcatccacagaccatcatagcgggttggagagaagccacgaaggctgcaagagaggcgctgttgagttctgcagttgatcatggttccgatgaagttaaattccgtcaagatttaatgaatattgcgggcacaacattatcctcaaaacttcttactcatcacaaagaccactttacaaagttagctgtagaagcagttctcagactgaaaggctctggcaacctggaggcaattcatattatcaagaagctaggaggaagtttggcagattcctatttagatgaaggcttcctgttggataaaaaaattggagtaaatcaaccaaaacgaattgaaaatgctaaaattcttattgcaaatactggtatggatacagacaaaataaagatatttggttcccgggtaagagttgactctacagcaaaggttgcagaaatagaacatgcggaaaaggaaaaaatgaaggagaaagttgaacgtattcttaagcatggaataaattgctttattaacaggcaattaatttataattatcctgaacagctctttggtgctgctggtgtcatggctattgagcatgcagattttgcaggtgtggaacgcctagctcttgtcacaggtggtgaaattgcctctacctttgatcacccagaactggtgaagcttggaagttgcaaacttatcgaggaagtcatgattggagaagacaaactcattcacttttctggggttgcccttggtgaggcttgtaccattgttttgcgtggtgccactcaacaaattttagatgaagcagaaagatcattgcatgatgctctttgtgttcttgcgcaaactgtaaaggactctagaacagtttatggaggaggctgttctgagatgttgatggctcatgctgtgacacagcttgccaatagaacaccaggcaaagaagctgttgcaatggagtcttatgctaaagcactgagaatgttgccaaccatcatagctgacaatgcaggctatgacagtgcagacctggtggcacagctcagggctgctcacagtgaaggcaataccactgctggattggatatgagggaaggcaccattggagatatggctatcctgggtataacagaaagttttcaagtgaagcgacaggttcttctgagtgcagctgaagcagcagaggtgattctgcgtgtggacaacatcatcaaagcggcacccaggaaacgtgtccctgatcaccacccctgttaagcattcccacgtgctgtcgatctttggaccagtttctagcaaagttgtgtttgaaagatactctattaaagaagactgtggaatctgtttatcggtgcccattatatccttaagtttggatatttagctgaccttcgctttaacataggtctaatttatttgccgtgtcattttccatacaaatcagttgatttaaaaaagttcatttctcatactgtgcattaaaataaaaatttgaacaattacttggttaaaaaaaa

SEQ ID NO: 2967 - DNA, 921 bp, Homo Sapiens
  NM_006432
gacaggtcgcctgactgggctcctccccgggcccgccccgacaggtttgtcttgtgaccgcgggcggccgctgcttctttcccgagcttggaacttcgttatccgcgatgcgtttcctggcagctacattcctgctcctggcgctcagcaccgctgcccaggccgaaccggtgcagttcaaggactgcggttctgtggatggagttataaaggaagtgaatgtgagcccatgccccacccaaccctgccagctgagcaaaggacagtcttacagcgtcaatgtcaccttcaccagcaatattcagtctaaaagcagcaaggccgtggtgcatggcatcctgatgggcgtcccagttccctttcccattcctgagcctgatggttgtaagagtggaattaactgccctatccaaaaagacaagacctatagctacctgaataaactaccagtgaaaagcgaatatccctctataaaactggtggtggagtggcaacttcaggatgacaaaaaccaaagtctcttctgctgggaaatcccagtacagatcgtttctcatctctaagtgcctcattgagttcggtgcatctggccaatgagtctgctgagactcttgacagcacctccagctctgctgcttcaacaacagtgacttgctctccaatggtatccagtgattcgttgaagaggaggtgctctgtagcagaaactgagctccgggtggctggttctcagtggttgtctcatgtctctttttctgtcttaggtggtttcattaaatgcagcacttggttagcagatgtttaattttttttttaacaacattaacttgtggcctctttctacacctggaaatttactcttgaataaataaaaactcgtttgtcttgtcttctgcaaaaaaaaaaaaaaaaaaaaaaaaa

SEQ ID NO: 2968 - DNA, 751 bp, Homo Sapiens
  NM_006433
gtatctgtggtaaacccagtgacacgggggagatgacatacaaaaagggcaggacctgagaaagattaagctgcaggctccctgcccataaaacagggtgtgaaaggcatctcagcggctgccccaccatggctacctgggccctcctgctccttgcagccatgctcctgggcaacccaggtctggtcttctctcgtctgagccctgagtactacgacctggcaagagcccacctgcgtgatgaggagaaatcctgcccgtgcctggcccaggagggcccccagggtgacctgttgaccaaaacacaggagctgggccgtgactacaggacctgtctgacgatagtccaaaaactgaagaagatggtggataagcccacccagagaagtgtttccaatgctgcgacccgggtgtgtaggacggggaggtcacgatggcgcgacgtctgcagaaatttcatgaggaggtatcagtctagagttacccagggcctcgtggccggagaaactgcccagcagatctgtgaggacctcaggttgtgtataccttctacaggtcccctctgagccctctcaccttgtcctgtggaagaagcacaggctcctgtcctcagatcccgggaacctcagcaacctctgccggctcctcgcttcctcgatccagaatccactctccagtctccctcccctgactccctctgctgtcctcccctctcacgagaataaagtgtcaagcaagattttaaaaaaaa

SEQ ID NO: 2969 - DNA, 738 bp, Homo Sapiens
  NM_006435
gaggaaactgttgagaaaacggaactactggggaaagggagggctcactgagaaccatcccggtaacccgatcaccgctggtcaccatgaaccacattgtgcaaaccttctctcctgtcaacagcggccagcctcccaactacgagatgctcaaggaggagcaggaagtggctatgctgggggtgccccacaaccctgctcccccgatgtccaccgtgatccacatccgcagcgagacctccgtgcctgaccatgtggtctggtccctgttcaacaccctcttcatgaacacctgctgcctgggcttcatagcattcgcgtactccgtgaagtctagggacaggaagatggttggcgacgtgaccggggcccaggcctatgcctccaccgccaagtgcctgaacatctgggccctgattttgggcatcttcatgaccattctgctcatcatcatcccagtgttggtcgtccaggcccagcgatagatcaggaggcatcattgaggccaggagctctgcccgtgacctgtatcccacgtactctatcttccattcctcgccctgcccccagaggccaggagctctgcccttgacctgtattccacttactccaccttccattcctcgccctgtccccacagccgagtcctgcatcagccctttatcctcacacgcttttctacaatggcattcaataaagtgtatatgtttctggtgctgctgtgacttcaaaaaaaaa

SEQ ID NO: 2970 - DNA, 1964 bp, Homo Sapiens
  NM_006440
ggcagccctagctgccccagaagccccacgacgatggcggcaatggcggtggcgctgcggggattaggagggcgcttccggtggcggacgcaggccgtggcgggcggggtgcggggcgcggcgcggggcgcagcagcaggtcagcgggactatgatctcctggtggtcggcgggggatctggtggcctggcttgtgccaaggaggccgcccagctgggaaggaaggtggccgtggtggactacgtggaaccttctccccaaggcacccggtggggcctcggcggcacctgcgtcaacgtgggctgcatccccaagaagctgatgcaccaggcggcactgctgggaggcctgatccaagatgcccccaactatggctgggaggtggcccagcccgtgccgcatgactggaggaagatggcagaagctgttcaaaatcacgtgaaatccttgaactggggccaccgtgtccagcttcaggacagaaaagtcaagtactttaacatcaaagccagctttgttgacgagcacacggtttgcggcgttgccaaaggtgggaaagagattctgctgtcagccgatcacatcatcattgctactggagggcggccgagataccccacgcacatcgaaggtgccttggaatatggaatcacaagtgatgacatcttctggctgaaggaatcccctggaaaaacgttggtggtcggggccagctatgtggccctggagtgtgctggcttcctcaccgggattgggctggacaccaccatcatgatgcgcagcatccccctccgcggcttcgaccagcaaatgtcctccatggtcatagagcacatggcatctcatggcacccggttcctgaggggctgtgccccctcgcgggtcaggaggctccctgatggccagctgcaggtcacctgggaggacagcaccaccggcaaggaggacacgggcacctttgacaccgtcctgtgggccataggtcgagtcccagacaccagaagtctgaatttggagaaggctggggtagatactagccccgacactcagaagatcctggtggactcccgggaagccacctctgtgccccacatctacgccattggtgacgtggtggaggggcggcctgagctgacacccatagcgatcatggccgggaggctcctggtgcagcggctcttcggcgggtcctcagatctgatggactacgacaatgttcccacgaccgtcttcaccccgctggagtatggctgtgtggggctgtccgaggaggaggcagtggctcgccacgggcaggagcatgttgaggtctatcacgcccattataaaccactggagttcacggtggctggacgagatgcatcccagtgttatgtaaagatggtgtgcctgagggagcccccacagctggtgctgggcctgcatttccttggccccaacgcaggcgaagttactcaaggatttgctctggggatcaagtgtggggcttcctatgcgcaggtgatgcggaccgtgggtatccatcccacatgctctgaggaggtagtcaagctgcgcatctccaagcgctcaggcctggaccccacggtgacaggctgctgagggtaagcgccatccctgcaggccagggcacacggtgcgcccgccgccagctcctcggaggccagacccaggatggctgcaggccaggtttggggggcctcaaccctctcctggagcgcctgtgagatggtcagcgtggagcgcaagtgctggacaggtggcccgtgtgccccacagggatggctcaggggactgtccacctcacccctgcacctctcagcctctgccgccgggcacccccccccaggctcctggtgccagatgatgacgacctgggtggaaacctaccctgtgggcacccatgtccgagccccctggcatttctgcaatgcaaataaagagggtactttttctgaagtgtg

SEQ ID NO: 2971 - DNA, 2346 bp, Homo Sapiens
  NM_006441
agaccgaacccgagggcgcccagggcgccgagggcgggactggactcggcttgggcgtgagatggcggcggcagcggtgagcagcgccaagcggagcctgcggggagagctgaagcagcgtctgcgggcgatgagtgccgaggagcggctacgccagtcccgcgtactgagccagaaggtgattgcccacagtgagtatcaaaagtccaaaagaatttccatctttctgagcatgcaagatgaaattgagacagaagagatcatcaaggacattttccaacgaggcaaaatctgcttcatccctcggtaccggttccagagcaatcacatggatatggtgagaatagaatcaccagaggaaatttctttacttcccaaaacatcctggaatatccctcagcctggtgagggtgatgttcgggaggaggccttgtccacagggggacttgatctcatcttcatgccaggccttgggtttgacaaacatggcaaccgactggggaggggcaagggctactatgatgcctatctgaagcgctgtttgcagcatcaggaagtgaagccctacaccctggcgttggctttcaaagaacagatttgcctccaggtcccagtgaatgaaaacgacatgaaggtagatgaagtcctttacgaagactcgtcaacagcttaaatctggattactacagccaaataatcagtgttttatatgagagtaaagcaaagtatgtgtatttttcccttgtcaaaaattagttgaaattgttcattaatgtgaatacagactgcattttaaaattgtaattatgaaataccttatataaaaccatctttaaaaaccaatagaagtgtgaatagtagaatattaattaaaatggaggctatcagcctgtgattttcagcttaacttcctggtgttaatgtgacaagttgatctgtctactttgcaatttaagttaaatatttatgaggaactgtgctccgactgagtgcgagaggaaggtaaacttgcgggagtgggcactgtatttcattacgcctttcatgacctggtctgtcctggcaggcacatggagacttggggactattaatttatttgttggtatttgctttggatacagaattccctaagaatattatctcacttcatcatgacttcctttacccactctagaattttatgttggacactttgtagcttttggtggttagtggagggaaaccttttatgatttaaatacttttactccactgattggttaccatcactgcatgtatcagcccttgatgagtttaagatctagtatcttataagttagaaattatttctgtttactcatggtttctgctttggaaatgaaatttgctgtgagttgaaagttggcagatggcaacacagctagggagcaataattttgttgtggggaggatttggtcatctccagaaacccgggagtcacgtggctctcttactcacactccatgtccatcctgtcaccaggtcttgttgattttgcctctgaaatgcctcttaaatctattctctcctttcaattttcctgtcactccttttgtccagccttttagcatttctaagctggactaggcgagagtgtcacacctgcttcccttggcttccatcttgcctcttccagtttatttctcaagctgcagtcaaactgatcttagaaaacacgaatctaatcatgcagcacccctgactaaggtcttccggtggctgttcagagcctcttgggtagcaaacagatggcttctgttgtatacaaagccccttaagagaggtctcctcatctactttttctagcctcttctctcccaactctgtattctcctgtaacactgactgagcactgcaggcttctgccctttgcacatagtaagcatgcatttctctctgtctgaaatgctctttctgttgttcatctagaagactgttttcccttgaagactcagccctagcatcacctcttctgtgaagtcttctgctactttcccaagcagagtgagtgttccttcccttgtctgagtggccttggccattgatgtgcttatcatgttgtcttacgtatcaaattatttgttgtcatatctgtccccttcaccatactgtgagctccaaagaaaagaagtgatctttatacttcttatgcttagtacacaactagacatatagtgtgtgtgtgagagagagaattttttaatgaaataattgaatacattggaagtgtttcattcaaaatactcatccattattctttggatagtagcataaatttgatgttttatgtacaaaagtaaaaacatttgaaaaataaaaaaaaaaa

SEQ ID NO: 2972 - DNA, 7311 bp, Homo Sapiens
  NM_006445
gaactcgggttgcgcacttcccggcgctgggaacgcggagcggacgcagtctggccgccattgcgctgcggggaaagcggcctcttgtgtgagggcctgtgggattctccggatatggccggagtgtttccttatcgagggccgggtaacccggtgcctggccctctagccccgctaccggactacatgtcggaggagaagctgcaggagaaagctcgaaaatggcagcaattgcaggccaagcgctatgcagaaaagcggaagtttgggtttgtggatgcccagaaggaagacatgcccccagaacatgtcaggaagatcattcgagaccatggagacatgaccaacaggaagttccgccatgacaaaagggtttacttgggtgccctaaagtacatgccccacgcagtcctcaaactcctggagaacatgcctatgccttgggagcagattcgggatgtgcctgtgctgtaccacatcactggagccatttccttcgtcaatgagattccctgggtcattgaacctgtctacatctcccagtgggggtcaatgtggattatgatgcgccgagaaaaaagagataggaggcatttcaagaggatgcgttttcccccttttgatgatgaggagccgcccttggactatgctgacaacatcctagatgttgagccactggaggccattcagctagagctggaccctgaggaggacgcccctgtgttggactggttctatgaccaccagccgttgagggacagcaggaagtatgtaaatggctccacttaccagcgctggcagttcacactacctatgatgtcgactctctaccgcctggctaatcagctcctgacagacttggtggatgacaactacttctacctgtttgatttgaaggccttctttacgtccaaggcactcaatatggccattcctggaggccccaaatttgaacctcttgttcgagacatcaacctacaggatgaagactggaatgaattcaatgatattaacaagattatcatccggcagcctatccgcactgagtacaagattgcttttccttacttgtacaacaatcttccacaccatgtccacctcacctggtaccatactcccaatgttgtattcatcaaaactgaggatcctgacttgccagctttctactttgaccctttgatcaacccaatctcccataggcactcagtcaagagccaggaaccattgccggatgatgatgaggaatttgagctcccggagtttgtggagcccttcctgaaggacacacccctctatacagacaatacagccaatggcattgccctgctctgggccccgcggcccttcaacctacgctctggtcgcacccgtcgggccctggacataccccttgtcaagaactggtatcgggagcattgtcctgccgggcagcctgtgaaagtgagggtctcctaccagaagctgcttaagtactatgtgctgaatgccctgaagcatcggccccctaaggctcaaaagaagaggtatttgttccgctccttcaaagccaccaaattctttcagtccacaaagctggactgggtggaggttgggctccaggtttgccgccagggctacaacatgctcaaccttctcattcaccgcaaaaacctcaactacctgcacctggactacaacttcaacctcaagcctgtgaaaacgctcaccaccaaggaaagaaagaaatctcgttttgggaatgctttccacctgtgtcgggaagttctgcgtttgactaagctggtggtggatagtcacgtgcagtatcggctgggcaatgtggatgccttccagctggcagatggattgcagtatatatttgcccatgttgggcagttgacgggcatgtatcgatacaaatacaagctgatgcgacagattcgcatgtgcaaggacctgaagcatctcatctattatcgtttcaacacgggccctgtagggaagggtcctggctgtggcttctgggctgccggttggcgagtctggctctttttcatgcgtggcattacccctttattagagcgatggcttggcaacctcctggcccggcagtttgaaggtcgacactcaaagggggtggcaaagacagtaacaaagcagcgagtggagtcacattttgaccttgagctgcgggcagctgtgatgcatgatattctggacatgatgcctgaggggatcaagcagaacaaggcccggacaatcctgcagcacctcagtgaagcctggcgctgctggaaagccaacattccctggaaggtccctgggctgccgacgcccatagagaatatgatccttcgatacgtgaaggccaaggctgactggtggaccaacactgcccactacaaccgagaacggatccgccgaggggccactgtggacaagactgtttgtaaaaagaatctgggccgcctcacccggctctatctgaaggcagaacaggagcggcagcacaactacctgaaggacgggccttacatcacagcggaggaagcagtggcagtatataccaccacagtgcattggttggaaagccgcaggttttcacccatcccattccccccactctcctataagcatgacaccaagttgctcatcttggcattggagcggctcaaggaagcttatagtgtgaagtctcggttgaaccagtctcagagggaggagctaggtctgatcgagcaggcctacgataacccccacgaggcgctgtcccgcatcaagcgtcacctcctcacacagagagccttcaaagaggtgggcattgagttcatggatctgtatagccacctcgttccagtatatgatgttgagcccctggagaagataactgatgcttacctggaccagtacctgtggtatgaagccgacaagcgccgcctgttcccaccctggattaagcctgcagacacagaaccacctccgctgcttgtttacaagtggtgtcaaggcatcaataacctgcaggacgtgtgggagacgagtgaaggcgagtgcaatgtcatgctggaatcccgctttgagaagatgtatgagaagatcgacttgactctgctcaacaggctgctgcgcctcatcgtggaccacaacatagccgactacatgacagccaagaacaacgtcgtcatcaactataaggacatgaaccatacgaattcatatgggatcatcagaggcctgcagtttgcctcattcatcgtgcagtattatggcctggtgatggatttgcttgtattgggattgcaccgggccagtgagatggctgggccccctcagatgccaaatgactttctcagtttccaggacatagccactgaggctgcccaccccatccgtctcttctgcagatacattgatcgcatccatatttttttcaggttcacagcagatgaggctcgggacctgattcaacgttacctgacagagcaccctgaccccaataatgaaaacatcgttggctataataacaagaagtgctggccccgagatgcccgcatgcgcctcatgaaacatgatgttaacttaggccgggcggtattctgggacatcaagaaccgcttgccacggtcagtgactacagttcagtgggagaacagcttcgtgtctgtgtacagtaaggacaaccccaacctgctgttcaacatgtgtggcttcgagtgccgcatcctgcctaagtgccgcaccagctatgaggagttcacccacaaggacggggtctggaacctgcagaatgaggttactaaggagcgcacagctcagtgtttcctgcgtgtggacgatgagtcaatgcagcgcttccacaaccgcgtgcgtcagattctcatggcctctgggtccaccaccttcaccaagattgtgaataagtggaatacagctctcattggccttatgacatactttcgggaggctgtggtgaacacccaagagctcttggacttactggtgaagtgtgagaacaaaatccagacacgtatcaagattggactcaactccaagatgccaagtcggttccccccggttgtgttctacacccctaaggagttgggtggactcggcatgctctcaatgggccatgtgctcatcccccaatccgacctcaggtggtccaaacagacagatgtaggtatcacacactttcgttcaggaatgagccatgaagaagaccagctcattcccaacttgtaccgctacatacagccatgggagagcgagttcattgattctcagcgggtctgggctgagtacgcactcaagaggcaagaggccattgctcagaacagacgcctgactttagaagacctagaagattcatgggatcgtggcattcctcgaatcaataccctcttccagaaggaccggcacacactggcttatgataagggctggcgtgtcagaactgactttaagcagtatcaggttttgaagcagaatccgttctggtggacacaccagcggcatgatgggaagctctggaacctgaacaactaccgtacagacatgatccaggccctgggcggtgtggaaggcattctggaacacacactctttaagggcacttacttccctacctgggaggggcttttctgggagaaggccagtggctttgaggaatctatgaagtggaagaagctaactaatgctcagcgatcaggactgaaccagattcccaatcgtagattcaccctctggtggtccccgaccattaatcgagccaatgtatatgtaggctttcaggtgcagctagacctgacgggtatcttcatgcacggcaagatccccacgctgaagatctctctcatccagatcttccgagctcacttgtggcagaagatccatgagagcattgttatggacttatgtcaggtgtttgaccaggaacttgatgcactggaaattgagacagtacaaaaggagacaatccatccccgaaagtcatataagatgaactcttcctgtgcagatatcctgctctttgcctcctataagtggaatgtctcccggccctcattgctggctgactccaaggatgtgatggacagcaccaccacccagaaatactggattgacatccagttgcgctggggggactatgattcccacgacattgagcgctacgcccgggccaagttcctggactacaccaccgacaacatgagtatctacccttcgcccacaggtgtactcatcgccattgacctggcctataacttgcacagtgcctatggaaactggttcccaggcagcaagcctctcatacaacaggccatggccaagatcatgaaggcaaaccctgccctgtatgtgttacgtgaacggatccgcaaggggctacagctctattcatctgaacccactgagccttatttgtcttctcagaactatggtgagctcttctccaaccagattatctggtttgtggatgacaccaacgtctacagagtgactattcacaagacctttgaagggaacttgacaaccaagcccatcaacggagccatcttcatcttcaacccacgcacagggcagctgttcctcaagataatccacacgtccgtgtgggcgggacagaagcgtttggggcagttggctaagtggaagacagctgaggaggtggccgccctgatccgatctctgcctgtggaggagcagcccaagcagatcattgtcaccaggaagggcatgctggacccactggaggtgcacttactggacttccccaatattgtcatcaaaggatcggagctccaactccctttccaggcgtgtctcaaggtggaaaaattcggggatctcatccttaaagccactgagccccagatggttctcttcaacctctatgacgactggctcaagactatttcatcttacacggccttctcccgtctcatcctgattctgcgtgccctacatgtgaacaacgatcgggcaaaagtgatcctgaagccagacaagactactattacagaaccacaccacatctggcccactctgactgacgaagaatggatcaaggtcgaggtgcagctcaaggatctgatcttggctgactacggcaagaaaaacaatgtgaacgtggcatcactgacacaatcagaaattcgagacatcatcctgggtatggagatctcggcaccgtcacagcagcggcagcagatcgctgagatcgagaagcagaccaaggaacaatcgcagctgacggcaacacagactcgcactgtcaacaagcatggcgatgagatcatcacctccaccaccagcaactatgagacccagactttctcatccaagactgagtggagggtcagggccatctctgctgccaacctgcacctaaggaccaatcacatctatgtttcatctgacgacatcaaggagactggctacacctacatccttcccaagaatgtgcttaagaagttcatctgcatatctgaccttcgggcccaaattgcaggatacctatatggggtgagcccaccagataacccccaggtgaaggagatccgctgcattgtgatggtgccgcagtggggcactcaccagaccgtgcacctgcctggccagctgccccagcatgagtacctcaaggagatggaacccttaggttggatccacactcagcccaatgagtccccgcagttatcaccccaggatgtcaccacccatgccaagatcatggctgacaacccatcttgggatggcgagaagaccattatcatcacatgcagcttcacgccaggctcctgtacactgacggcctacaagctgacccccagtggctacgaatggggccgccagaacacagacaagggcaacaaccccaagggctacctgccttcacactatgagagggtgcagatgctgctgtcggaccgtttccttggcttcttcatggtccctgcccagtcctcgtggaactacaacttcatgggtgttcggcatgaccccaacatgaaatatgagctacagctggcgaaccccaaagagttctaccacgaggtgcacaggccctctcacttcctcaactttgctctcctgcaggagggggaggtttactctgcggatcgggaggacctgtatgcctgaccgtttccctgcctcctgcttcagcctcccgaggccgaagcctcagcccctccagacaggccgctgacattcagcagtttggcctctttccctctgtctgtgcttgtgttgttgacctcctgatggcttgtcatcctgaataaaatataataataaattttgtataaataggaaaaaaaaaaaaaaaaa

SEQ ID NO: 2973 - DNA, 3981 bp, Homo Sapiens
  NM_006449
cgggctgagagggacctggggagctgcggcctggccggggcggcgcactcaggtggcctcgcttccctgcgggtcaccgcccgccactcgcacagctaggtcggcctgttgggatcgggagaggtgggcgcacgagttttagtgcgggagtccggggtgcgggcggagtcctattgtccccgtgcacccgggcggcagcacctccgggtccctctttaaaccgagcgtccggcgacctttctttgtgcttagggagtcgaaagcggcatcttctccgagagaagtcgcctactggggggtggcgctggggaggtaacaatgggcgcccattgtcctccgagggtccaacggtgacccccccccgcgcgcgcgcccggccaccggttggccccgggccagggcacaggtaccgcggctgggagggtcggccccgctgcccgcgccctccgccccgccccagtgagtccccgcgccgccggccccgccccgcgccgccccgccctccgcaggttcagtcctcgcgtccggccgccccgcgctcagtcgcgcgcaccttctctcgcggccgggggaccgcagcgcggggctagcccggagacccggccaccggcctggggcgccttcacgccgtctcggagcggataatgcggtgagcaggcaccacgccggcagactcggctggatctgcgcacagcggcagggattgcgtgcgcccgcgggaggcccggggcagcggctgggatcctcagcggcggccggtttgtcctggttgtggtcaagactggatgatgtaactggctctctaggaagcctcacttggccgtaacctcaggaaggttctctttgaccccatctcatttcgaagccacttctgaagccacttgagaaaaatgatgtgacagttcctatcaaaaaggattcagaaacatataccatctgtgaagaaagtggccctttctcccgcttgcaaaatagacattctcaaattccaaaatgccagccaagaccccaatttacctgaaagcagccaataacaagaaaggaaagaaatttaaactgagggacattctgtctcctgatatgatcagtcccccgcttggagactttcgccacaccatccacattggcaaagagggccagcacgatgtctttggagatatttcctttcttcaagggaactacgagcttttacctggaaaccaggagaaagcacacctgggccagttccctgggcataatgagttcttccgggccaacagcacctcggactctgtgttcacagaaacgccctccccggtgctcaaaaatgccatctccctcccgaccattggaggatcccaagctctcatgttgcccttattgtcaccagtgacatttaattccaaacaggagtccttcgggccagcaaagctgcccaggcttagctgcgagcccgtcatggaggaaaaagctcaggagaaaagcagtctgttggagaatgggacagtccaccagggagacacctcgtggggctccagcggttctgcatctcagtccagccaaggcagagacagccactcctccagcctgtccgaacagtaccccgactggccagccgaggacatgtttgaccatcccaccccatgcgagctcatcaagggaaagactaagtcagaggagtccctctctgaccttacaggttccctcctctccctgcagcttgatcttgggccctcacttttggatgaggtgctgaatgtaatggataaaaataagtaacaagatgccaacttttttcctttggggtaaaaggtacaaaaacaaactaaccacagttgaagagaagggcttccggagctgtatttgcagttttgtgttgggttttctaaaataatattcttacaaagtatttttttacctgttatgccctgtttgcaaaaacaatttagaaaaaaacaacaaagcaaaacctatcttggcaaaaaaaggaagtgagtcagagcccattttcaggaggcattggtgatgttcggctcacatattgtttgcagacacacaagaaatctggcttggccaggattggcactagctatgaagggctgagcgagtcacattaaggaacttcacggaactttatagcactccgacattttctgagcaagaggaagtcaaaatttatttaacacctaagcctttttgtagactcttttctatatattgcttaggctcaccatagcgaattctccagtgttaaaacttttctgttttcacatttgaactttatgggttttggggattttcttgtagttcttatatatccctatatattatatctatattgcaaaattttgactgtcagctacatgttggtaagacacaggcaaagtattactgtaactaagttatttttaaagttaaaatatatttttacgtgcctttggctttttattgcagagtctacattttatagattctacatcagatgttgtcacttatttccattgggattccattgtaagctgtgtatgtgcgtgtttggaaaagtgtattcatacttagtttttttttcttcatctgttatcatacttttaacagcaaccaataacggattgtaaagtgtaaaggcacaggttactcatgatgcttctgcagagactgtgggctacaccacatatgttatttggaaatataggtattttagtacagtacatacttgcattacataggtacttcaagcaacacaataaaaagtaaatgataaagtgaacttgcttgtttatagtaataaacaagaccataagagaataagtatagctagagaaattgcttctctgaaatgtacatgagcccttaaggtaagagatgatttccatctactctcattttgattacttccttatggtttgagaggctagaaactgagcctctctacttttggaaaaatgaacatgtgaggtcagatttttttttttttttttaagtcagcactgatgccaccctctcagtggtcatttctgagcatcttcctgacttgaacaccttctacagcaaactcttgcaagtccagtttcatccctgtaaggcaaatgtcttttcacgcagaaagtgccatatagacgagataaaggcagctaaaacgagggcagtagagagcacttacccgaccccaaggtgccagagatgccctgaggatggtggttaaggaaacaggagcaggaaatgtacacacagattcctgtccctttgccaactactccttccccatcaaagaaaaacacttgcacacagtaactaccagctccttctctcaaacttgtatttctcctggaaatgtatctcagaaatgacctcctctcccaaccacttcaacgattctttctttgggtttggggttcttgcagttctatcatctaaaataacctttggactgcaggtaaaatgcaattaggacaactaaccaagtagacgaaacaagttcccctaggcaggggtgtccaatattttagcttccctggaccgcattggaagaattttcttgggccacatgtaaaacacactaacactaaccatagttgatgagcttaaaaaaataaaaatagaaaattgcaaaaaaaaaaaaaaaaaaaaatctcagactgttttaagaaagtttaaaaatttgtgttggacttcatgcgggccacaggttggacaagcttgccctagggcattgtgtgctttccgtaacttctcagttgtatttcgttatccatgactctccagtgttttttctgttggaccacacccgtcacagttcacagttccaaagagaaatttcccagcctattctaaatcttgttaatgacgaagagtccaatgtatctcattatttgtagccaattttagactcttttcaatacctcccccccattttaattagtattgatcatattcagtctttcattttactcttcatctgtagcgtgacctcaaggtaaagatgaaactatttcatgaaaaggg

SEQ ID NO: 2974 - DNA, 3350 bp, Homo Sapiens
  NM_006452
gctagccttcccctaagagctgcctggaaagctgtatttgctgcacgtggaaatctccgttattttccagcacccaacagtagcgtaatgggagtaacggacttaacctcatttctctttcagagcatttagccttcatatgcccttccctgcatgcttcccccaggccgtcaagacttgagttctgcctcgcttcccggcgcggtcgcagccctcagcccacttaggataatggcgacagctgaggtactgaacattggtaaaaaattatatgagggtaaaacaaaagaagtctacgaattgttagacagtccaggaaaagtcctcctgcagtccaaggaccagattacagcaggaaatgcagctagaaaaaaccacctggaaggaaaagctgcaatctcaaataaaatcaccagttgtatttttcagttattacaggaagcaggtattaaaactgccttcaccagaaaatgtggggagacagctttcattgcaccgcagtgtgaaatgattccaattgaatgggtttgcagaagaatagcaactggttcttttctcaaaagaaatcctggtgtcaaggaaggatataagttttacccacctaaagtggagttgtttttcaaggatgatgccaataatgacccacagtggtctgaggaacagctgattgctgcaaaattttgctttgctggacttcttataggccagactgaagtggatatcatgagtcatgctacacaggctatatttgaaatactggagaaatcctggttgccccagaattgtacactggttgatatgaagattgaatttggtgttgatgtaaccaccaaagaaattgttcttgctgatgttattgacaatgattcctggagactctggccatcaggagatcgaagccaacagaaagacaaacagtcttatcgggacctcaaagaagtaactcctgaagggctccaaatggtaaagaaaaactttgagtgggttgcagagagagtagagttgcttttgaaatcagaaagtcagtgcagggttgtagtgttgatgggctctacttctgatcttggtcactgtgaaaaaatcaagaaggcctgtggaaattttggcattccatgtgaacttcgagtaacatctgcgcataaaggaccagatgaaactctgaggattaaagctgagtatgaaggggatggcattcctactgtatttgtggcagtggcaggcagaagtaatggtttgggaccagtgatgtctgggaacactgcatatccagttatcagctgtcctcccctcacaccagactggggagttcaggatgtgtggtcttctcttcgactacccagtggtcttggctgttcaaccgtactttctccagaaggatcagctcaatttgctgctcagatatttgggttaagcaaccatttggtatggagcaaactgcgagcaagcattttgaacacatggatttccttgaagcaggctgacaagaaaatcagagaatgtaatttataagaaagaatgccattgaattttttaggggaaaaactacaaatttctaatttagctgaaggaaaatcaagcaagatgaaaaggtaattttaaattagagaacacaaataaaatgtattagtgaataaatgcttctctagatccatattaataaacatgagcatctaacccctcctttcttaggctagacaccaagatatttcagccagcctttatcattcctcttactttatcctttttccttaagtattggtggtcactactattgagtttcttccttaacactgattaaatgatcttaactccctcagctaaaactggcattactgactcccagctatatttctccagacttgcatttttttttttttttttgagacagggtctcactgtcgcccaggctggagtgcagtggcgtgatctcagttcactgctgctttccctcctgggctcaagcagttctcccacctcagcctctcgactaacagggactataatcttgcagcaccatgccgagctaattttattttttgtagagatgagctctcactatgtcacccaggttcgtctcaaactcctgaaccctagtaattctcctatctcagcctcccaaagtgctagggttacagacatgagccactgtgcctgtctagacttgtactttcaactgtccatttctccctgtctgtcccatgggcactcatgaaaaaacagaatgctcccaactttattcatcttccaagcctgtagctcttggtatactcactgttgcaagtcagaagcttgatttcatcattgatgtttttctcacgtttcacatctcactcatcaccaagtcatgttggtgttaatttctgattaacccttgaatttaccgtcttctcatcctctgtacaaaagcctcaagtgagggtcaaattcaacattatcctgatctagacagcccccattctcaatccacccttttccaagttgattgcccaaggacttctaacaataaactctcttttgcaccacagacttctttgaaaatatacatgctgttgaccctctctgtagaaaaccgcacacataaaacttaccaacagatttcattggttcttgggttctcccgaagcctatccatggtttatagattaagaattgatgaggtagctgggcacagtggctcacacctacgatcacagcacttcgggaggctgaagcaagcagatcacttgaggtcaggagtttgagaccagcctggccaacatggtgaaaccctgtctctactaaaaatacaaaaagtagccagccgtgatgacaggcacctgtaatcccagctactcgggaggctgaggcatgagaattgcttgaacccgggaggcggaggttgcagtgagcctagatcatgccactgcactccaacctgggcagcagagcaagactctgtctcaaaaggggaaaaaaaaaattgctgatgtgacccatgaagggaactcattttcctcgtaattttggactgccacacattggtacctttagttctctgaaggcccacgtttttatcattaagacctatttgttagctagtagagctttatgttcgctgtccatgaaaccttctgtaaccacagtgactacaagtagttctttctctattgaattattaggtccagaatagaagatgtcattgtacactttatttccctcacactgtgttatgctctgatgtgctatgcttagctatctgtcagagattagtaaattataaaactcatgtgtactacttaagtttatatcttatgctagtttataagaacaattaaaaggacttagaagattaactttggtaaaaaaaaaaa

SEQ ID NO: 2975 - DNA, 3773 bp, Homo Sapiens
  NM_006454
ccgtcccggggcggacgggcgcgggcgggaggatggagctgaactccctgctgatcctgctggaggcggccgagtacctggagcgcagggatcgagaggccgagcacggctacgcctcggtgctgcccttcgacggcgacttcgccagggagaaaacaaaggcggccggcctggtgcgcaaggccccgaacaacaggtcttcacacaacgagctagaaaagcacagacgagccaaactcaggctgtaccttgagcagctcaagcaactggtgcccctgggccccgacagcacccgccacaccacgctgagcctcctgaagcgggccaaggtgcacatcaagaaactggaggagcaggaccgccgggcactgagcatcaaggagcagctgcagcaggagcatcgtttcctgaagcggcgcctggagcagctgtcggtgcagagcgtggagcgcgtgcgcacagatagcacgggctctgctgtctccacggacgactcagagcaagaagtggacatagagggcatggagtttggccctggtgagctggacagtgttggcagcagcagtgacgcggacgaccactacagcctgcagagtggcaccggcggcgacagtggcttcgggccccactgccggcggctgggccgccccgccctctcgtaggcccgtgccctctgctccttggcctgcctgcccgccagccacgcgtgtcagccctccagttctccttcagttgacgccagcctctccacaggcccactgctgtgccattctggaagctccagctgctgctgggctgcctggcactgcccgcttgccggtcagggcctgccgagctgcctgccccttccagctgggcagagtcccctgcaaggaggcagggcccagcttccacatccggagccctggtcagcatagccgcccacggtctgttctcagattcctaatcattccagaagtattaaacgtcattgctgcaaacctcggcaggtgccgtgtgaggggcttaatgaccaccacagggagctcagaccccaaccctggatcccaggagaaaggagtggaccgaggaaggaaggaaggcaaggctgtctgtccatccgtccgtctgtccacctacctgtcagtccacataggctcctggcgtggacaaggggtctgtgaagggcgggaactgggtgagcacctggggcaggtgggtggttaaggtccttcccacttcgcaggtgtcagaacctagggctgggctctcggggccaggcaggccagcccagcccacgccgagctgggcagcgtctgctctggtaggactgtcagacgcacacgcgcacgcacctagacacacccactcatgtacatgctcacacatgcagacacacctgggcgtcccgaggtcacatgttctggggatgatggccttcaggggtcatctggcaaacagcccctgggctgtgcctggatccccctctagctcctgctcacccacgcccacccagtagtcctgcctgtctgcacaggagaggggcttctcttcctggctggggctggggtgaactggaggctggttaagttgcagccgctgggtcctcgggggcttactcatctcccttttttaaacaaaaagcaaaaaagtaaaatgctgcactgcccagcagcccggttagggctcctggagccaccttaggaaagggcttctcatgagctctgctgcggcagcttcagctggcagagaggctttcccagaaaaaaaaaaaaaaccatttttaaaaagaagaaagcctaaagactctcggcctagggacgtccgtgtgtgccgcctctgtttcctgtaccagatttttgtattctattttcctagctgttgttgcgtccttgtttgctgaggggtgggagccacccagcgtctcagggacctgtccctccgtcacgtcgtcaaagtgtgccttgtgtcttgtgtcaggccttgcccttcccaccagcatgtccctcgtggctcagggtgccccaggcctgcccagctagtgctgtcctcccatctcctgtgggcagcccctcccggcagccagggcttcctggaggcgatgcagccaggcccctgtgggtggcacggaggggctgtgacctggtccccagtgttgccctccccagtggctggcaggggcctgcttgctcactagagagatggattctcacctgtcacctgactcgagccccctgcttcctggcctaggcgagggttccaggtttcagacactggcagccaatgaagactgtgctcgctgggtggtgcaggcctggcaccaggaggcttgcacccgcctttccttcctgacgtcctctgtccttggggctggcccatagcagtgcctgccgtgcctctggtacatctgtagccaattcccatatcatggggaaaattcgtgtctattttcagtcgtacgcatagacgccccaggatggggggcccactgtggcggaagggggtccctggaaacaactctggcacagaacctgccctgcaggctgtagggggcatggtgcctggagctgaggggcatccgaacgcgttgcgggtggttgtgaggaggcctgtctgcatctccttccggccccactggggtccaggggtgcccagaaaggagcttcccctgcctgcctgagtctgtccccccaggcttcatttcaaacaccgtggcacctccgagcaaggcgggccgtgtgtaaaagcttgcttccccagccagcactgcagggccctgaggtggtcgtgtccctgccctcaattcttgaagcaccagctccctgccccaccctccagtgcctgaggcagctaggggcttctgctctcatctctgaccagcagaatccacccggtgaccagtggtggcccctcagcccaccctcccggcagctcagcctgtggctcttgaggccgtggttcccacgtggactgggaggcagtctcagccacccggggtgctgttcagctgcccctccctgccatcagcaggtgggtgaggggttgcccactgggtgggggcccgtgctaggagtcaccacatgctccaacctcccactgctccctgtcaggggcccaggctgccatcactggaggctgcagggaccaagaggccatcaccgtgtctatagagagcagacagaagcagaacagagcccggggctcctgagcctctgcgtgtgccctcccagcccacaccagtgctctcggccactgagcacccagactcaggcttgggttccccagccttattggaaggcagctcccgcataccaggataacccccgcaaaccacatagcagacccccgccatcctcgcagagtgggagaggctgcagcaaggctttgcctctgcagaccccatcttagtggcacggtgcttgggcctgtgtccccgggtggtggaaccctgtaccggtctgtggccctagggtccctgctctgtctgccccggcccgtgctgtccgctgggtgaggcaggctcccccgtgccctgcctccctctgtcagggaacctgggaccccctccccactgcctgcacagaggaccctgaccctcggccagcagggtggccccaggtccatgttgggcactagggcaggttccgtgccagagtcgggggccacacgagggcctggtgccggtgaggggggcgtgcgctagagggggaaaggggcccccggccacctgtccaccgtgtgggccgtgctgtgtccttatgtcattgtaatataaatacagatttttatatctc

SEQ ID NO: 2976 - DNA, 2619 bp, Homo Sapiens
  NM_006455
gcttcctgggcttcccatctctggcgggaagcgctccccgacgcattctctacctaggggacacccccaaggcaggagcccgggccgacggagaggacttaacgacactatcggaccctctgggaaaagaggggagacgtcgtgacccaggccccgccccaccttgccgcctcgtgcccggcgctaagacccagcgggcgcgccgcccgcccggggcccggccctgtccccttccgtccgcggggcagccagctcagctccggagagccggcggcgcggcgggcatggctcgggtggcgtgggggctgctgtggttgctgctgggcagcgccggggcgcagtacgagaagtacagcttccggggcttcccgcccgaggacctgatgccgctggccgcggcgtacgggcacgctctggagcagtacgagggagagagctggcgcgagagcgcgcgctacctggaggcggcgctgcggctgcaccggctcctgcgcgacagcgaggccttctgccacgccaactgcagcggccccgcgcccgcggccaagcccgatcccgacggcggccgcgcagacgagtgggcctgcgagctgcggctcttcggccgcgtcctggagcgagccgcctgcctgcggcgctgcaagcggacgctgcccgccttccaggtgccctacccgccgcggcagctgctgcgtgacttccagagccgcctgccctaccagtacctgcactacgcgctgttcaaggctaaccggctggagaaggcggtggcggcggcctacaccttcctccagaggaacccgaagcacgagctgaccgccaagtatctcaactactatcaggggatgctggacgtcgccgacgagtccctcacggacctagaggcccagccctacgaggccgtgttcctccgggctgtgaagctctacaacagcggggatttccgcagcagcacggaggacatggagcgggccttgtcagagtacctggcagtctttgcccggtgcctggccggctgtgaaggggcccatgagcaggtggacttcaaggacttctacccggccatagcagatctctttgcagagtccctgcagtgcaaggtggactgtgaggccaatttgacccccaatgtgggtggctacttcgtggacaagttcgtggccaccatgtaccactacctgcagtttgcctactataagttgaatgatgtgcgccaggctgcccgcagcgccgccagctacatgctcttcgaccccaaggacagcgtcatgcagcagaacctggtgtattaccggttccaccgggctcgctggggcctggaagaggaggacttccagccccgggaggaggccatgctctaccacaaccagaccgccgagctgcgggagctgctggagttcacccacatgtacctgcagtcagatgatgagatggagctggaggagacagaaccgcccctggagcctgaggatgccctatctgacgccgagtttgagggggagggtgactacgaggagggcatgtatgctgactggtggcaggagccggatgccaagggtgacgaggccgaggctgagccagagcctgaactcgcatgagaaggggacaccccacaccgctcaagcttgggaagcctggtgccgatggccccaccctcaccagcctgggcagcagcaagaactatttattaaaaacttaagatgggccaggtgcggtggctcacacctgtaatcccagcattttgggaggccaaggtgggtggatcacttgaggccaggagttcaagaccagcctggccaacatgatgagacctccgtctctactaaaatacataaattagccgggtgtggtggcaggcgcctgaaatcccagctactcaagaggctgaggcaggagaatcgcttgaacctgggaggcaaaggttgcagtgaactgagattgcgccaccgcactccagcctgggcgacagagcgagactccatctttaaaaaaaaacaagacgggccggcacggtggctcacgcctgtaatcccagcactgagaggccgatcacttgaggtcaggagttcaagaccagcctggccaacatggtgaaaccccatctctactaaaaaatacaaaaattagccaggcatggtggcacacacctgtaatcgtagctgaggcaggagaatcgcctgaacccaggaggcggagcttgcagtgagccgagatcgtgccactgcactccagcctgggcgacagagtgagactccatctcaaaaaaaaaaaaaaaaacttaagatggacacagctgactggacccccatcctgcctcacccatgggtgctgcaccccagacccatcctgccacttctatgtctctggaccacaggatggtggtggcattgcaggttggcaagtgggctgatggggtccgccctcctcactgctgagctcctcacctggacagtctcctggacaaggagtttccagctgctggctggagtctcaggccaaattgcagagggtcctccagggtcctgaagagcactggactaagagtctagtggttccagggccctgaccagtaggtgctcaataaatgtttgttgttgaatgaaaaaaaaaaaaaaaaaa

SEQ ID NO: 2977 - DNA, 3059 bp, Homo Sapiens
  NM_006458
ggtccgcagccccgccccggcccctccctccggcctgtgcggctagtccggcggcggcgccggcgcggggacaggcggaggcgcgggcagggccgggcggacgggcgctggcagcagtagcagcgccgcgggcccttcagagtggccgcagtccgagctttgccctcgcatcctgttccaacgcggaaaggacccctctggttctcctgtagcctgagccctgcctggaggaccccaggcccctccctggttctgacctcctcccttctgcaattggcttcagatcctgggctgcaaacctgcagggacagatggttgcaggttggaggggcaggctgcaccccagggagaggctggtgtgagtggcgggagccatctgtgggcgccatggcaaagagggaggacagccctggcccagaggtccagccaatggacaagcagttcctggtatgcagcatctgcctggatcggtaccagtgccccaaggttcttccttgcctgcacaccttctgtgagagatgtctccaaaactatatccctgcccagagcctgacgctatcctgtccagtatgccggcagacgtccatcctcccagagcagggcgtctcggcactgcagaacaacttcttcatcagcagcctcatggaggcaatgcagcaggcacctgatggggcccacgacccggaggacccccaccccctcagtgtagtggctggccgccctctctcctgccccaaccatgaaggcaagacgatggagttttactgtgaggcctgtgagacggccatgtgtggtgagtgccgcgccggggagcatcgtgagcatggcacagtgctgctgagggatgtggtggagcagcacaaggcggccctgcagcgccagctcgaggctgtgcgtggccgattgccacagctgtccgcagcaattgccttagtcgggggcatcagccagcagctgcaggagcgcaaggcagaggccctggcccagatcagtgcagcgttcgaggacctggagcaagcactgcagcagcgcaagcaggctctggtcagcgacctggagaccatttgtggggccaaacagaaggtgttgcaaagccagctggacacactgcgccagggtcaggaacacatcggcagtagctgcagctttgcagagcaggcactgcgcctgggctcggccccggaggtgttgctggtgcgcaagcacatgcgagagcggctggctgcattggcggcacaggccttcccggagcggccacatgagaatgcacagctggaactggtccttgaggtggacggtctgcggcgatcggtgctcaatctgggcgcactgctcaccacgagcgccactgcacacgaaacggtggccacgggagagggcctgcgccaggcgctagtgggccagcctgcctcgctcactgtcactaccaaagacaaggacgggcggttggtgcgcacaggcagcgctgagctgcgtgcagagatcaccggcccggacggcacgcgccttccggtgccagtggtggaccacaagaatggcacatatgagctagtgtacacagcgcgcacggaaggcgagctgctcctctcggtgctgctctacggacagccagtgcgcggcagccccttccgcgtgcgtgccctgcgtccgggggacctgccaccttccccggacgatgtgaagcgccgtgtcaagtcccctggcggccccggcagccatgtgcgccagaaggcagtgcgtaggcccagctccatgtacagcacaggcggcaaacgaaaggacaacccaattgaggatgagctcgtcttccgtgttggcagtcgtggaagggagaaaggtgaattcaccaatttacaaggtgtgtccgcagccagcagcggccgcatcgtggtagcagacagcaacaaccagtgtattcaggttttctccaatgagggccagttcaagttccgttttggggtccgaggacgctcacctgggcagctgcagcgccccacaggtgtggcagtggacaccaatggagacataattgtggcagactatgacaaccgttgggtcagcatcttctcccctgagggcaagttcaagaccaagattggagctggccgcctcatgggccccaagggagtggccgtagaccggaatggacatatcattgtggtcgacaacaagtcttgctgcgtctttaccttccagcccaatggcaaactggttggccgttttgggggccgtggggccactgaccgccactttgcagggccccattttgtggctgtgaacaacaagaatgaaattgtagtaacggacttccataaccattcagtgaaggtgtacagtgccgatggagagttcctcttcaagtttggctcccatggcgagggcaatgggcagttcaatgcccccacaggagtagctgtggactccaatggaaacatcattgtggctgactggggcaacagccgcatccaggtattcgacagctctggctccttcctgtcctatatcaacacatctgcagaaccactgtatggtccacagggcctggcactgacctcggatggccatgtggtggtggctgatgctggcaaccactgctttaaagcctatcgctacctccagtagctgtacagaggccctgcctggcttgtggagggacagacattggggtgattggacaagagggtctggctgggaggtgggccagacctggcagcactgaatgtgggctgtgggcatgggtgcacccggtgccctccctctcctacccccacccccacggttgcactttatttattcggttcttgctttggtgactgggtgagcctggactgtggtcccaaggatgtgtgcagagcttcaccctacccttcttacacacctccccacccctgtcagtctgctccccatcccccagcctggggccagaacagcctaccccaggacaggagtccctctagttgtctccctaccaccctatacacactgacagagacagcaataccccaccccccatattaaataaatgtcttcaccaagaaaaaaaaaaaaaaaaaaaaaaa

SEQ ID NO: 2978 - DNA, 3450 bp, Homo Sapiens
  NM_006459
gatgcgtcactgatcggtgaggcgcggccgaggggtcggctttcctcgcgagcctgcggctgggcttcttctcagttagtgccttccacccgggagcgacccttgggagagggagtttcaggaagctcaccgagcaggggcggcccactggcctccgggggcggaggagttggcaaggggtcagcgggctcagccagaagggaagaatgaggggacaggggtactggactccccggctcagcctgcgagagagcgccaagtttccggagggagagggtagaaactggagggggtggacctgtcactcacgggactgagggtccttttctcccgctcccaggaggaacgagaatgaatatgactcaagcccgggttctggtggctgcagtggtggggttggtggctgtcctgctctacgcctccatccacaagattgaggagggccatctggctgtgtactacaggggaggagctttactaactagccccagtggaccaggctatcatatcatgttgcctttcattactacgttcagatctgtgcagacaacactacaaactgatgaagttaaaaatgtgccttgtggaacaagtggtggggtcatgatctatattgaccgaatagaagtggttaatatgttggctccttatgcagtgtttgatatcgtgaggaactatactgcagattatgacaagaccttaatcttcaataaaatccaccatgagctgaaccagttctgcagtgcccacacacttcaggaagtttacattgaattgtttgatcaaatagatgaaaacctgaagcaagctctgcagaaagacttaaacctcatggccccaggtctcactatacaggctgtgcgtgttacaaaacccaaaatcccagaagccataagaagaaattttgagttaatggaggctgagaagacaaaactccttatagctgcacagaaacaaaaggttgtggaaaaagaagctgagacagagaggaaaaaggcagttatagaagcagagaagattgcacaagtggcaaaaattcggtttcagcagaaagtgatggaaaaagaaactgaaaagcgcatttctgaaatcgaagatgctgcattcctggcccgagagaaagcgaaagcagatgctgaatattatgctgcacacaaatatgccacctcaaacaagcacaagttgaccccggaatatctggagctcaaaaagtaccaggccattgcttctaacagtaagatctattttggcagcaacatccctaacatgttcgtggactcctcatgtgctttgaaatattcagatattaggactggaagagaaagctcactcccctctaaggaggctcttgaaccctctggagagaacgtcatccaaaacaaagagagcacaggttgatgcaagaggtggaaatgttctccatatcaagatgtggcccaaggggttaagtgggaacaatcattatacggactcttcagatttacagagaacttacacttcatctgttccacctctcctgcgatagtcctgggtgctccactgattggaggatagagccagctgtctgacacacaaatggtcttttcagccacagtcttatcaagtatcctatatgtattcctttctaaactgctactcatgaatgaggaaagtctgatgctaagatactgcctgcactggaatgttaaacactaaatatataacaagctgtgttttcctaagctgagatctgttgaataatgtttacattcgtcccccggggaaatgtatgctcagccaccattcaagagatgactgagaaggagatggtaagttcaagaagactgattgcacctgggacccaggccctttctttgggatccagtcccagccttcatccatgtgattaagatccaggccgctgaagttccccaggaaatgatcttccacttgagcaaccttttacttgatacgatttgcacctttctgttttcctgcagtcagggtggtggcctgcagggacctgagctttgctacccaaccagattcctcatagagattcctaatcactagtttcttgtattcataaactcagagatacagagggcttggtttgaagttggggtgagatgaaacctttgctctgagccaaagctctggggccttgcattccctgcattgggttgatgactgtcagcatcactgccgcaggccatgcttgactaaggtacctggttttagccacagccacctccttgtatgttacctttcagctctggccaagagtgggacagggttttaaccacaaataggagcagcatgcaattcctagtgacttgctgcacagtattgtatcataattacaggaagtttttatttttaaaactggatctggggtatattcatttgccccatcacctctgtctaaaggcccaagtcctagggctgccatggtcacaagcacactgatgctccttaagattgtttatctggagcccacatagtgtggaacaaaaagtcacctagaaagcatccttggtcatcattgtctccttcccacctggcccagagatgcttaaatccaagttgtttctccagctgtcacctcccccaggagatcaggattccactgacgtcctgggcagccagtgaatttaattttccatgagaaacaacagagttaacctgtggcattaggagacctacttcatgtggaccctttttttccttcagtttaacttttctggagcagtgtgctgcgtagttcggcctgagtttgtgcagcttgttaagacaactcttgtgtacgctatgttgaagctcaacaaaaaagtcatgggaccacttctagaaatctttcagctgtcaggcctgtcagtctcatgacagtttgttggttgtgccaaacactttatttgggaaaggaaagcccagatttgaatgggtctttcccctgggccttatcctatagaggcatttgtaatatggagaaaataatttttcatttttgctcatttaattctataaattctctttataaatgaattttgtgttctttagttctccttaaaagaacttttgaattataaaaataaaatctttacctgtcgaattgttgctgcagatgattgttgtggaaaatctggatcattgacctctgtgctttcattcctagagatgttttatagttacatgagcaaaagctgttgccccaaagtgatggccctggaggcggggctgaggaacagggaaatgccgctgtgaagtcttaaagcacttctgcttaaactcccatgtgtgaggagtgtgcctccctgtgccctctcagctctgaggctggccgtctttcggggtgttccttttggcaaatatacactgtaatcttgagtctaaatttatatgttgaaatgctaccttttttaaaataagaaactaaataaaattattttactatcagtgaaaaaaaaaaaa

SEQ ID NO: 2979 - DNA, 2106 bp, Homo Sapiens
  NM_006463
gggaagggtcccgggaacgtggtggggcagggcctccgagcgtggttggactttgaaggggatcggccgccatgctgcatcccctttttggaattgctcaaccaggtggtaaccggcgccgcttcctggccttgggaggtggttcctttcttaacccacaagaacctctcccaagagaacttggtcctgatgtctgaccatggagatgtgagcctcccgcccgaagaccgggtgagggctctctcccagctgggtagtgcggtagaggtgaatgaagacattccaccccgtcggtacttccgctctggagttgagattatccgaatggcatccatttactctgaggaaggcaacattgaacatgccttcatcctctataacaagtatatcacgctctttattgagaaactaccaaaacatcgagattacaaatctgctgtcattcctgaaaagaaagacacagtaaagaaattaaaggagattgcatttcccaaagcagaagagctgaaggcagagctgttaaaacgatataccaaagaatatacagaatataatgaagaaaagaagaaggaagcagaggaattggcccggaacatggccatccagcaagagctggaaaaggaaaaacagagggtagcacaacagaagcagcagcaattggaacaggaacagttccatgccttcgaggagatgatccggaaccaggagctagaaaaagagcgactgaaaattgtacaggagtttgggaaggtagaccctggcctaggtggcccgctagtgcctgacttggagaagccctccttagatgtgttccccaccttaacagtctcatccatacagccttcagactgtcacacaactgtaaggccagctaagccacctgtggtggacaggtccttgaaacctggagcactgagcaactcagaaagtattcccacaatcgatggattgcgccatgtggtggtgcctgggcggctgtgcccacagtttctccagttagccagtgccaacactgcccggggagtggagacatgtggaattctctgtggaaaactgatgaggaatgaatttaccattacccatgttctcatccccaagcaaagtgctgggtctgattactgcaacacagagaacgaagaagaacttttcctcatacaggatcagcagggcctcatcacactgggctggattcatactcaccccacacagaccgcgtttctctccagtgtcgacctacacactcactgctcttaccagatgatgttgccagagtcagtagccattgtttgctcccccaagttccaggaaactggattctttaaactaactgaccatggactagaggagatttcttcctgtcgccagaaaggatttcatccacacagcaaggatccacctctgttctgtagctgcagccacgtgactgttgtggacagagcagtgaccatcacagaccttcgatgagcgtttgagtccaacaccttccaagaacaacaaaaccatatcagtgtactgtagccccttaatttaagctttctagaaagctttggaagtttttgtagatagtagaaaggggggcatcacctgagaaagagctgattttgtatttcaggtttgaaaagaaataactgaacatattttttaggcaagtcagaaagagaacatggtcacccaaaagcaactgtaactcagaaattaagttactcagaaattaagtagctcagaaattaagaaagaatggtataatgaacccccatatacccttccttctggattcaccaattgttaacatttttttcctctcagctatccttctaatttctctctaatttcaatttgtttatatttacctctgggctcaataagggcatctgtgcagaaatttggaagccatttagaaaatcttttggattttcctgtggtttatggcaatatgaatggagcttattactggggtgagggacagcttactccatttgaccagattgtttggctaacacatcccgaagaatgattttgtcaggaattattgttatttaataaatatttcaggatatttttcctctacaataaagtaacaattaacttaaaaaaaaaaaaaaaaaa

SEQ ID NO: 2980 - DNA, 1888 bp, Homo Sapiens
  NM_006468
gtcttcttcggtggcgatccgcgtcctagaaagggcggtgggctccacctcggcctagaaggccagcgggagccgtaggaagccgtcgcgggaagctcagccgaattggagttggagcccccggattgcgctgaccctgagctctcagactccccagtacaatgactcaagcagaaattaagctctgttctttgttgctgcaagagcattttggagagattgtagaaaaaattggagtccatctgataagaaccggcagccagccactaagagtaattgcccatgacacaggaacatcactggatcaggtgaagaaagccctgtgtgtcctcgtccaacataacctggtgagttatcaagtgcacaaacgtggtgtggtggagtatgaagcccagtgcagccgggtattgcgaatgcttagatatccccggtacatctatactaccaaaactctgtacagtgacactggagagctgattgttgaggagcttctgttgaacggcaaactgacaatgtcagctgttgtgaagaaagtggcagaccggctcacagagaccatggaggatggcaagaccatggactatgctgaagtatcaaacacatttgtgcgactggcagacacacactttgtacaacgctgcccttcggtacctaccactgagaattcagaccctgggccaccaccacctgcccccacacttgtcattaatgaaaaggacatgtacctggttcctaaactcagcttgatagggaaaggtaaaaggaggagatcatctgatgaagatgctgctggggagcccaaggccaagagaccaaaatatactacagataacaaggagcccattccagatgatgggatttattggcaggccaaccttgacagattccaccaacacttccgtgaccaagccattgtgagcgcagttgctaacaggatggaccagacaagcagcgagattgtgcgaaccatgctccgaatgagtgagattaccacttcctctagtgctcccttcacccagccattgtcttccaatgagatcttcagatccctacctgttggctataacatctctaagcaagttcttgatcagtatctcactctgctggcagatgatccactagagtttgttggaaagtctggcgacagtggtggaggaatgtatgtcatcaacctccataaggcattagcatccctagccacagccactctggagtccgtcgtacaggagagatttgggtctcgctgtgctagaatattccgtctagttttgcagaagaaacacatagagcagaagcaagtggaagactttgcaatgattcctgcaaaggaggcaaaggatatgctatataagatgctctcagaaaatttcatgtcactccaggaaattcccaaaacaccagaccatgccccatccaggaccttctatttatatactgtgaacatcctgtcagctgcccgaatgttgttgcacaggtgctacaagagcatagccaacttgatagaaaggaggcaatttgaaaccaaagagaataagcgtctactagaaaaatctcagagggtagaagccatcattgcatctatgcaggctactggtgcagaggaagcacagttacaagaaatagaggagatgatcacagctcctgaacgtcagcagctagagaccctgaaacgtaatgtcaacaagttggatgccagtgagatccaggtggacgaaaccatcttcctgctggagtcttacattgagtgcaccatgaagagacagtgatccagaagaagcatcttcctcagaagatctggggggatggaaagcaaaataaaggaggtgcctggatgcattatttgcagtgggaaaaaaaaaaaaaaaaaaaaaaaaaaaaaaaaaaaaaa

SEQ ID NO: 2981 - DNA, 4205 bp, Homo Sapiens
  NM_006469
gaagcgggctgggaggcgtcggcggcggcagcgcacgtggtgacgtgcgagggggtgcggcgcgagcggtcggcggcggcggaggcagtgtctcccggtcgcgcgtggaggtcggtcgctcagagctgctgggcgcagtttctccgcctgctgcttcggcgcggctgtatcggcgagcgagcgagttcccgcgagttctcggtggcgctcccccttcctttcagtctccacggactggcccctcgtccttctacttgaccgctcccgtcttccgccgccttctggcgctttccgttgggccgattcccgcccgcttcctcctgcttcccatcgaagctctagaaatgaatgtttccatctcttcagagatgaaccagattatgatgcatcattatcacagaagaaattcgtgtctatagcttttaaggacttgattacatcattttcaagcctgatagttttggaatcaccattagagcttaagacacacctgccttcatttcaaccacctgtcttcataccctgacgaagtgcaccttttaacactcctttgtccttggattacttaagagttcccagaaatacatttgccaccaacagagtagccaaatttataaggaaaaatgattcccaatggatatttgatgtttgaggatgaaaattttattgagtcttctgttgccaaattaaatgccctgaggaaaagtggccagttctgtgatgttcgacttcaggtctgtggccatgaaatgttagcacacagagcagtgctagcttgctgcagtccctatttatttgaaatctttaatagtgatagtgatcctcatggaatttctcacgttaaatttgatgatctcaatccagaagctgttgaagtcttgttgaattatgcctacactgctcagttgaaagcagataaggaattggtaaaagatgtttattctgcagcaaaaaagctgaagatggatcgagtaaagcaggtttgtggtgattatttactgtctagaatggatgttaccagctgcatctcttaccgaaattttgcaagttgtatgggagactcccgtttgttgaataaggttgatgcttatattcaggagcatttgttacaaatttctgaagaggaggagtttcttaagcttccaaggctaaagttggaggtaatgcttgaagataatgtttgcttgcccagcaatggcaaattatatacaaaggtaatcaactgggtgcagcgtagcatctgggagaatggagacagtctggaagagctgatggaagaggttcaaaccttgtactactcagctgatcacaagctgcttgatgggaacctactagatggacaggctgaggtgtttggcagtgatgatgaccacattcagtttgtgcagaaaaagccaccacgtgagaatggccataagcagataagtagcagttcaactggatgtctctcttctccaaatgctacagtacaaagccctaagcatgagtggaaaatcgttgcttcagaaaagacttcaaataacacttacttgtgcctggctgtgctggatggtatattctgtgtcatttttcttcatgggagaaacagcccacagagctcaccaacaagtactccaaaactaagtaagagtttaagctttgagatgcaacaagatgagctaatcgaaaagcccatgtctcctatgcagtacgcacgatctggtctgggaacagcagagatgaatggcaaactcatagctgcaggtggctataacagagaggaatgtcttcgaacagtcgaatgctataatccacatacagatcactggtcctttcttgctcccatgagaacaccaagagcccgatttcaaatggctgtactcatgggccagctctatgtggtaggtggatcaaatggccactcagatgacctgagttgtggagagatgtatgattcaaacatagatgactggattcctgttccagaattgagaactaaccgttgtaatgcaggagtgtgtgctctgaatggaaagttatacatcgttggtggctctgatccatatggtcaaaaaggactgaaaaattgtgatgtatttgatcctgtaacaaagttgtggacaagctgtgcccctcttaacattcggagacaccagtctgcagtctgtgagcttggtggttatttgtacataatcggaggtgcagaatcttggaattgtctgaacacagtagaacgatacaatcctgaaaataatacctggactttaattgcacccatgaatgtggctaggcgaggagctggagtggctgttcttaatggaaaactgtttgtatgtggtggctttgatggttctcatgccatcagttgtgtggaaatgtatgatccaactagaaatgaatggaagatgatgggaaatatgacttcaccaaggagcaatgctgggattgcaactgtagggaacaccatttatgcagtgggaggattcgatggcaatgaatttctgaatacggtggaagtctataaccttgagtcaaatgaatggagcccctatacaaagattttccagttttaacaaatttaagaccctctcaaactaacaggcttagtgatgtaattatggttagtagaggtacacttgtgaataaagagggtgggtgggtatagatgttgctaacagcaacacaaagcttttgcatattgcatactattaaacatgctgtacatactttttgggtttatttggaaaggaatgcaaagatgaaggtctgttttgtgtacttttaagactttggttattttactttttggaaaagaataaaccaagaattgattgggcacatcatttcaagaagtcccctctcctccacatttgttttgccaatttgcacattaaatgactcttccctcaaatgtgtactatggggtaaaaggggtagggtttaaagatgtagacagttgggttttttaagggccctttttcaataactggaacactctataacaaaggatacttatttaaatagatgacattgactatttttgtttttattaaaaggaagcttacatgcctaccaatatttaatcttttatgattgcctttttataactttttatattctcagcagagtgctttaccaattgaagtaaaatgtggcaggctggagttattgaagcagagtggcagtcttcagtttgcagagtaggggtctgtcttttaaactctgagtgcaaacttcagagttcttgccttggctgcagtttttttccttcaagaatgcagtactaacatttatttgagtggagttactgaacagtaacatagctgtgatttttggtatttgaaacactggttttaaatattttgacttgttgagggtatgttttatatagcaagacattatatagcagtaaaaaatggtgttttatcttctatataattcctgtttttattattaacaaaacagtcctaaatagcagccctcaattgtgaaaaaatttactttaaactacattaggttgtgaatgcaggttttatcagaactatgtttttgttcagtttatctgttcatatggataaatattggttgggatgacttggtgtctaatgtgtagtgctacacacctaacttatggggccaaaatagcatgtcctaatgcttgctgctgatttaaacacattaaaggtactttgcaggaaatccttgcaccatgggattaatatccaattgctgcttgtacactcattcattactaaaagttttgagaaatttttttttccagtaatgagcttaagaaatttgtggaaaataactcacctggcatcttacatctgaaataaggaatgatataaggtttttttttctcacagaagatgaagcacacaggaacctaatgggccaactgggatgaggtgactattctgagatgactattcagtggctaacttgggttaggaagaaaataattaggtattttctccaaatgttcactggtactctgccactttatttctctcatctgttacacaaagaaccaccaggaaagcaaatcagtttggttggtaactctgtaattcctaactatcactggtttggttctggactaaaactacattgacagattgaatttgcctaatatgatgactgtttttaatatggatctgtatgtgttctattcagcacaaggaaataaaattttagttgaggattcagcactaaaaaaaaaa

SEQ ID NO: 2982 - DNA, 1243 bp, Homo Sapiens
  NM_006471
ggacgcaaccatctgcggaaaggataggggggaggaagacttaacactgcaacaacaggtacaaaaaagaaggaaactcagtaacaggacccagaggaccattatatattgctctatattctaggtcgcccactttacacttccttctcatgcacttggtcaataccacgcccgctgaccacactggcgacttccctctctgtcgcccctccgtgaagtcagacccactctgcgggccaagaaaggtgaccgggcttccttccggcttgctaagcagaggccggaagcggtggtttttagcggctctctgggtagcagggtggtgtgatagcggcagcgaggggctcggagaggtgctcggattctcgtagctgtgccgggacttaaccaccaccatgtcgagcaaaagaacaaagaccaagaccaagaagcgccctcagcgtgcaacatccaatgtgtttgctatgtttgaccagtcgcagattcaggagttcaaagaggccttcaacatgattgatcagaacagagatggtttcatcgacaaggaagatttgcatgatatgcttgcttcattggggaagaatccaactgatgagtatctagatgccatgatgaatgaggctccaggccccatcaatttcaccatgttcctcaccatgtttggtgagaagttaaatggcacagatcctgaagatgtcatcagaaatgcctttgcttgctttgatgaagaagcaactggcaccatacaggaagattacttgagagagctgctgacaaccatgggggatcggtttacagatgaggaagtggatgagctgtacagagaagcacctattgataaaaaggggaatttcaattacatcgagttcacacgcatcctgaaacatggagccaaagacaaagatgactgaaataacttcaaattccagccaaacgttccttgttgccactttgggtattctgagattttctcttgcatgcccttagctttacagcttttgcatttcctgttgtatttattctcagccattttgggcatatgtatctttataatcagactggaaacgggactttctattaatatcattttcagaataaaaaataggataatttaacctaccagcccttctcccccaataactgtggtctatacagagtcaatatattttttcggagaaagttattcgctcgattttttctgaatcataattaaactttatgataaaataaaaaaaaaaaaaaa

SEQ ID NO: 2983 - DNA, 2016 bp, Homo Sapiens
  NM_006473
atgagtgtgagctcgtgagtgggcgccgccgccaccgcccccgccgccgtcgtctcggtagcagccttcgccacgccggggtcttcagctccactggggccatgtcagagcgagaagagcggcggtttgtggagatccctcgggagtctgtccggctcatggcggagagcacgggcctggagctgagcgatgaggtggcggcgctgctcgcagaggacgtgtgctatcgtctgagagaggccacgcagaatagctctcagttcatgaagcacaccaaacgccggaagctgacggttgaggacttcaacagggccctcagatggagcagcgtggaggctgtgtgtggttacggatcacaggaggcactgcccatgcgccccgccagggagggtgaactctactttcctgaggatcgagaggtgaacctggtggagctggccctggctaccaacatccccaaaggctgtgctgagacagctgtcagagttcatgtctcctacctggatggcaaagggaacctggcacctcaaggatcggtgcccagtgctgtgtcttcactgacagatgaccttctcaagtactatcaccaggtgactcgtgctgtgctaggggatgatccgcaactgatgaaggttgcactccaggacttgcagacgaactccaagattggggcactcctgccttactttgtttatgtggtcagtggggtgaaatctgtaagccatgacctggagcaactgcaccggctgctgcaggtggcacggagcctatttcgtaatccgcacctgtgcttggggccctatgtccgctgtctggtgggcagtgtcctctactgtgtcctggagccactggctgcctccatcaaccccctgaatgaccactggactctgcgggatggggctgccctcctgctcagccacatcttctggactcatggggaccttgtaagtggcctctatcagcatatcctgctatccctgcagaagatcctggcagatcctgtgcggccgctctgctgccactatggagccgtggtggggctgcatgctcttggctggaaggcagtagaacgagtcctgtacccacacctgtccacctactggacaaacttgcaggctgtgctggatgattattcagtatctaatgcccaggtcaaagcagatggacacaaagtctatggagccattctggtggcggtagagcgactgctgaagatgaaggcccaggcagcagagcccaacaggggtggcccaggtggcagggggtgccggcgcctggacgacctgccatgggacagccttctctttcaagagtcgtcctccgggggcggtgcagaacccagctttgggtccggcctcccgctgccgccagggggcgcggggccggaggacccttctctttcggtgaccctggccgacatctaccgggagctctacgccttcttcggtgacagcttggccacacgctttggcaccggccagcctgcacccacggctccgcggccgcccggggacaagaaggagccggcggcagccccggactcggtgcggaagatgccgcagctgacggcaagcgccatagtcagcccgcacggcgacgagagcccccggggcagcggcggaggcggccccgcgtcggcctctgggcccgccgcctctgagagcaggcccttgccgcgcgtgcatcgggcgcgcggggcaccccggcagcagggccccgggaccggcacccgcgacgttttccagaagagccgtttcgccccgcgcggcgccccgcactttcgtttcatcatagccgggcggcaggctgggaggcgctgccgcgggcgccttttccagactgccttccccgcgccgtacgggcctagcccggcctcgcgctacgtgcagaaactgcccatgatcggccgtaccagccgccccgcccgccggtgggcgctctcggactactcgctgtacttgccgctctgagtcagtggccccttcgttccttgtaaataaatcccgcccccggaaa

SEQ ID NO: 2984 - DNA, 1343 bp, Homo Sapiens
  NM_006476
cgagtggctgccccacaaaatgcctgcttctctgcggaatcctactgttcttcacatgctctctaataccatcttttcatatccactttctcttccatgttgaaaaattaaattgacaggctggattctgcaaagatctttggacatttaagtatcttcgaccggcgcgaaaagaggcggcctgaccttggaagtgggacggggtcctgcagcgggtccttccggcgggtgacattcagccggcggttcggggcgacggactctccattccagaaccatggcccaatttgtccgtaaccttgtggagaagaccccggcgctggtgaacgctgctgtgacttactcgaagcctcgattggccacattttggtactacgccaaggttgagctggttcctcccacccctgctgagatccctagagctattcagagcctgaaaaaaatagtcaatagtgctcagactggtagcttcaaacagctcacagttaaggaagctgtgctgaatggtttggtggccactgaggtgttgatgtggttttatgtcggagagattataggcaagcggggcatcattggctatgatgtttgaagaccaatctttaacatctgattatatttgatttattatttgagtgttgttggaccatgtgtgatcagactgctatctgaataaaataagatttgtcaaaactcagtgttttctccatcagatactccatgaaaggtcacaatttctcttgatattaagctgggttgtctttaaacaaccctaaatacacgtctgtttagcccgcaattggaaaggatatatgtggcaatattaacctggtacatgaatatatggggataacattttaatttgaaggtttggaatatatatatttaagctttatttccagaacagtgagggttaggtcttgggaaaactataacttgccaaagtagaagaaatagtagtaccatatgccaaagtgatagagatgaatcatgtcagtagttagaataacatttcaactgttttctttgctaaaatcacagaaagaccctattgacaacatctatgtctgtaaaaatgttagagtacttgtcatcttgaatatagcctccccaagagagaacagggtggtattctaagtatgtttctttgtaacatctttagcagtaggacagagccatacatgtgaaatctgatttttatgtgtgttattcgtttgtctggttttactacctttgcaaaaacaaaataccccaaagatatttaaacaaggttataatttagcatcttccctggatctaaatagtatattatatcctgaaataaatgaaatgattgctataaaaaa

SEQ ID NO: 2985 - DNA, 2418 bp, Homo Sapiens
  NM_006480
tagagacacttcctgtggcagagaaaagaggtagtgagcggtgtttcaggatgtgagggcccgcaggagccgagtcaggctctctccactgcctgcccgccaccgtgcaagctctggccggcgctgcccacagtccccatggtgggcagcccccgcggcggggacccctgatcggcagcggcatgccagggaagcccaagcacctgggcgtccccaacgggcgcatggttctggctgtgtcagatggagagctgagcagcacgacggggccccagggccagggcgagggccgcggcagctctctcagcatccacagcctccccagtggtcccagcagccccttcccaaccgaggagcagcctgtggccagctgggccctgtccttcgagcggctgttgcaggacccgctgggcctggcttacttcactgagttcctgaagaaggagttcagcgcggaaaacgtgactttctggaaggcctgcgagcgcttccagcagatcccggccagcgatacccagcagctagctcaggaggcccgcaacatctaccaggagttcctgtccagccaggcgctgagcccagtgaacatcgaccgtcaggcctggcttggcgaggaggtgctggccgagccccggccggacatgtttcgggcacagcagcttcagatcttcaacttgatgaagttcgacagctatgcgcgcttcgtcaagtccccgctgtaccgcgagtgcctgctagccgaagccgagggacgccctctgcgggaacctggctcctcgcgcctcggcagccctgacgccacgaggaagaagccgaagctgaagcccgggaagtcgctgccgctgggtgtggaggagttggggcagctgccacccgttgagggtcctgggggccgccctctccgcaagtccttccgccgggagctgggcgggactgcaaacgccgccttgcgccgagagtctcagggctccctcaactcctccgccagcctggaccttggcttcctagccttcgtcagcagcaaatctgagagccaccggaagagccttgggagcacggagggtgaaagtgaaagccggccagggaagtactgctgtgtgtacctgcccgatggcacagcctccttggccctggccagacctggcctcaccatccgagacatgctggcagggatctgtgagaaacgaggcctctctctacctgacatcaaggtctacctggtgggcaatgaacaggccctggtcctggatcaggactgcaccgtgctggcggatcaggaagtgcggctggaaaacaggatcaccttcgagctggagctgacggcgctggagcgcgtggtacgaatctcagccaagcccaccaagcggctgcaggaggcgctgcagcccattctggagaagcacggcttgagcccgctagaggtggtgctgcaccggccaggcgagaaacagcctctggatctggggaagctagtgagctcggtggcggcccagagactggttttggacactcttccaggtgtgaagatctccaaagcccgtgacaaatctccctgccgcagccagggctgcccacctagaactcaggataaggccacccatccccctccagcgtcccccagttctctggtgaaggtgcccagtagtgccactggaaagcggcagacctgtgacatcgaaggcctggtggagctgctgaaccgggtgcagagcagcggggcccacgaccagaggggccttctgaggaaagaggacctggtacttccagaatttctgcagctgcccgcccaagggcccagctccgaggagaccccaccacagaccaaatcagcagcccagcccatcgggggatccttgaactccaccaccgactcagccctctgacagctacccaacagtccaggacagctgcatggcacccggcgggccgagcatgccatgggtccgctctgcatgccctgtctgtgccatgagtgtccctggccccttcctgccatgggcaggcccgcaggaagagccggtaggggtggaaaggggactcagatgagacacaccccacagctgccaccgccttgtccctcaacaagctcacccccaatcccttgcagccaggccacaatgggggaggtgagtccagccccttggaacaggcttgcccaacatggagggatggcgttggcagtgccagcctccccagcctgtgccaagcttcaacaggggcaagaggaggggccggcccctcctcaggaagctggtatgagtaaggccttgagggtgcaggcaggcagccctgtaccccacccacatagactatactgtacatacagattttgcagtaggcttggggcagctgggtttgtccttgatgtatgatactgttattataataattattattattctgccaaaaaaaaaaaaa

SEQ ID NO: 2986 - DNA, 2009 bp, Homo Sapiens
  NM_006495
agaaactatttcagtttgctagaggaacattttaaatctgaattgaaccacccattttcctttcttagccaaatcaccaaaatgtccagttagaacaagaatttagcattctgcaaaagaagttaacagctgagataacgaggaaatattctgaaatggatcccaaatatttcatcttaattttgttttgtggacacctgaacaatacatttttttcaaagacagagacaattacaacagagaagcagtcacagcctaccttattcacatcatcaatgtcacaggtattggctaattctcaaaacacaacagggaatcctttgggtcaaccaacacaattcagcgacactttttctggacaatcaatatcacctgccaaagtcactgctggacaaccaacaccagctgtctatacctcttctgaaaaaccagaagcacatacttctgctggacaaccacttgcctacaacaccaaacaaccaacaccaatagccaacacctcctcccagcaagccgtgttcacctctgccagacaactaccatctgcccgtacttctaccacacaaccaccaaagtcatttgtctatacttttactcaacaatcatcatctgtccagatcccttctagaaaacaaataactgttcataatccatccacacaaccaacatcaactgtcaaaaattcacctaggagtacaccaggatttatcttagatactaccagtaacaaacaaaccccacaaaaaaacaattataattcaatagctgccatactaattggtgtacttctgacttctatgttggtagctataatcatcattgtactttggaaatgcttaaggaaaccagttttaaatgatcaaaattgggcaggtagatctccatttgctgatggagaaacccctgacatttgtatggataacatcagagaaaatgaaatatccacaaaacgtacatcaatcatttcacttacaccctggaaaccaagcaaaagcacacttttagcagatgacttagaaattaagttgtttgaatcaagtgaaaacattgaagactccaacaaccccaaaacagagaaaataaaagatcaagtaaatggtacatcagaagatagtgctgatggttcaacagttggaactgctgtttcttcttcagatgatgcagatctgcctccaccacctccccttctggatttggaaggacaggaaagtaaccaatctgacaaacccacaatgacaattgtatctcctcttccaaatgattctactagtctccctccatctctggactgtctcaatcaagactgtggagatcataaatctgagataatacaatcatttccaccgcttgactcacttaacttgcccctgccaccagtagattttatgaaaaaccaagaagattccaaccttgagatccagtgtcaggagttctctattcctcccaactctgatcaagatcttaatgaatccctgccacctccacctgcagaactgttataaatattacaacttgctttttagctgatcttccatcctcaaatgactcttttttctttatatgttaacatatataaaatggcaactgatagtcaattttgatttttattcaggaactatctgaaatctgctcagagcctatgtgcatagatgaaacttttttttaaaaaaagttatttaacagtaatctatttactaattatagtacctatctttaaagtatagtacattttacatatgtaaatggtatgtttcaataatttaagaactctgaaacaatctacatatacttattacccagtacagttttttttcccctgaaaagctgtgtataaaattatggtgaataaacttttatgtttccatttcaaagaccagggtggagaggaataagagactaagtatatgcttcaagttttaaattaatacctcaagtattaaataaatattccaagtttgtgggaatgggagattaaaatgcatgtttgagaatagaaaaaaaaaaaaaaa

SEQ ID NO: 2987 - DNA, 4730 bp, Homo Sapiens
  NM_006496
ggaagtgtcgtaaacgtcggatatccggttcttctgggcgctaagggagctgacggagagggccaccgcccagcaatagacggtgcctcagcctgccgagccgcagtttccgtggtgtgagtgagtccgggcccgtgtcccctctcccgccgccgccatgggctgcacgttgagcgccgaagacaaggcggcagtggagcgaagcaagatgatcgaccgcaacttacgggaggacggggaaaaagcggccaaagaagtgaagctgctgctactcggtgctggagaatctggtaaaagcaccattgtgaaacagatgaaaatcattcatgaggatggctattcagaggatgaatgtaaacaatataaagtagttgtctacagcaatactatacagtccatcattgcaatcataagagccatgggacggctaaagattgactttggggaagctgccagggcagatgatgcccggcaattatttgttttagctggcagtgctgaagaaggagtcatgactccagaactagcaggagtgattaaacggttatggcgagatggtggggtacaagcttgcttcagcagatccagggaatatcagctcaatgattctgcttcatattatctaaatgatctggatagaatatcccagtctaactacattccaactcagcaagatgttcttcggacgagagtgaagaccacaggcattgtagaaacacatttcaccttcaaagacctatacttcaagatgtttgatgtaggtggccaaagatcagaacgaaaaaagtggattcactgttttgagggagtgacagcaattatcttctgtgtggccctcagtgattatgaccttgttctggctgaggacgaggagatgaaccgaatgcatgaaagcatgaaactgtttgacagcatttgtaataacaaatggtttacagaaacttcaatcattctcttccttaacaagaaagacctttttgaggaaaaaataaagaggagtccgttaactatctgttatccagaatacacaggttccaatacatatgaagaggcagctgcctatattcaatgccagtttgaagatctgaacagaagaaaagataccaaggagatctatactcacttcacctgtgccacagacacgaagaatgtgcagtttgtttttgatgctgttacagatgtcatcattaaaaacaacttaaaggaatgtggactttattgagaagcatggatgttagtgaaagttactacagtgtggagtgttgagaccagacaccttttgctgtctcatggggcagctacaagcatgaacgggaccagggaatggcagcagcatgcagaatcttagcactctttagcacaatattttgtattagggaacttttaattgacatgagatgctaaagtcagacattggaattggaagaactataaagtgtgattcgatcgtcaagacatcacttggatttcttaatcttaaatgcttatggaagatgtgaagttgaggtgctgcattctagaacttcaatatgtagcttactctttttttccccccttcttaaaccaccagtggttcatttttaaggttttttcatcaagagaagaataactttactaaattttatttctttatttgcaaaagaatctttattaaaacaaacaatcttaactatgcacatgatgtgaccagatcatcttgaaaatattcctctttagtaggaactctttgtttttaactcttggtatggtcagaatataatacttccataattacttataattctttccggttactggggctataaatacaactttttaaatgaaatttatgttattatcctgctcaaagtaccattatggtttccatatggtaattacattggaaagttctgcaataagattctagttctctcttttctttaagcttatggttgaaggttaaccttgtttgtgcagattaccaaattactgctgatgtagtatgataaagtcagcttcttggatacagacacacccagggcagctgccaatcagaaatgcaaattgctaaattccaaacagaaccagtgactttgctgctacatatttactaaattgaccactttgattcttgcttgtttgtctcagttatagggagttttgtacatggtgcctcttgttttccatcttcatggccttttctgttgagaaacatctaaagtgtattaacagtgcatgcttttactttgtaaatgtggtgccaaatccctgtttgccatcgtttttactgtaccgatgttaactgtagtaatccttagccagtatgttcttttgctgaaactgttgcattttgggacttttttccactttgtcatgtgtacatttttaatctgttatagttggcggcagtattaaaatggtgagtaaagagcccaggtttgctcctgtttgtaactagtcttttctggaaatactgtcttctgtttccttttgcctttgcagaatgtgctttagcctttgtctgagaatgggtttaggtagaagggtttcctgaaagtctagtcttttggtgtaatagtattgttgaaccttaggttttatgttatatctgcatatgagtgatatgtgatcatgattcattttgcagatttacattttgcttgtgtggaaagttacgttcacttcaacctacagacccttttgtataatgtacagcaaatgtcattaaatattgaatgctctattgggggaagacaaatgaagagaatgcattttgagcatttcaaatcagtagtttgggcagtgccttttggggtccaatctttttggattggattctatttcatcttttgatgtgacttttcactagtttacaaaaaaaaggttggtggtcaacaaaaaaagcaagtcatagcagttcagtgcctttgttggtagtttttaactttttttgtgattctttttggaaaatcatagcttacagatggtataactgtattatataatggaattttctttaggtgtgggaaaacttgatctgaaagaaaattatcagcttcaattggcgattgattcagtgcccacaatgtaaacagggttggtagttgttactcattttgaatataccttttccttattgtattctgtaatataggatcctggaaatgagacctggtggaatattattttcaactgtagtctttctatactgtggactaatgaaatggtgttgttgataatctaaaataaccaataatccaaaaaagttcattttactttgaatttgtattttcatttgaatatctatctgatatgttaaatttttagcccttctgttaaagaaaaatagcaggtccccatttttctgcctctgtaccatttacatttgctctctgtttgttaacatgaagatcactcttatttcaccatcccaaataacttatctaaatgcacattccttgaggacacagggagacaatttaagtcagtagtttttaatatgacttaagtaaaaatcacttggacccatctaagggattgacttttggctggtgggctggcaatcgattttttttttttttttttttttttgagacggagtctcgctctgtcgcccaggctggagtgcagtggcgcgatctcggcttattgcaagctctgcctcccgggttcatgctattctcctgctgggactaccaggttcctgccaccacgcccagctaatttttttgtatgtcttagtagagacggggtttaaccgtgttagccaggatggtcttgatcccctgacctcgtgatctgcctgcctcagcctcccaaagtgctgggattacaggcgtgagccaccgcacctggctggcaatttataatttttaaaaggtgattctgattaccagccaggcttgcaaatcactggtttgtattgaaataaaagatattttcttgtagcagggctaaaatgtgggatgaaacattaaatctactagcctgaaaaaaaactttggcatttgtaatcaaagaagctgaaagttgccttgtgtgtttcctctgaagaatgctggagatttgtgatggataatgtttcagaattcaggtgcctatgctttggaccatcaaagaagccattagtctctgtgtaaagaagaagtattcttaatggacagtcccccctaaccttataaattcagctttgcaacagatttcacctcctagcatgaaaattccaaaaactttaacaattactcataagtggatcttgagatgacattttcatcttggacagtttgaattctaaatctctagttcacagtgaatcgttttttaaatttttactgatggatcgttatttttcacaaggtactacattcttacaatgtaagactagatggaccaaaattttaaaaaaaacttcttgccttgtttttttaattttcatatatattctatttgttgtatatacacattagactattttaaaataacagctggtttttgtaattcattcattcaccctatattcttatattctgctcattattctctcatttatagctgtgacattctttggacattacttgcctggcctgattagttacttaatataatttattcatttgcttagcatgtgtgacatagttctggaatttcctgttgcagaactccttgctgtattgcagtcatatataaggtaaagtcagtctcttgttcctattaaaaagctaccattgattattttccctttttacatgttc

SEQ ID NO: 2988 - DNA, 543 bp, Homo Sapiens
  NM_006498
gaccttgagggagttaatgtgtaatattctaggatataagcttgaccacgagttgagaccctgagcacaggcctccaggagccgctgggagctgccgccaggagctgtcaccatgacgggggaacttgaggttaagaacatggacatgaagccggggtcaaccctgaagatcacaggcagcatcgccgatggcactgatggctttgtaattaatctgggccaggggacagacaagctgaacctgcatttcaaccctcgcttcagcgaatccaccattgtctgcaactcattggacggcagcaactgggggcaagaacaacgggaagatcacctgtgcttcagcccagggtcagaggtcaagttcacagtgacctttgagagtgacaaattcaaggtgaagctgccagatgggcacgagctgacttttcccaacaggctgggtcacagccacctgagctacctgagcgtaaggggcgggttcaacatgtcctctttcaagttaaaagaataaaagacttccagccgagaaaaaaaaaaaaaaaa

SEQ ID NO: 2989 - DNA, 6281 bp, Homo Sapiens
  NM_006499
tggacttggatccgaggcagacgaggaagctgagaaaaccctggcgttgaccccgtggacctgggcgccccgggaaggccagcgcttggtccaggcaggcggggcctgtgcggtgaccaccctggtcctgaaaagtcccagccccgagcgccctccctcctagacctggaggcctggaacagccagccgcccacggacgccagagccgggaaccctgacggcacttagctgctgacaaacaacctgctccgtggagcgcctgaaacaccagtctttggggccagtgcctcagtttcaatccaggtaacctttaaatgaaacttgcctaaaatcttaggtcatacacagaagagactccaatcgacaagaagctggaaaagaatgatgttgtccttaaacaacctacagaatatcatctataacccggtaatcccgtttgttggcaccattcctgatcagctggatcctggaactttgattgtgatacgtgggcatgttcctagtgacgcagacagattccaggtggatctgcagaatggcagcagcatgaaacctcgagccgatgtggcctttcatttcaatcctcgtttcaaaagggccggctgcattgtttgcaatactttgataaatgaaaaatggggacgggaagagatcacctatgacacgcctttcaaaagagaaaagtcttttgagatcgtgattatggtgctgaaggacaaattccaggtggctgtaaatggaaaacatactctgctctatggccacaggatcggcccagagaaaatagacactctgggcatttatggcaaagtgaatattcactcaattggttttagcttcagctcggacttacaaagtacccaagcatctagtctggaactgacagagataagtagagaaaatgttccaaagtctggcacgccccagcttcctagtaatagaggaggagacatttctaaaatcgcacccagaactgtctacaccaagagcaaagattcgactgtcaatcacactttgacttgcaccaaaataccacctatgaactatgtgtcaaagaggctgccattcgctgcaaggttgaacacccccatgggccctggacgaactgtcgtcgttaaaggagaagtgaatgcaaatgccaaaagctttaatgttgacctactagcaggaaaatcaaaggatattgctctacacttgaacccacgcctgaatattaaagcatttgtaagaaattcttttcttcaggagtcctggggagaagaagagagaaatattacctctttcccatttagtcctgggatgtactttgagatgataatttattgtgatgttagagaattcaaggttgcagtaaatggcgtacacagcctggagtacaaacacagatttaaagagctcagcagtattgacacgctggaaattaatggagacatccacttactggaagtaaggagctggtagcctacctacacagctgctacaaaaaccaaaatacagaatggcttctgtgatactggccttgctgaaacgcatctcactgtcattctattgtttatattgttaaaatgagcttgtgcaccattaggtcctgctgggtgttctcagtccttgccatgaagtatggtggtgtctagcactgaatggggaaactgggggcagcaacacttatagccagttaaagccactctgccctctctcctactttggctgactcttcaagaatgccattcaacaagtatttatggagtacctactataatacagtagctaacatgtattgagcacagattttttttggtaaaactgtgaagagctaggatatatacttggtgaaacaaaccagtatgttccctgttctcttgagcttcgactcttctgtgcgctactgctgcgcactgctttttctacaggcattacatcaactcctaaggggtcctctgggattagttatgcagatattaaatcacccgaagacactaacttacagaagacacaactccttccccagtgatcactgtcataaccagtgctctaccgtatcccatcactgaggactgatgttgactgacatcattttctttatcgtaataaacatgtggctctattagctgcaagctttaccaagtaattggcatgacatctgagcacagaaattaaggcaaaaaaccaaagcaaaacaaatacatggtgctgaaattaacttgatgccaagcccaaggcagctgatttctgtgtatttgaacttagggcaaatcagagtctacacagacgcctacagaaagtttcaggaagaggcaagatgcattcaatttgaaagatatttatgggcaacaaagtaaggtcaggattagacttcaggcattcataaggcaggcactatcagaaagtgtacgccaactaagggacccacaaagcaggcagaggtaatgcagaaatctgttttgttcccatgaaatcaccaatcaaggcctccgttcttctaaagattagtccatcatcattagcaactgagatcaaagcactcttccactttacgtgattaaaatcaaacctgtatcagcaagttaaatggttccatttctgtgatttttctattatttgaggggagttggcagaagttccatgtatatgggatctttacaggtcagatcttgttacaggaaatttcaaaggtttgggagtggggagggaaaaaagctcagtcagtgaggatcattttatcacattagactggggcagaactctgccaggatttaggaatattttcagaacagattttagatattatttctatccatatattgaaaagaataccattgtcaatcttatttttttaaaagtactcagtgtagaaatcgctagcccttaattcttttccagcttttcatattaatgtatgcagagtctcaccaagctcaaagacactggttgggggtggagggtgccacagggaaagctgtagaaggcaagaagactcgagaatcccccagagttatttttctccataaagaccatcagagtgcttaactgagctgttggagactgtgaggcatttaggaaaaaaatagcccactcacatcattccttgtaagtcttaagttcattttcattttacgtggaggaaaaaaatttaaaaagctattagtatttattaatgaattttactgagacatttcttagaaatatgcacttctatactagcaagctctgtctctaaaatgcaagttggccttttgcttgccacatttctgcattaaacttctatattagcttcaaaggcttttaaactcaatgcgaacattctacgggatgttcttagatgcctttaaaaagggggcagatctaattttatttgaaccctcactttccaacttcaccatgacccagtactagagattagggcacttcaaagcattgaaaaaaatctactgatacttactttcttagacaagtagttcttagttaaccaccaatggaactgggttcattctgaatcctggaggagcttcctcgtgccacccagtgtttctgggccctctgtgtgagcagccaggtgtgagctgttttagaagcagcgtgttgccttcatctctcccgtttcccaaaagaacaaaggataaaggtgacagtcacactcctgggttaaaaaaagcattccagaaccacttctctttatgggcacaacaaagaaacgaaggctgaagttcgcctacccaaaatgaaaagtaggctttacagtcaaaagtacttctgttgattgctaaataacttcattttcttgaaatagagcaactttgagtgaaatctgcaacatggataccatgtatgtaagatactgctgtacagaagagttaaggcttacagtgcaaatgaggcgtcagctttgggtgctaaaattaacaagtctaatattattaccatcaatcaggaagagaataataaatgtttaaacaaacacagcagtctgtataaaaataccgtgtatcatttactctttctgcagctctatacgataggcaggagaggcttatgtggcagcacaagccaggtggggattttgtaaagaagtgataaaacatttgtaagtaatccaagtaggtgtattaaggcaccaaaagtaacatggcacccaacacccaaaaataaaaatatgaaatatgagtgtgaactctgagtagagtatgaaacaccacagaaagtcttagaaatagctctggagtggctctcccaggacagtttccagttgctgaatagtcttttggcactgatgttctacttcttcacattcatctaaaaaaaaaaaaaaaaaatcaaaattaaaatctgagtcagtccgcctgcctcggttctcattagtttaattcttaatgccttgcactttccggcaatcattcaatcaaaagagtgaaatgaagcacattaacaaagcaggaggcgccacggaccgcctccctccacaccgctccttccgccttcattccttgcccacaggcttgcactggaagctgaataagaatccccaaaactcaaacttcctagggatgccacccctttagtagctcacacctcccccctccaagagctaagaaacaaaggagaatgtacttttgtagcttagataagcaatgaatcagtaaaggactgatctacttgctccaccacccctcccttaataataacatttactgttatttcctgggcctaagactctatgttccagaactgtcacagctccccatgtcacactcactagcttgtgatctttgtcaaataactgaaatcttttaagcctctagtttcttcctttgtaaaacagagataaaatgttgtggtttttaagtgagataatccaagtaaagcacctaacatggagtagtgaatgaacatcggttgctactaaaagtggacatcctactgcatccttaatgccactaggcatttccatacaatctggggaccaaaacttcaatcatataaatgtatgaggttaattaaaaacactactgtaatctgcttgtatgatcacaaaccaccacaaaagaaaagatcgtgaagattacactgtaaacggactctcaaatgatcaggaggtggtcacttcgcaacttgctccctccacccaactcaaaacaggagctcgagcctgcctgtatttgagactggagctgcctgtatgaggactggatcaactgctagtcacgttatatccaaatctgcattatcattgggcacattttcacagaattttactgaattattccttaattgtttaatggttgggaatagtttgggaattaccttccatcaactctgctaagaaaggaatggattctggtagcaagacaatataattctcctttagtttttcagccagtgctaacacagtaatcaaagcagcaaatcgaacctgaaagggataaaagagcaaagaaataaaaagtagtgttactgtatttattatcttaagagctgtactgacttgagacaagctctaactttttaaacattagttcacatgcgtttattcacttcattatgttcattaagctttcatcttagaataccagtttcaccatttgggagctgtttgtaatatgtgcaaccttataaatagtgttttccaaactgtgtcccaggactgcaaatctttaatgtgaaatgtctttttataatctcttcctttaaaaaaaaccaataaaataaaatgccgcatgcaaactcaagtgtgtcaccagattttacttcattggcgctcgccagcccgccaggctggcaataaagtgcctccagccacctctggcaggtctcctcacccacagcccctgactggtcaccactataattgtatgaggggccaggacagtcgcttgggataaactcccatctcagcactgaataaaaaacattctgtgtcacaatatcctagttttggggctttaaaaacgtctaggtgttcctcacatgccttgtctataataaggaaagcaagcagtagttgggtattgttagcttttgaaacaaaagccctactggtcttctaattttggatattttaattaaagaatatctggacagtacaaagtgaattattaaaaaaccatttgtaactacctagattcaatcaggatttccttgatttgtgcaaagtaaaatattacaataaatttgatactgctacttgtataaaaacctatggtttaaaatgtgggggttcatcataatagtctcattgttagcatatcctaataaagaatttgaactaataaatcctattaataaaa

SEQ ID NO: 2990 - DNA, 1450 bp, Homo Sapiens
  NM_006503
gatcatcccaggccacacagaggccggcttggtcactatggaggagataggcatcttggtggagaaggctcaggatgagatcccagcactgtccgtgtcccggccccagaccggcctgtccttcctgggccctgagcctgaggacctggaggacctgtacagccgctacaagaagctgcagcaagagctggagttcctggaggtgcaggaggaatacatcaaagatgagcaaaagaacctgaaaaaggaatttctccatgcccaggaggaggtgaagcgaatccaaagcatcccgctggtcatcggacaatttctggaggctgtggatcagaatacagccatcgtgggctctaccacaggctccaactattatgtgcgcatcctgagcaccatcgatcgggagctgctcaagcccaacgcctcagtggccctccacaagcacagcaatgcactggtggacgtgctgccccccgaagccgacagcagcatcatgatgctcacctcagaccagaagccagatgtgatgtacgcggacatcggaggcatggacatccagaagcaggaggtgcgggaggccgtggagctcccgctcacgcatttcgagctctacaagcagatcggcatcgatcccccccgaggcgtcctcatgtatggcccacctggctgtgggaagaccatgttggcaaaggcggtggcacatcacacaacagctgcattcatccgggtcgtgggctcggagtttgtacagaagtatctgggtgagggcccccgcatggtccgggatgtgttccgcctggccaaggagaatgcacctgccatcatcttcatagacgagattgatgccatcgccaccaagagattcgatgctcagacaggggccgacagggaggttcagaggatcctgctggagctgctgaatcagatggatggatttgatcagaatgtcaatgtcaaggtaatcatggccacaaacagagcagacaccctggatccggccctgctacggccaggacggctggaccgtaaaattgaatttccacttcctgaccgccgccagaagagattgattttctccactatcactagcaagatgaacctctctgaggaggttgacttggaagactatgtggcccggccagataagatttcaggagctgatattaactccatctgtcaggagagtggaatgttggctgtccgtgaaaaccgctacattgtcctggccaaggacttcgagaaagcatacaagactgtcatcaagaaggacgagcaggagcatgagttttacaagtgacccttcccttccctccaccacaccactcaggggctggggcttctctcgcacccccagcacctctgtcccaaaacctcattcccttttttctttacccaggattggtttcttcaataaatagataagatcgaatccatttaaaaaaaaaaaaaaaaa

SEQ ID NO: 2991 - DNA, 2297 bp, Homo Sapiens
  NM_006509
ggccccgcgccccgcgcagccccgggcgccgcgcgtcctgcccggcctgcggccccagcccttgcgccgctcgtccgacccgcgatcgtccaccagaccgtgcctcccggccgcccggccggcccgcgtgcatgcttcggtctgggccagcctctgggccgtccgtccccactggccgggccatgccgagtcgccgcgtcgccagaccgccggctgcgccggagctgggggccttagggtcccccgacctctcctcactctcgctcgccgtttccaggagcacagatgaattggagatcatcgacgagtacatcaaggagaacggcttcggcctggacgggggacagccgggcccgggcgaggggctgccacgcctggtgtctcgcggggctgcgtccctgagcacggtcaccctgggccctgtggcgcccccagccacgccgccgccttggggctgccccctgggccgactagtgtccccagcgccgggcccgggcccgcagccgcacctggtcatcacggagcagcccaagcagcgcggcatgcgcttccgctacgagtgcgagggccgctcggccggcagcatccttggggagagcagcaccgaggccagcaagacgctgcccgccatcgagctccgggattgtggagggctgcgggaggtggaggtgactgcctgcctggtgtggaaggactggcctcaccgagtccacccccacagcctcgtggggaaagactgcaccgacggcatctgcagggtgcggctccggcctcacgtcagcccccggcacagttttaacaacctgggcatccagtgtgtgaggaagaaggagattgaggctgccattgagcggaagattcaactgggcattgacccctacaacgctgggtccctgaagaaccatcaggaagtagacatgaatgtggtgaggatctgcttccaggcctcatatcgggaccagcagggacagatgcgccggatggatcctgtgctttccgagcccgtctatgacaagaaatccacaaacacatcagagctgcggatttgccgaattaacaaggaaagcgggccgtgcaccggtggcgaggagctctacttgctctgcgacaaggtgcagaaagaggacatatcagtggtgttcagcagggcctcctgggaaggtcgggctgacttctcccaggccgacgtgcaccgccagattgccattgtgttcaagacgccgccctacgaggacctggagattgtcgagcccgtgacagtcaacgtcttcctgcagcggctcaccgatggggtctgcagcgagccattgcctttcacgtacctgcctcgcgaccatgacagctacggcgtggacaagaagcggaaacgggggatgcccgacgtccttggggagctgaacagctctgacccccatggcatcgagagcaaacggcggaagaaaaagccggccatcctggaccacttcctgcccaaccacggctcaggcccgttcctcccgccgtcagccctgctgccagaccctgacttcttctctggcaccgtgtccctgcccggcctggagccccctggcgggcctgacctcctggacgatggctttgcctacgaccctacggcccccacactcttcaccatgctggacctgctgcccccggcaccgccacacgctagcgctgttgtgtgcagcggaggtgccggggccgtggttggggagacccccggccctgaaccactgacactggactcgtaccaggccccgggccccggggatggaggcaccgccagccttgtgggcagcaacatgttccccaatcattaccgcgaggcggcctttgggggcggcctcctatccccggggcctgaagccacgtagccccgcgatgccagaggaggggcactgggtggggagggaggtggaggagccgtgcaatcccaaccaggatgtctagcacccccatccccttggcccttcctcatgcttctgaagtggacatattcagccttggcgagaagctccgttgcacgggtttccccttgagcccattttacagatgaggaaactgagtccggagaggaaaagggacatggctcccgtgcactagcttgttacagctgcctctgtccccacatgtgggggcaccttctccagtaggattcggaaaagattgtacatatgggaggagggggcagattcctggccctccctccccagacttgaaggtggggggtaggttggttgttcagagtcttcccaataaagatgagtttttgagcctccgggaaaaaaaaaaaaaaaaaa

SEQ ID NO: 2992 - DNA, 2157 bp, Homo Sapiens
  NM_006515
acaagtcccagcatccaccgcgcggcccaggactgtcagggtagtgggcgttgcgtgaggcgggtaaatgttcgcggaagcggcaaagacgacacggccttgtgggatggcggagtttaaggagaagcctgaggccccgactgagcagctggatgtcgcgtgcggccaggaaaacttgccggtgggcgcgtggcccccgggggccgcgccggcgcccttccagtacactcctgatcatgtagttggacctggagcagacattgatcccactcaaataacctttcccggatgcatttgtgtcaaaactccctgcctccctggcacttgctcctgtctccgccatggagagaactatgatgataactcatgccttagagatataggatctggaggaaagtatgcagagcctgtttttgaatgcaatgtcctgtgccgatgcagtgaccactgcagaaacagagtggtccagaaaggtctacagttccacttccaagtgttcaagacgcataaaaaaggctggggacttcgtaccttggaatttataccgaaaggaaggtttgtctgtgaatatgctggtgaggttttaggattctctgaagttcagagaagaattcacttacaaacaaaatccgactccaattacattatagccatcagggaacatgtttataatgggcaggtaatggaaacatttgttgaccctacttatataggaaatattggaagattccttaatcattcttgtgagccaaaccttttgatgattcctgtccgaattgactcaatggtacctaagttggcactttttgcagccaaagatattgtgccagaagaagaactctcttatgattattcaggaagatatcttaatctaacagtcagtgaagacaaagaaaggctagatcatgggaaactaaggaaaccttgttactgtggtgccaaatcatgtactgctttcctgccttttgacagttctctgtactgccccgtagaaaagtcgaacatcagttgtggaaatgagaaggaacccagcatgtgtggctcagccccttctgtgttcccctcctgcaagcgattgacccttgagactatgaaaatgatgttagacaaaaagcaaattcgagcaattttcttattcgagttcaaaatgggtcgtaaagcagcagaaacaactcgcaacatcaacaatgcatttggcccaggaactgctaacgaacgtacagtgcagtggtggttcaagaagttttgcaaaggagatgagagccttgaagatgaggagcgtagtggccggccatcagaagttgacaacgaccagttgagagcaatcatcgaagctgatccccttacaactacacgagaagttgctgaagaactcaatgtcaaccattctacggtcgttcgacatttgaagcaaattggaaaggtgaaaaagctcgataagtgggtgcctcatgagctgactgaaaatcaaaaaaatcgtcgttttgaagtgtcatcttctcttattctacgcaaccacaacgaaccatttctcgatcggattgtgacgtgtgatgaaaagtggattttatatgacaaccggcgacgatcagctcagtggttggatcaagaagaagctccaaagcacttcccaaagccaatcttgcacccaaaaaaggtcatggtcactatttggtggtctgctgctggtctgatccactacagctttctgaatcccggtgaaaccattacatctgagaagtatgctcaggaaatcgatgagatgaaccaaaaactgcaacgcctgcagctggcattggtcaacagaaagggcccaattcttctccacgacaatgcccgaccgcatgttgcacaacccacacttcaaaagttgaatgaattgggctatgaagttttgcctcatccaccgtattcacctgacctcttgccaaccaactaccacgtctttaagcatctcaacaactttttgcagggaaaacgcttccacaaccagcaggatgcagaaaatgctttccaagagttcgtcgaatcccaaagcacggatttttacgctacaggaataaaccaacttatttctcgttggcaaaaatgtgttgattgtaatggttcctattttgattaataaaaatgcgttgagcctaaaaaaaaaaaaaaaaa

SEQ ID NO: 2993 - DNA, 3687 bp, Homo Sapiens
  NM_006516
tccaccattttgctagagaaggccgcggaggctcagagaggtgcgcacacttgccctgagtcacacagcgaatgccctccgcggtcccaacgcagagagaacgagccgatcggcagcctgagcgaggcagtggttagggggggccccggccccggccactcccctcaccccctccccgcagagcgccgcccaggacaggctgggccccaggccccgccccgaggtcctgcccacacacccctgacacaccggcgtcgccagccaatggccggggtcctataaacgctacggtccgcgcgctctctggcaagaggcaagaggtagcaacagcgagcgtgccggtcgctagtcgcgggtccccgagtgagcacgccagggagcaggagaccaaacgacgggggtcggagtcagagtcgcagtgggagtccccggaccggagcacgagcctgagcgggagagcgccgctcgcacgcccgtcgccacccgcgtacccggcgcagccagagccaccagcgcagcgctgccatggagcccagcagcaagaagctgacgggtcgcctcatgctggccgtgggaggagcagtgcttggctccctgcagtttggctacaacactggagtcatcaatgccccccagaaggtgatcgaggagttctacaaccagacatgggtccaccgctatggggagagcatcctgcccaccacgctcaccacgctctggtccctctcagtggccatcttttctgttgggggcatgattggctccttctctgtgggccttttcgttaaccgctttggccggcggaattcaatgctgatgatgaacctgctggccttcgtgtccgccgtgctcatgggcttctcgaaactgggcaagtcctttgagatgctgatcctgggccgcttcatcatcggtgtgtactgcggcctgaccacaggcttcgtgcccatgtatgtgggtgaagtgtcacccacagcccttcgtggggccctgggcaccctgcaccagctgggcatcgtcgtcggcatcctcatcgcccaggtgttcggcctggactccatcatgggcaacaaggacctgtggcccctgctgctgagcatcatcttcatcccggccctgctgcagtgcatcgtgctgcccttctgccccgagagtccccgcttcctgctcatcaaccgcaacgaggagaaccgggccaagagtgtgctaaagaagctgcgcgggacagctgacgtgacccatgacctgcaggagatgaaggaagagagtcggcagatgatgcgggagaagaaggtcaccatcctggagctgttccgctcccccgcctaccgccagcccatcctcatcgctgtggtgctgcagctgtcccagcagctgtctggcatcaacgctgtcttctattactccacgagcatcttcgagaaggcgggggtgcagcagcctgtgtatgccaccattggctccggtatcgtcaacacggccttcactgtcgtgtcgctgtttgtggtggagcgagcaggccggcggaccctgcacctcataggcctcgctggcatggcgggttgtgccatactcatgaccatcgcgctagcactgctggagcagctaccctggatgtcctatctgagcatcgtggccatctttggctttgtggccttctttgaagtgggtcctggccccatcccatggttcatcgtggctgaactcttcagccagggtccacgtccagctgccattgccgttgcaggcttctccaactggacctcaaatttcattgtgggcatgtgcttccagtatgtggagcaactgtgtggtccctacgtcttcatcatcttcactgtgctcctggttctgttcttcatcttcacctacttcaaagttcctgagactaaaggccggaccttcgatgagatcgcttccggcttccggcaggggggagccagccaaagtgacaagacacccgaggagctgttccatcccctgggggctgattcccaagtgtgagtcgccccagatcaccagcccggcctgctcccagcagccctaaggatctctcaggagcacaggcagctggatgagacttccaaacctgacagatgtcagccgagccgggcctggggctcctttctccagccagcaatgatgtccagaagaatattcaggacttaacggctccaggattttaacaaaagcaagactgttgctcaaatctattcagacaagcaacaggttttataatttttttattactgattttgttatttttatatcagcctgagtctcctgtgcccacatcccaggcttcaccctgaatggttccatgcctgagggtggagactaagccctgtcgagacacttgccttcttcacccagctaatctgtagggctggacctatgtcctaaggacacactaatcgaactatgaactacaaagcttctatcccaggaggtggctatggccacccgttctgctggcctggatctccccactctaggggtcaggctccattaggatttgccccttcccatctcttcctacccaaccactcaaattaatctttctttacctgagaccagttgggagcactggagtgcagggaggagaggggaagggccagtctgggctgccgggttctagtctcctttgcactgagggccacactattaccatgagaagagggcctgtgggagcctgcaaactcactgctcaagaagacatggagactcctgccctgttgtgtatagatgcaagatatttatatatatttttggttgtcaatattaaatacagacactaagttatagtatatctggacaagccaacttgtaaatacaccacctcactcctgttacttacctaaacagatataaatggctggtttttagaaacatggttttgaaatgcttgtggattgagggtaggaggtttggatgggagtgagacagaagtaagtggggttgcaaccactgcaacggcttagacttcgactcaggatccagtcccttacacgtacctctcatcagtgtcctcttgctcaaaaatctgtttgatccctgttacccagagaatatatacattctttatcttgacattcaaggcatttctatcacatatttgatagttggtgttcaaaaaaacactagttttgtgccagccgtgatgctcaggcttgaaatgcattattttgaatgtgaagtaaatactgtacctttattggacaggctcaaagaggttatgtgcctgaagtcgcacagtgaataagctaaaacacctgcttttaacaatggtaccatacaaccactactccattaactccacccacctcctgcacccctccccacacacacaaaatgaaccacgttctttgtatgggcccaatgagctgtcaagctgccctgtgttcatttcatttggaattgccccctctggttcctctgtatactactgcttcatctctaaagacagctcatcctcctccttcacccctgaatttccagagcacttcatctgctccttcatcacaagtccagttttctgccactagtctgaatttcatgagaagatgccgatttggttcctgtgggtcctcagcactattcagtacagtgcttgatgcacagcaggcactcagaaaatactggaggaaataaaacaccaaagatatttgtcaaaaaaaaaaaaaaaaa

SEQ ID NO: 2994 - DNA, 4396 bp, Homo Sapiens
  NM_006517
gggttcagtagtttgggaagggagctgggggaggcagtggcggctggagtaggtaggcgagtaaaaggaggaggaagggctggggagaagagcgaggctgtagcggctgcctgttgagggaggaagaggtggggggtgtggaggagggggaggagagagagatgacatggggagaggaggaggggggttggacgtgggaggaggaggagagggctcgagggaccgtctgtcgcgggacgggctggccagctggggcgcggagcctggaggaggaggcagcggcagcggcagcagcagccctccgagcagcagcagctgcagcagcagaaacaagtaccagccacaaagcggctcctctggcccaagcagccacagtccccccgccgcgatggcgctgcaaagccaggcgagcgaggaagcaaaggggccctggcaggaggcagaccaggaacagcaggagccggtgggtagcccagagccggagtctgagccggagcctgagcccgagcccgagcccgtgccagtgcccccgcccgagccccagccggagccccagcccctaccggaccccgcacccctgccggagctggagttcgagtccgagcgggtgcacgaacccgagcccacgcctacggtagagacccgcggcaccgcgcgcggcttccagcctcccgaaggtggcttcggctgggtggtggtgttcgctgccacctggtgcaacggctccatcttcggcatccataactctgtcgggatcctctactccatgctgctagaggaggaaaaggaaaaaaatcgccaagtggagttccaagcagcatgggtcggagccctcgcgatgggtatgatcttcttctgttctcccattgtgagtatattcactgaccgtttgggctgccgaatcacagcaaccgcgggggctgccgttgctttcattggcctccataccagctccttcaccagctccctaagcctgcgctacttcacctacgggattctctttggttgtggctgttccttcgcctttcagccatccctcgtcatcctgggccactactttcaacgccgcctgggtctggccaatggtgtggtgtctgctgggagtagcattttctccatgtccttccccttcctcatcagaatgctgggggataagatcaagctggcccaaaccttccaggtgctgagtaccttcatgtttgttcttatgctgctttcactcacctaccggcccctcctgcccagctcccaggacaccccaagcaagagaggtgtccgcaccctgcaccagcgctttctggctcagctcaggaagtacttcaacatgcgagtgttccgccaacgcacttaccgcatctgggccttcggaattgctgctgctgcccttggctactttgttccctatgtacacctgatgaagtatgtggaggaggagttctcagaaatcaaggagacctgggtgctcttggtgtgtattggggctacctcaggccttgggcgtcttgtgtcaggccacatcagtgactccatccctggacttaagaagatctacttgcaggtcctttccttcctgctcctgggcctgatgtccatgatgattcccctgtgccgggacttcgggggccttatcgtcgtctgtcttttcctgggcctttgcgatggcttcttcatcaccatcatggcccccattgcatttgagctggtgggcccaatgcaggcctcacaggccattggctacctcctgggcatgatggccctgccaatgattgctgggccccccattgcaggcctactccgcaactgttttggggactaccatgtggccttctactttgccggtgtgccccccatcatcggggctgtaatcctcttcttcgtccctctgatgcatcaaaggatgttcaagaaagagcagagagattccagcaaggataagatgttggcccctgacccagaccccaatggggagctactgccgggctcccccaaccctgaggaaccaatctaatgcctttcttgccattgtgtgccctttcccagctcttccccttcatcccaccctgctcagcatttacatttttgccaccagcacacttgttcccagacctgcgcacacagcatttcagccacctgacaatctccttggagtcaaagctccaggtgttccaaactcattaactaaattctccccagaatgcttttaaattttccagggcctttctcctcccaggatctgggaaagcttgggaaccacccctggcctttggaacctctccatatactttctaagctctgggggaggaggaggatgggacctcctggacccagcttgttagtcacccactataatcaactgccaaaggtgctactgtgtccccaggagcctaatagggtaggcccaaatctctgtttgctgaggaggtcattgccatccatatttgggagccactgggtggaggggcagggaggcaaaatgagacaagtagccttggttagtcttagagttgctgatgactgtggcttcccaagaactgggtacaagcagtgcccttattgtatggttggttaacagtctgctcccctcttcccttccttctttttttcctctactgacttctctccatactctttcccctctatttctttgtatgactgtcatagacacatgggtgcttgaagaaaggagggacccggaacttgggccaatcagcctcaccttgtcccagtccactcctaacactagcatcagtcccactcatctcaggctgagccacatctcactttttcgctcaagctatataatcctagactggaagagtagaatatcatatagggaagaaaccttaaacaccacagtgttccatgttccagtcactgatttttacaaatcttacagtccaaggcattaacctcaaggccctcccagcaccccattcttgtatacacatggcaaaatgtgaagaaactcctttcatctcagcaggtagaggaggactgatgacacgagctgccatggcgggaggaggggcagtagttattgatatggtgagccccatctctcagttttcatgacaggtctatatttctacctgggccaggccaggaaagagactatttaagaaaaaaaaaatcaattcctagcctggatcccaaaaaggtacaggcagcagttgcacatagggttggaaaatttcttttgggaaggggaagccatcccagcctttaccacccaatgtgtctcccatgctgggcatcctaggccactttgcttagagggcattaaaggtgccatgaaaggtagactctgaaccactttgatccctctgaagtaggtgactgatgcctccttatgcccaggctctggcaacagtcttactgaagaacattcccagtgcccctggctaggggcagagggcactgccaggctgtgttcagttagcacagctcacctcattaggagctcagcctctctcctcactctgcctctttgtgtctctttttctcctctctgagcctttgtctattgtgttcctgtcacccaccctttcatcatctttttgccaggcattcctggctgtcacttggagccaacagtaacttgccaccttaaggcagggtcatccccgggccaggaggatgaggttgtcctgaggggctccaaagaagacaatagttcccactcatgattttccgttacaaacaggcagctggggcatggttggcctccaatgatttcattcaaggccaaagtcctgagccccctccgctggtcccagtccagctcttatcaactccccaaaggaaaacccactggttcttagctctgtgggtaggaaggggccctagaaagggcctagttactatcctgtcagttctaacagtagtggaacaggagaatctgggccctaggagccctgtaactcccaggagagaccactgaaaatactggagcaacaatgcccctgcttccatttctccccacctcactctcaccaagtcaccagagggtggttctgtaggacctcttttgttgcttaagatgcagatggctcttaagaatcaggcagtcgcccacttctctccagatgaagggaagacattcataggtcccaaatctgcccattcagatgtcacataatatggtgggatatcaatttacttcttccacacatgtggttgtgcacatgtgagcttgtgtgcttttggagagaatgttgattggcaaaagcagcacagtattaatatttagagtaggatgcagcctcttatgcaccacagttaaatctagaacgaacaaaatttcagagctcaagacatgggacatttaaatcctcaaggagtttggaacaaaataaacagatctaaaaatttgaaaaaaaaaaaaaaaaaaaaaaaa

SEQ ID NO: 2995 - DNA, 774 bp, Homo Sapiens
  NM_006519
ggcctgagtgcgcctgcgcagtccgcgccactcagggagccggaggggacgcgccggaggaaagatggaagactaccaggctgcggaggagactgcttttgttgttgatgaagtgagcaacattgtaaaagaggctatagaaagcgcaattggtggtaacgcttatcaacacagcaaagtgaaccagtggaccacaaatgtagtagaacaaactttaagccaactcaccaagctgggaaaaccatttaaatacatcgtgacctgtgtaattatgcagaagaatggagctggattacacacagcaagttcctgcttctgggacagctctactgacgggagctgcactgtgcgatgggagaataagaccatgtactgcatcgtcagtgccttcggactgtctatttgacctgcagtccagcctatggcctttctccttttgtctctagttcatcctctaaccaccagccatgaattcagtgaactcttttctcattctctttgttttgtggcactttcacaatgtagaggaaaaaaccaaatgaccgcactgtgatgtgaatggcaccgaagtcagatgagtatccctgtaggtcacctgcagcctgcgttgccacttgtcttaactctgaatatttcatttcaaaggtgctaaaatctgaaatctgctagtgtgaaacttgctctactctctgaaatgattcaaatacactaattttccatactttatacttttgttagaataaattattcaaatctaaaaaaaaaaaaaaaaaa

SEQ ID NO: 2996 - DNA, 2230 bp, Homo Sapiens
  NM_006520
aaaggcggggattgcgtagggaaaggccctaggccataaacgggggtggggcctccccggaggccagtgcgcggccgcggtgctctaccggcgtgtcgctccgccccagggagagccggcgctaccatggaggagtaccatcgccactgcgacgaggttggcttcaatgctgaggaagcccacaatattgtcaaagagtgtgtagatggggttttaggtggtgaagattataatcacaacaacatcaaccagtggactgcaagcatagtggaacaatccttaacacacctggttaagttgggaaaagcctataaatatattgtgacctgtgcagtggtccagaagagcgcatatggctttcacacagccagctcctgtttttgggataccacatctgatggaacctgtaccgtaagatgggagaaccggaccatgaactgtattgtcaacgtttttgccattgctattgttctttaactgactaaaaatgttgggctaaagccattaacttaagaatttgtcagtgtatcctttccaaaaagagtaatagttgtttactagtgtgctagatgaaaagcgtgcaatatgctttaaagctatcaacaaaaactgaatattataagcaagcaatatcatagtaattggcagattagctcatattctatacagcatcgtttaaataggaaaaatttaatgctagcaaaaaataaatttagaaatatggcatgacatgaaaatacaatcttatatttacaccagcttttcactaatattttgtacctaaggtgatggggaactccattcagataataaaattctctttcagctagagaagttaacaggaataaatatatgaacaaaaaagctgcaaggataaatgtggagaaaatgatgagaattagctaacatttttaagtttttttaaactttcttcccctcagttgtacttaatatttagtggaaagtaataatttttttaattttctatcaactaatagtatagtaacaactatgattaacttgtttactttttctgaggattagtaaatcaattttttttaatttcaaatttttggatttacacttgagggtaaattaaatctggtaaactgaatttcctagttaaataaaattagttgcagtatatgatgaacagtgtatgactcaaacagctgccttacaattcactcattccatgtggaacaaacatttatcagatgcctattatgggcatatgtctctgctaagcaccatagttgtcaatgtgctgtgcaaatgctaagttccttttagcaattgttcagttggaagacgtattaatatttggggaaggaaaagaaagtagttgttttacaagggaggaaaaaagtgaatctggttacacatatggaagtaagcaaaatgaaaagcacttattgctttctgacagaattatagatgtaattttaagagttgctcctagcaagttaaaagtgcatataaaatatgcaactcttagttaaaggccttattatcagtcttacctatacaagtagtaaattttgtcattgctttagttacaaccatctgtaaataacttaaaagacttattatgtggggttcaaattgagtggaataaagtatagattaaaagtatacaatccttagcacgttatctcagggcttatgaaatgtaattaaatttattaagaaaatagatgaaaaattagggtacacagctggccaccaaatgcgaagtcaatctgctacttaaccctgaaaacaaaatcagttttgcatattaccactaacactaatacatatagagagcggaaccataactcattgaattttggagaggaataagcttagcgttaatattgacaatattaaggcaatattcttgtaggaatactatgtgcatgtttgatattttgccaaataacaataattaataattgttcaatgtttaagaataatattaacaaaataaaggagtttaatgcagtgatctttgtttttggcacatcaaaaattctcagtcattattcatgtttctttatgctgctggcttttgtgccctggaagatcataatagtgaccaaaatatacatgcagacttgttttttattattgttgtttaagcataatttaagaaaaaaaatttttacctggtgaacttgctatctgctctgtttctagttaaaatataataaatattatcttcctgtgctgtaaaaaaaaaaaaaaa

SEQ ID NO: 2997 - DNA, 3431 bp, Homo Sapiens
  NM_006521
gggggaggagggcggtcgtccggggttaggttgagggggggcgtcggtccgttctgggcgggggatgactcacagcccatcccatctcccagacgccgcccgcccgcgcagtgctagctccatggcttagcggaggaggcggcagtggcgagctggggggaggggggactcttattttgttagggggaccgggccgaggcccgaccggcctggcagggctcgcccggggccgggcgtcatgtctcatgcggccgaaccagctcgggatggcgtagaggccagcgcggagggccctcgagccgtgttcgtgctgttggaggagcgcaggccggccgactcggctcagctgctcagcctgaactctttgcttccggaatccgggattgttgctgacatagaattagaaaacgtccttgatcctgacagcttctacgagctcaaaagccaacccttaccccttcgctcaagcctcccaatatcactgcaggccacaccagccaccccagctacactctctgcatcgtcttctgcagggggctccaggacccctgccatgtcgtcatcttcttcatcgagggtcttgctgcggcagcagctaatgcgggcccaggcgcaggagcaggagaggcgtgagcgtcgggaacaggccgccgcggctcccttccccagtcctgcacctgcctctcctgccatctctgtggttggcgtctctgctgggggccacacattgagccgtccaccccctgctcaggtgcccagggaggtgctcaaggtgcagacccatctggagaacccaacgcgctaccacctgcagcaggcgcgccggcagcaggtgaaacagtacctgtccaccacactcgggcccaagctggcttcccaggccctcaccccaccgccggggcccgcaagtgcccagccactgcctgcccctgaggctgcccacactaccggccccacaggcagtgcgcccaacagccccatggcgctgctcaccatcgggtccagctcagagaaggagattgatgatgtcattgatgagatcatcagcctggagtccagttacaatgatgaaatgctcagctatctgcccggaggcaccacaggactgcagctccccagcacgctgcctgtgtcagggaatctgcttgatgtgtacagtagtcaaggcgtggccacaccagccatcactgtcagcaactcctgcccagctgagctgcccaacatcaaacgggagatctctgagaccgaggcaaaggcccttttgaaggaacggcagaagaaagacaatcacaacctaattgagcgtcgcaggcgattcaacattaacgacaggatcaaggaactgggcactctcatccctaagtccagtgacccggagatgcgctggaacaagggcaccatcctgaaggcctctgtggattatatccgcaagctgcagaaggagcagcagcgctccaaagacctggagagccggcagcgatccctggagcaggccaaccgcagcctgcagctccgaattcaggaactagaactgcaggcccagatccatggcctgccagtacctcccactccagggctgctttccttggccacgacttcggcttctgacagcctcaagccagagcagctggacattgaggaggagggcaggccaggcgcagcaacgttccatgtaggggggggacctgcccagaatgctccccatcagcagccccctgcaccgccctcagatgcccttctggacctgcactttcccagcgaccacctgggggacctgggagaccccttccacctggggctggaggacattctgatggaggaggaggagggggtggtgggaggactgtcggggggtgccctgtccccactgcgggctgcctccgatcccctgctctcttcagtgtcccctgctgtctccaaggccagcagccgccgcagcagcttcagcatggaagaggagtcctgatcaggcctcacccctcccctgggactttcccacccaggaaaggaggaccagtcaggatgaggccccgccttttcccccaccctcccatgagactgccctgcccaggtatcctgggggaagaggagatgtgatcaggccccacccctgtaatcaggcaaggaggaggagtcagatgaggccctgcaccttccccaaaggaaccgcccagtgcaggtatttcagaaggagaaggctggagaaggacatgagatcagggcctgccccctggggatcacagcctcacccctgcccctgtgggactcatccttgcccaggtgagggaaggagacaggatgaggtctcgaccctgtcccctagggactgtcctagccaggtctcctgggaaagggagatgtcaggatgttgctccatcctttgtcttggaaccaccagtctagtccgtcctggcacagaagaggagtcaagtaatggaggtcccagccctgggggtttaagctctgccccttccccatgaaccctgccctgctctgcccaggcaaggaacagaagtgaggatgagacccagccccttcccctgggaactctcctggccttctaggaatggaggagccaggccccaccccttccctataggaacagcccagcacaggtatttcaggtgtgaaagaatcagtaggaccaggccaccgctagtgcttgtggagatcacagccccacccttgtccctcagcaacatcccatctaagcattccacactgcagggaggagtggtacttaagctcccctgccttaacctgggaccaacctgacctaacctaggagggctctgagccaaccttgctcttggggaaggggacagattatgaaatttcatggatgaattttccagacctatatctggagtgagaggcccccacccttgggcagagtcctgccttcttccttgaggggcagtttgggaaggtgatgggtattagtgggggactgagttcaggttaccagaaccagtacctcagtattctttttcaacatgtagggcaagaggatgaaggaaggggctatcctgggacctccccagcccaggaaaaactggaagccttcccccagcaaggcagaagcttggaggagggttgtaaaagcatattgtaccccctcatttgtttatctgatttttttattgctccgcatactgagaatctaggccaccccaacctctgttccccacccagttcttcatttggaggaatcaccccatttcagagttatcaagagacactcccccctccattcccacccctcatacctacacccaaggttgtcagctttggattgctggggccaggccccatggagggtatactgaggggtctataggtttgtgattaaaataataaaagctaggcgtgtttgatgcgcttttaactttgaaaaaaaaaaaaaaaaaaaaaaaaaaaaaaaaaaaaaa

SEQ ID NO: 2998 - DNA, 1743 bp, Homo Sapiens
  NM_006527
ggcgcggggacgcgggtttctgcctcaggccctgccctgctctactctgcgctctctgcccgcgccgccgccgcctcagcctcggccctgcgctgcgcgcccggcccgtgctgccatggcctgccgcccgcgaagcccgccgaggcatcagagccgctgcgacggtgacgccagcccgccgtcccccgcgcgatggagcctgggacggaagcgcagagccgacggcaggcgctggaggcccgaagacgccgaggaggcagagcaccgcggcgccgagcgcagacccgagagctttaccactcctgaaggccctaaaccccgttccagatgctctgactgggcaagtgcagttgaagaagatgaaatgaggaccagagttaacaaagaaatggcaagatataaaaggaaactcctcatcaatgactttggaagagagagaaaatcatcatcaggaagttctgattcaaaggagtctatgtctactgtgccggctgactttgagacagatgaaagtgtcctaatgaggagacagaagcagatcaactatgggaagaacacaattgcctacgatcgttatattaaagaagtcccaagacaccttcgacaacctggcattcatcccaagacccctaataaatttaagaagtatagtcgacgttcatgggaccagcaaatcaaactctggaaggtggctctgcatttttgggatcctccagcggaagaaggatgtgatttgcaagaaatacaccctgtagaccttgaatctgcagaaagcagctccgagccccagaccagctctcaggatgactttgatgtgtactctggcacacccaccaaggtgagacacatggacagtcaagtggaggatgagtttgatttggaagcttgtttaactgaacccttgagagacttctcagccatgagctaactgccccctggcggccaggaagagaaacagctcctccccgactaggtggaaggctggccaggcaccaagcatgtgtgtgcacttgtacctggtggtttctctgttagcagtccattagctcatgctgaattatttttgccttactttcttaagaaacattaattttatgtatagtgagtatattttgcatgttttaaattgtaaatggagctaagtccaagaaagtacttgaagctctcttccagcgagcttaattgcgtaatccctgttgtcctccagggtaagctgacacgtctacataactggttttccacaggcatcttcagttattgcttgtcaggtggactgttttggatttaaccatgtaatccatgggaccaattgagagtcagctacttttataggcatcaaagtattctcagacacctttaatatctttatggaaacttaatttttggccttttatcaatatgtcataacagcattctgaagtcagacattgttaaattgagctattaaactaatgagttttatgtaagttatatggtcttaatttggtacttgtaaatagcactagttagactctttagaatactccaagagttagggcagcagagtggagcgatttagaaagaacattttaaaacaatcagttaatttaccatgtaaaattgctgtaaatgataatgtgtacagattttctgttcaaatattcaattgtaaacttcttgttaagactgttacgtttctattgcttttgtatgggatattgcaaaaataaaaaggaaagaaccctcaaaaaaaaaaaaaaaaaa

SEQ ID NO: 2999 - DNA, 2345 bp, Homo Sapiens
  NM_006537
ctcgagacgcagccgccgtcggccgagcgcccggctagaagcgacaccagacggagcctccggagttcctccgcccccacctcgccgggtcctggagccgcagtcctcccagctgccctcctcgtggccatggagtgtccacacctgagctccagcgtctgcattgctccggactcagccaagttccccaacggctccccgtcgtcctggtgctgcagcgtgtgccggtccaacaaaagcccttgggtctgtttgacttgttcaagtgtccactgtggaaggtatgtgaatggccatgcaaaaaaacattatgaagatgcacaagtacctttaaccaaccataagaaatcagaaaagcaagataaagttcagcacacagtatgtatggattgcagtagctacagtacatactgttatcgctgtgatgattttgtggttaatgacaccaagctgggactggtacagaaagtcagagaacacttacagaacttggaaaactcagctttcacagctgacaggcataagaaaagaaaacttttggaaaactcaacactaaacagcaagttattaaaagtaaatggaagcaccactgccatttgtgccacaggccttcggaatttggggaacacatgtttcatgaatgccatccttcagtcactcagtaacattgagcagttttgctgttatttcaaagaactgcccgccgtggagttaaggaatgggaaaacagcaggaaggcggacataccacaccaggagccaaggggataacaatgtgtctttggtagaagagtttagaaagacactctgtgctttatggcaaggcagccagactgcatttagcccagagtccttattttatgttgtttggaagattatgccaaactttaggggctatcaacagcaggacgcccatgaattcatgcgctaccttttggaccacctacacttggaacttcagggcggtttcaacggtgtttcccgctcagcaattctgcaggagaattctactctgtctgcaagtaacaagtgttgcataaatggagcatctactgttgtcacggctatattcggaggcattctccaaaatgaggttaactgcctcatatgtgggacagaatctagaaagtttgatccattcctagacctttcattagatattccaagtcagttcagaagtaagcgctctaagaatcaagaaaatggaccagtttgttcgttacgagattgtcttcgcagttttaccgacttagaagaacttgatgagacagagttatatatgtgccataaatgcaaaaagaaacaaaagtccacaaaaaagttttggattcaaaaactacccaaggtgctatgcttacatttgaaaagatttcattggacagcatatttaagaaataaagttgatacatacgtagaatttccactgagaggcctagacatgaaatgctacttactagagcctgagaacagtggcccggagagctgcctgtatgacctcgccgctgtggtggtgcaccatggttccggggttggttctggacattacacagcatacgcaactcacgaaggccgctggttccacttcaatgacagtactgtaacactgactgacgaggagactgtggtgaaggcgaaggcctacatccttttctacgtggaacaccaggccaaagctggatcggataaactttaatacctcctccaaatcatcattcaccaaccataccagagaaacatttccagttttccacaaatacttgatacaagatttaatttcattatgcacttttcaatttcctattttggatttagttttgtcaatggtagtgacttactgaacatgggcaccaactaattttgttgttgttctaccagaaaacctcagcagatgttttgatttgctgctttagttgtaataattcaatttttataggtagttgtaagaacttagtcttatttgacttttttattttatgttaatgttttcagttctcactttgaggcacatttacatcaatgcttttgttcctctcacatgctgaaagcaagatgtgttccttattgtgaagagcgacacaactgcctgctgcctttccacagctataatggacatcaggttgactctaaatcaaggatcatgtgtgcacaatacttgtggcccacaaaatttcacaatgactgctgaggaatcattctttttgcctgtaaaatataacaaagggcatcattaagtagaccaggtaattactgcttgtctctcaaggctgctgtctttatcagcactaactaaataaatttgttggttcagttgtacttgtcctgcaaatacaaaaaaaaaaaaaaaaa

SEQ ID NO: 3000 - DNA, 1343 bp, Homo Sapiens
  NM_006541
acatccggccgccggcactggattgcttctgtctggcggcggcagcatggcggcgggggcggctgaggcagctgtagcggccgtggaggaggtcggctcagccgggcagtttgaggagctgctgcgcctcaaagccaagtccctccttgtggtccatttctgggcaccatgggctccacagtgtgcacagatgaacgaagttatggcagagttagctaaagaactccctcaagtttcatttgtgaagttggaagctgaaggtgttcctgaagtatctgaaaaatatgaaattagctctgttcccacttttctgtttttcaagaattctcagaaaatcgaccgattagatggtgcacatgccccagagttgaccaaaaaagttcagcgacatgcatctagtggctccttcctacccagcgctaatgaacatcttaaagaagatctcaaccttcgcttgaagaaattgactcatgctgccccctgcatgctgtttatgaaaggaactcctcaagaaccacgctgtggtttcagcaagcagatggtggaaattcttcacaaacataatattcagtttagcagttttgatatcttctcagatgaagaggttcgacagggactcaaagcctattccagttggcctacctatcctcagctctatgtttctggagagctcataggaggacttgatataattaaggagctagaagcatctgaagaactagatacaatttgtcccaaagctcccaaattagaggaaaggctcaaagtgctgacaaataaagcttctgtgatgctctttatgaaaggaaacaaacaggaagcaaaatgtggattcagcaaacaaattctggaaatactaaatagtactggtgttgaatatgaaacattcgatatattggaggatgaagaagttcggcaaggattaaaagcttactcaaattggccaacataccctcagctgtatgtgaaaggggagctggtgggaggattggatattgtgaaggaactgaaagaaaatggtgaattgctgcctatactgagaggagaaaattaataaatcttaaacttggtgcccaactattgtaagaaatatttaattacattgggagcagttcatgatttagtcctcagaaatggactaggaatagaaaattcctgctttctcagttacatgttttgtgtatttcacaatgtcgtgctaaataaatgtatgttacatttttttcccaccaaaaatagaatgcaataaacatcttcaaattattaacaataattgtatgaaaaaagtgtatctttacagcagtattaaacatacagctactataattaaaaaaaaaaaaaaa

SEQ ID NO: 3001 - DNA, 1672 bp, Homo Sapiens
  NM_006545
agcgtgaatcccttagcgcaccgcctccccaagtgctgccagcatgctgcccctccacgctagggacttgcctgcctctgccgcagcgcagatctgatgcggtggtttcctccaaagaaagcgggatactccgggccctgccgcgcgcaccgccgctccgtcacggagccgctttacttccgggtgcgacgtctacccacccaggacttcctgggacgagccgtcccccgccccagccacgcctctgagtcgcgctgcgcaggcgccattgggcagagggattggcaagcttgcgtgccccagcgacacaggcctcgaggctgtctctgacaagtgttcacaggaggtggggacgcctctgcgcgaggaacgaggagctacgggcctgggcccggttattgccatgggcagcggctgccgcatcgaatgcatattcttcagcgagttccaccccacgctgggacccaagatcacctatcaggtccctgaagacttcatctcccgagagctgtttgacacagtccaagtgtacatcatcaccaagccagagctgcagaacaagcttatcactgtcacagctatggaaaagaagctgatcggctgtcctgtgtgcatcgaacacaagaagtacagccgcaatgctctcctcttcaacctgggcttcgtgtgtgatgcccaggccaagacctgcgccctcgagcccattgttaaaaagctggctggctatctgaccacactagagctagagagcagcttcgtgtccatggaggagagcaagcagaagttggtgcccatcatgaccatcttgctggaggagctaaatgcctcaggccggtgcactctgcccattgatgagtccaacaccatccacttgaaggtgattgagcagcggccagaccctccggtggcccaggagtatgatgtacctgtctttaccaaagacaaggaggatttcttcaactcacagtgggacctcactacacaacaaatcctgccctacattgatgggttccgccacatccagaagatttcagcagaggcagatgtggagctcaacctggtgcgcattgctatccagaacctgctgtactacggcgttgtgacactggtgtccatcctccagtactccaatgtatactgcccaacgcccaaggtccaggacctggtagatgacaagtccctgcaagaggcatgtctatcctacgtgaccaagcaagggcacaagagggccagtctccgggatgtgttccagctatactgcagcctgagccctggcactaccgtgcgagacctcattggccgccacccccagcagctgcagcatgttgatgaacggaagctgatccagttcgggcttatgaagaacctcatcaggcgactacagaagtatcctgtgcgggtgactcgggaagagcagagccaccctgcccggctttatacaggctgccacagctatgacgagatctgctgcaagacaggcatgagctaccatgagctggatgagcggcttgaaaatgaccccaacatcatcatctgctggaagtgaggctggtagtgactggatggacacattgctgtgggtagtccctcctactaggaggcttgtcatactgtctagaggttgactcttagttctgtaaataaagacatccatttcaaacagcaaaaaaaa

SEQ ID NO: 3002 - DNA, 4168 bp, Homo Sapiens
  NM_006547
aagacttaggaagactggtggatgcgtttgggttgtagctaggctttttcttttctttctcttttaaaacacatctagacaaggaaaaaacaagcctcggatctgatttttcactcctcgttcttgtgcttggttcttactgtgtttgtgtattttaaaggcgagaagacgaggggaacaaaaccagctggatccatccatcaccgtgggtggttttaatttttcgttttttctcgttatttttttttaaacaaccactcttcacaatgaacaaactgtatatcggaaacctcagcgagaacgccgccccctcggacctagaaagtatcttcaaggacgccaagatcccggtgtcgggacccttcctggtgaagactggctacgcgttcgtggactgcccggacgagagctgggccctcaaggccatcgaggcgctttcaggtaaaatagaactgcacgggaaacccatagaagttgagcactcggtcccaaaaaggcaaaggattcggaaacttcagatacgaaatatcccgcctcatttacagtgggaggtgctggatagtttactagtccagtatggagtggtggagagctgtgagcaagtgaacactgactcggaaactgcagttgtaaatgtaacctattccagtaaggaccaagctagacaagcactagacaaactgaatggatttcagttagagaatttcaccttgaaagtagcctatatccctgatgaaatggccgcccagcaaaaccccttgcagcagccccgaggtcgccgggggcttgggcagaggggctcctcaaggcaggggtctccaggatccgtatccaagcagaaaccatgtgatttgcctctgcgcctgctggttcccacccaatttgttggagccatcataggaaaagaaggtgccaccattcggaacatcaccaaacagacccagtctaaaatcgatgtccaccgtaaagaaaatgcgggggctgctgagaagtcgattactatcctctctactcctgaaggcacctctgcggcttgtaagtctattctggagattatgcataaggaagctcaagatataaaattcacagaagagatccccttgaagattttagctcataataactttgttggacgtcttattggtaaagaaggaagaaatcttaaaaaaattgagcaagacacagacactaaaatcacgatatctccattgcaggaattgacgctgtataatccagaacgcactattacagttaaaggcaatgttgagacatgtgccaaagctgaggaggagatcatgaagaaaatcagggagtcttatgaaaatgatattgcttctatgaatcttcaagcacatttaattcctggattaaatctgaacgccttgggtctgttcccacccacttcagggatgccacctcccacctcagggcccccttcagccatgactcctccctacccgcagtttgagcaatcagaaacggagactgttcatctgtttatcccagctctatcagtcggtgccatcatcggcaagcagggccagcacatcaagcagctttctcgctttgctggagcttcaattaagattgctccagcggaagcaccagatgctaaagtgaggatggtgattatcactggaccaccagaggctcagttcaaggctcagggaagaatttatggaaaaattaaagaagaaaactttgttagtcctaaagaagaggtgaaacttgaagctcatatcagagtgccatcctttgctgctggcagagttattggaaaaggaggcaaaacggtgaatgaacttcagaatttgtcaagtgcagaagttgttgtccctcgtgaccagacacctgatgagaatgaccaagtggttgtcaaaataactggtcacttctatgcttgccaggttgcccagagaaaaattcaggaaattctgactcaggtaaagcagcaccaacaacagaaggctctgcaaagtggaccacctcagtcaagacggaagtaaaggctcaggaaacagcccaccacagaggcagatgccaaaccaaagacagattgcttaaccaacagatgggcgctgaccccctatccagaatcacatgcacaagtttttacctagccagttgtttctgaggaccaggcaacttttgaactcctgtctctgtgagaatgtatactttatgctctctgaaatgtatgacacccagctttaaaacaaacaaacaaacaaacaaaaaaagggtgggggagggagggaaagagaagagctctgcacttccctttgttgtagtctcacagtataacagatattctaattcttcttaatattcccccataatgccagaaattggcttaatgatgctttcactaaattcatcaaatagattgctcctaaatccaattgttaaaattggatcagaataattatcacaggaacttaaatgttaagccattagcatagaaaaactgttctcagttttatttttacctaacactaacatgagtaacctaagggaagtgctgaatggtgttggcaggggtattaaacgtgcatttttactcaactacctcaggtattcagtaatacaatgaaaagcaaaattgttccttttttttgaaaattttatatactttataatgatagaagtccaaccgttttttaaaaaataaatttaaaatttaacagcaatcagctaacaggcaaattaagatttttacttctggctggtgacagtaaagctggaaaattaatttcagggttttttgaggcttttgacacagttattagttaaatcaaatgttcaaaaatacggagcagtgcctagtatctggagagcagcactaccatttattctttcatttatagttgggaaagtttttgacggtactaacaaagtggtcgcaggagattttggaacggctggtttaaatggcttcaggagacttcagttttttgtttagctacatgattgaatgcataataaatgctttgtgcttctgactatcaatacctaaagaaagtgcatcagtgaagagatgcaagactttcaactgactggcaaaaagcaagctttagcttgtcttataggatgcttagtttgccactacacttcagaccaatgggacagtcatagatggtgtgacagtgtttaaacgcaacaaaaggctacatttccatggggccagcactgtcatgagcctcactaagctattttgaagatttttaagcactgataaattaaaaaaaaaaaattagactccaccttaagtagtaaagtataacaggatttctgtatactgtgcaatcagttctttgaaaaaaaagtcaaaagatagagaatacaagaaaagtttttgggatataatttgaatgactgtgaaaacatatgacctttgataacgaactcatttgctcactccttgacagcaaagcccagtacgtacaattgtgttgggtgtgggtggtctccaaggccacgctgctctctgaattgattttttgagttttgtttgtaagatgatcacagtcatgttacactgatctaaaggacatatatataaccctttaaaaaaaaaatcactgcctcattcttatttcaagatgaatttctatacagactagatgtttttctgaagatcaattagacattttgaaaatgatttaaagtgttttccttaatgttctctgaaaacaagtttcttttgtagttttaaccaaaaaagtgccctttttgtcactggattctcctagcattcatgatttttttttcatacaatgaattaaaattgctaaaatcatggactggctttctggttggatttcaggtaagatgtgtttaaggccagagcttttctcagtatttgatttttttccccaatatttgattttttaaaaatatacacataggtgctgcatttatatctgctggtttaaattctgtcatatttcacttctagccttttagtatggcaaatcatattttacttttacttaagcatttgtaatttggagtatctggtactagctaagaaataattctataattgagttttgtactcaccatatatggatcattcctcatgtataatgtgccccaaatgcagcttcattttccagataccttgacgcagaataaattttttcatcatttaggtgcaaaaaaaaaa

SEQ ID NO: 3003 - DNA, 3676 bp, Homo Sapiens
  NM_006548
gagagacgagggcagcggaggaggcgaggagcgccgggtaccgggccgggggagccgcgggctctcggggaagagacggatgatgaacaagctttacatcgggaacctgagccccgccgtcaccgccgacgacctccggcagctctttggggacaggaagctgcccctggcgggacaggtcctgctgaagtccggctacgccttcgtggactaccccgaccagaactgggccatccgcgccatcgagaccctctcgggtaaagtggaattgcatgggaaaatcatggaagttgattactcagtctctaaaaagctaaggagcaggaaaattcagattcgaaacatccctcctcacctgcagtgggaggtgttggatggacttttggctcaatatgggacagtggagaatgtggaacaagtcaacacagacacagaaaccgccgttgtcaacgtcacatatgcaacaagagaagaagcaaaaatagccatggagaagctaagcgggcatcagtttgagaactactccttcaagatttcctacatcccggatgaagaggtgagctccccttcgccccctcagcgagcccagcgtggggaccactcttcccgggagcaaggccacgcccctgggggcacttctcaggccagacagattgatttcccgctgcggatcctggtccccacccagtttgttggtgccatcatcggaaaggagggcttgaccataaagaacatcactaagcagacccagtcccgggtagatatccatagaaaagagaactctggagctgcagagaagcctgtcaccatccatgccaccccagaggggacttctgaagcatgccgcatgattcttgaaatcatgcagaaagaggcagatgagaccaaactagccgaagagattcctctgaaaatcttggcacacaatggcttggttggaagactgattggaaaagaaggcagaaatttgaagaaaattgaacatgaaacagggaccaagataacaatctcatctttgcaggatttgagcatatacaacccggaaagaaccatcactgtgaagggcacagttgaggcctgtgccagtgctgagatagagattatgaagaagctgcgtgaggcctttgaaaatgatatgctggctgttaaccaacaagccaatctgatcccagggttgaacctcagcgcacttggcatcttttcaacaggactgtccgtgctatctccaccagcagggccccgcggagctccccccgctgccccctaccaccccttcactacccactccggatacttctccagcctgtacccccatcaccagtttggcccgttcccgcatcatcactcttatccagagcaggagattgtgaatctcttcatcccaacccaggctgtgggcgccatcatcgggaagaagggggcacacatcaaacagctggcgagattcgccggagcctctatcaagattgcccctgcggaaggcccagacgtcagcgaaaggatggtcatcatcaccgggccaccggaagcccagttcaaggcccagggacggatctttgggaaactgaaagaggaaaacttctttaaccccaaagaagaagtgaagctggaagcgcatatcagagtgccctcttccacagctggccgggtgattggcaaaggtggcaagaccgtgaacgaactgcagaacttaaccagtgcagaagtcatcgtgcctcgtgaccaaacgccagatgaaaatgaggaagtgatcgtcagaattatcgggcacttctttgctagccagactgcacagcgcaagatcagggaaattgtacaacaggtgaagcagcaggagcagaaataccctcagggagtcgcctcacagcgcagcaagtgaggctcccacaggcaccagcaaaacaacggatgaatgtagcccttccaacacctgacagaatgagaccaaacgcagccagccagatcgggagcaaaccaaagaccatctgaggaatgagaagtctgcggaggcggccagggactctgccgaggccctgagaaccccaggggccgaggaggggcggggaaggtcagccaggtttgccagaaccaccgagccccgcctcccgccccccagggcttctgcaggcttcagccatccacttcaccatccactcggatctctcctgaactcccacgacgctatcccttttagttgaactaacataggtgaacgtgttcaaagccaagcaaaatgcacaccctttttctgtggcaaatcgtctctgtacatgtgtgtacatattagaaagggaagatgttaagatatgtggcctgtgggttacacagggtgcctgcagcggtaatatattttagaaataatatatcaaataactcaactaactccaatttttaatcaattattaatttttttttctttttaaagagaaagcaggcttttctagactttaaagaataaagtctttgggaggtctcacggtgtagagaggagctttgaggccacccgcacaaaattcacccagagggaaatctcgtcggaaggacactcacggcagttctggatcacctgtgtatgtcaacagaagggataccgtctccttgaagaggaaactctgtcactcctcatgcctgtctagctcatacacccatttctctttgcttcacaggttttaaactggttttttgcatactgctatataattctctgtctctctctgtttatctctcccctccctcccctccccttcttctccatctccattcttttgaatttcctcatccctccatctcaatcccgtatctacgcacccccccccccccaggcaaagcagtgctctgagtatcacatcacacaaaaggaacaaaagcgaaacacacaaaccagcctcaacttacacttggttactcaaaagaacaagagtcaatggtacttgtcctagcgttttggaagaggaaaacaggaacccaccaaaccaaccaatcaaccaaacaaagaaaaaattccacaatgaaagaatgtattttgtctttttgcattttggtgtataagccatcaatattcagcaaaatgattcctttctttaaaaaaaaaaaatgtggaggaaagtagaaatttaccaaggttgttggcccagggcgttaaattcacagatttttttaacgagaaaaacacacagaagaagctacctcaggtgtttttacctcagcaccttgctcttgtgtttcccttagagattttgtaaagctgatagttggagcatttttttatttttttaataaaaatgagttggaaaaaaaataagatatcaactgccagcctggagaaggtgacagtccaagtgtgcaacagctgttctgaattgtcttccgctagccaagaacctatatggccttcttttggacaaaccttgaaaatgtttatttaaaaaaaaaaaagatgacaaagaaaaacagagagagagaatattggagatgtcctgaattttaatagggtacgcgccattagggctttttgcgctaaaggatgaacatgtactggtttatgtggacaagccattataccaccagactgcaatgccagtttcctctactgcaaacagtgttctgtgacaaaaaaaaaaaaaaaaaaaagaaaaaaaaagaaaaaacagaaatatatccagctaacaagaaaaaa

SEQ ID NO: 3004 - DNA, 1399 bp, Homo Sapiens
  NM_006554
gcggggccggcggaagcgctcgagtgccgttgtcggctgcgccggaagtccctagccaggcctggcggtaaccttgggggcctcactgcagccgccgctgctgttggagtgggctttgcgagtctgaacgttggcggggctaggctcgttaactgccgagagcctccgggtttgcggtggaggacgctgaggcccgtggggggcaggcacccgggcgccgggcctcccagccgacatgtctctagtggcggaagccttcgtctcccagattgcagctgcagaaccttggcctgaaaatgctacattatatcagcaattgaaaggggagcaaattttactttctgacaatgcagcttctcttgcagtgcaggcctttttgcaaatgtgtaacttgcctatcaaagtagtttgtagggcaaatgcagaatatatgtctccatctggtaaagtaccttttattcatgtgggaaatcaagtagtatcagaacttggtccaatagtccaatttgttaaagccaagggccattctcttagtgatgggctggaggaagtccaaaaagcagaaatgaaagcttacatggaattagtcaacaatatgctgttgactgcagagctgtatcttcagtggtgtgatgaagctacagtaggggagatcactcatgctaggtatggatctccttacccttggcctctgaatcatattttggcctatcaaaaacagtgggaagtcaaacgtaagatgaaagctattggatggggaaagaagactctggaccaggtcttagaggatgtagaccagtgctgtcaagctctctctcaaagactgggaacacaaccgtatttcttcaataagcagcctactgaacttgacgcactggtatttggccatctatacaccattcttaccacacaattgacaaatgatgaactttctgagaaggtgaaaaactatagcaacctccttgctttctgtaggagaattgaacagcactattttgaagatcgtggtaaaggcaggctgtcatagagttatgtgttagtctcaggagtcttaacttttgaaatatgttttacttgaatgttacattagatattggtgtcagaattttaaaaccaaattactgctttttgaaacctcaaattatataatgtatcttatgtatgtgctttatattgttatttgtgtatacattaaaataattctgaattatttaatctgatatgttgtattctgtatcttgaaatttttgtttccttgaaacatgcatgcatttaaaaataaagcttaaacaactgtatggatgttacatttactttcttttgatttttctgaaagtcattcactgaattttacacatgtggaataaacagtgtcttttctaaggcaaaaaaaaaaaaa

SEQ ID NO: 3005 - DNA, 1307 bp, Homo Sapiens
  NM_006556
caggccaggctgtgagcgaaggttctgggcggggctggactgttctaagtgagttcgggtgggggagcttcacgaggggaggctgctctgtgaaggaaccgcctttctctccgcgtgtctcacccttttctccccatatctgtttggacatgagctgagggcacggtcgcgggcggtcagccctgttcgcagctacggcgaggaggggcgcgattgttccttgttgccgctccgcttagtggccgcgtccattccgcgcggtgtcccgattttaggggtagggagaagtgtcagcttcaggcatcgcgaggcgtggcggccccatggccccgctgggaggcgccccgcggctggtactgctgttcagcggcaagaggaaatccgggaaggacttcgtgaccgaggcgctgcagagcagacttggagctgatgtctgtgctgtcctccggctctctggtccactcaaggaacagtatgctcaggagcatggcttgaacttccagagactcctggacaccagcacctacaaggaggcctttcggaaggacatgatccgctggggagaggagaaacgccaggctgacccaggcttcttttgcaggaagattgtggagggcatctcccagcccatctggctggtgagtgacacacggagagtgtctgacatccagtggtttcgggaggcctatggggccgtgacgcagacggtccgcgttgtagcgttggagcagagccgacagcagcggggctgggtgttcacgccaggggtggacgatgctgagtcagaatgtggcctggacaacttcggggactttgactgggtcatcgagaaccatggagttgaacagcgcctggaggagcagttggagaacctgatagaatttatccgctccagactttagtcactaggttctaggagtgagctggggcctgctgaggtgggggtggggctgactctgcaaaatgggggtgtcccccgatcctggccgaggtgaggaacagacagggggggtctagattctgagggggttggtggatattgggcaaggcaggaaacctctggagacctcattttctccatggggaagacagccatgctcttcaggaggagactccaagggcaaaggagggtgtcttggctgtgcttgaaggcgaaaccctgccatatccccagtgccagtcccctcagcctgtggtggccttgcatcctgactggatgttctcagccccttgttctgggcaagaacccagagctccccagtgtggatactaataaacctcttggagcacactctcagaaaaaaaaa

SEQ ID NO: 3006 - DNA, 2685 bp, Homo Sapiens
  NM_006559
ggcttcggtcgctaccgctcccgctctgccacccccgccaaccgccgctcgggcctccgtcgctgccgcgtcgctttctcgctccttggatcgcacatcctcccagatgcagcgccgggacgaccccgccgcgcgcatgagccggtcttcgggccgtagcggctccatggacccctccggtgcccacccctcggtgcgtcagacgccgtctcggcagccgccgctgcctcaccggtcccggggaggcggagggggatcccgcgggggcgcccgggcctcgcccgccacgcagccgccaccgctgctgccgccctcggccacgggtcccgacgcgacagtgggcgggccagcgccgaccccgctgctgcccccctcggccacagcctcggtcaagatggagccagagaacaagtacctgcccgaactcatggccgagaaggactcgctcgacccgtccttcactcacgccatgcagctgctgacggcagaaattgagaagattcagaaaggagactcaaaaaaggatgatgaggagaattacttggatttattttctcataagaacatgaaactgaaagagcgagtgctgatacctgtcaagcagtatcccaagttcaattttgtggggaagattcttggaccacaagggaatacaatcaaaagactgcaggaagagactggtgcaaagatctctgtattgggaaagggctcaatgagagacaaagccaaggaggaagagctgcgcaaaggtggagaccccaaatatgcccacttgaatatggatctgcatgtcttcattgaagtctttggacccccatgtgaggcttatgctcttatggcccatgccatggaggaagtcaagaaatttctagtaccggatatgatggatgatatctgtcaggagcaatttctagagctgtcctacttgaatggagtacctgaaccctctcgtggacgtggggtgccagtgagaggccggggagctgcacctcctccaccacctgttcccaggggccgtggtgttggaccacctcggggggctttggtacgtggtacaccagtaaggggagccatcaccagaggtgccactgtgactcgaggcgtgccacccccacctactgtgaggggtgctccagcaccaagagcacggacagcgggcatccagaggatacctttgcctccacctcctgcaccagaaacatatgaagaatatggatatgatgatacatacgcagaacaaagttacgaaggctacgaaggctattacagccagagtcaaggggactcagaatattatgactatggacatggggaggttcaagattcttatgaagcttatggccaggacgactggaatgggaccaggccgtcgctgaaggcccctcctgctaggccagtgaagggagcatacagagagcacccatatggacgttattaaaaacaaacatgaggggaaaatatcagttatgagcaaagttgttactgatttcttgtatctcccaggattcctgttgctttacccacaacagacaagtaattgtctaagtgtttttcttcgtggtccccttcttctccccaccttattccattcttaactctgcattctggcttctgtatgtagtattttaaaatgagttaaaatagatttaggaatattgaattaattttttaagtgtgtagatgcttttttctttgttgtttaaatataaacagaagtgtaccttttataataaaaaaaagaagttgagtaaaaaaaaaaaacacacaaacctgttagtttcaaaaatgacattgcttgcttaaaggttctgaagtaaaggcttgttaagtttctcttagttttgatttgaggcatcccgtaaagttgtagttgcagaatcccaaactaggctacatttcaaaattcagggctgtttaagatttaaaatcacaaacattaacggcagtaggcaccaccatgtaaaagtgagctcagacgtctctaaaaaatgtttcctttataaaagcacatggcggttgaatcttaaggttaaattttaatatgaaagatcctcatgaattaaatagttgatgcaatttttaacgttaattgatataaaaaaaaaaacaacaaaattaggcttgtaaaactgactttttcattacgtgggttttgaaatctagccccagacatactgtgttgagagatacttagagggagggagtaggttttgaagaggttgatggtggtggggagggaaggcctcctgaattgagtttgatgcagagctttttagccatgaagaatctttcagtcatagtactaataattaaattttcagtatttaaaaagacaaagtattttgtccatttgagattctgcactccatgaaaagttcacttggacgctggggccaaaagctgttgattttcttaagttgacggttgtcaatatatcgaactgttcccaagttagtcaagtatgtctcaacactagcatgatataaaaagggacactgcagctgaatgaaaaaggaatcaaaatccactttgtacataagttaaagtcctaattggatttgtaccgtcctcccattttgttctcggaagattaaatgctacatgtgtaagtctgcctaaataggtagcttaaacttatgtcaaaatgtctgcagcagtttgtcaataaagtttagtcctttttta

SEQ ID NO: 3007 - DNA, 1615 bp, Homo Sapiens
  NM_006563
tcagagttcacgaggcagccgaggaagaggaggcttgaggcccagggtgggcaccagccagccatggccacagccgagaccgccttgccctccatcagcacactgaccgccctgggccccttcccggacacacaggatgacttcctcaagtggtggcgctccgaagaggcgcaggacatgggcccgggtcctcctgaccccacggagccgcccctccacgtgaagtctgaggaccagcccggggaggaagaggacgatgagaggggcgcggacgccacctgggacctggatctcctcctcaccaacttctcgggcccggagcccggtggcgcgccccagacctgcgctctggcgcccagcgaggcctccggggcgcaatatccgccgccgcccgagactctgggcgcatatgctggcggcccggggctggtggctgggcttttgggttcggaggatcactcgggttgggtgcgccctgccctgcgagcccgggctcccgacgccttcgtgggcccagccctggctccagccccggcccccgagcccaaggcgctggcgctgcaaccggtgtacccggggcccggcgccggctcctcgggtggctacttcccgcggaccgggctttcagtgcctgcggcgtcgggcgccccctacgggctactgtccgggtaccccgcgatgtacccggcgcctcagtaccaagggcacttccagctcttccgcgggctccagggacccgcgcccggtcccgccacgtccccctccttcctgagttgtttgggacccgggacggtgggcactggactcggggggactgcagaggatccaggtgtgatagccgagaccgcgccatccaagcgaggccgacgttcgtgggcgcgcaagaggcaggcagcgcacacgtgcgcgcacccgggttgcggcaagagctacaccaagagctcccacctgaaggcgcatctgcgcacgcacacaggggagaagccatacgcctgcacgtgggaaggctgcggctggagattcgcgcgctcggacgagctgacccgccactaccggaaacacacggggcagcgccccttccgctgccagctctgcccacgtgctttttcgcgctctgaccacctggccttgcacatgaagcgccacctttgagccctgccctggcacttggactctcctagtgactggggatgggacaagaagcctgtttggtggtctcttcacacggacgcgcgtgacacaatgctgggtggttttcccacgaatggaccctctcctggactcgcgttcccaaagatccacccaaatatcaaacacggacccatagacagccctgggggagcctcttacggaaaatccgacaagccttcagccacagggagccacacagagatgtccaaactgtcgtgcaaacccagtgagacagaccgccaaataaacggactcagtggacactcagaccagctcccagatggccctggacagcaggagagggtgtgggatgaggcttcccagagaccctgggtctagaaagcggctcctgaaggtcccttattgtggctgatattaactgtcaatggttatgggtcctataaaaatgcccctcccagataaa

SEQ ID NO: 3008 - DNA, 1953 bp, Homo Sapiens
  NM_006564
gcagaccttgcttcatgagcaagctcatctctggaacaaactggcaaagcatctctgctggtgttcatcagaacagacaccatggcagagcatgattaccatgaagactatgggttcagcagtttcaatgacagcagccaggaggagcatcaagacttcctgcagttcagcaaggtctttctgccctgcatgtacctggtggtgtttgtctgtggtctggtggggaactctctggtgctggtcatatccatcttctaccataagttgcagagcctgacggatgtgttcctggtgaacctacccctggctgacctggtgtttgtctgcactctgcccttctgggcctatgcaggcatccatgaatgggtgtttggccaggtcatgtgcaagagcctactgggcatctacactattaacttctacacgtccatgctcatcctcacctgcatcactgtggatcgtttcattgtagtggttaaggccaccaaggcctacaaccagcaagccaagaggatgacctggggcaaggtcaccagcttgctcatctgggtgatatccctgctggtttccttgccccaaattatctatggcaatgtctttaatctcgacaagctcatatgtggttaccatgacgaggcaatttccactgtggttcttgccacccagatgacactggggttcttcttgccactgctcaccatgattgtctgctattcagtcataatcaaaacactgcttcatgctggaggcttccagaagcacagatctctaaagatcatcttcctggtgatggctgtgttcctgctgacccagatgcccttcaacctcatgaagttcatccgcagcacacactgggaatactatgccatgaccagctttcactacaccatcatggtgacagaggccatcgcatacctgagggcctgccttaaccctgtgctctatgcctttgtcagcctgaagtttcgaaagaacttctggaaacttgtgaaggacattggttgcctcccttaccttggggtctcacatcaatggaaatcttctgaggacaattccaagactttttctgcctcccacaatgtggaggccaccagcatgttccagttataggccttgccagggtttcgagaagctgctctggaatttgcaagtcatggctgtgccctcttgatgtggtgaggcaggctttgtttatagcttgcgcattctcatggagaagttatcagacactctggctggtttggaatgcttcttctcaggcatgaacatgtactgttctcttcttgaacactcatgctgaaagcccaagtagggggtctaaaatttttaaggactttccttcctccatctccaagaatgctgaaaccaagggggatgacatgtgactcctatgatctcaggttctccttgattgggactggggctgaaggttgaagaggtgagcacggccaacaaagctgttgatggtaggtggcacactgggtgcccaagctcagaaggctcttctgactactgggcaaagagtgtagatcagagcagcagtgaaaacaagtgctggcaccaccaggcacctcacagaaatgagatcaggctctgcctcaccttggggcttgacttttgtataggtagatgttcagattgctttgattaatccagaataactagcaccagggactatgaatgggcaaaactgaattataagaggctgataattccagtggtccatggaatgcttgaaaaatgtgcaaaacagcgtttaagactgtaatgaatctaagcagcatttctgaagtggactctttggtggctttgcattttaaaaatgaaattttccaatgtctgccacacaaacgtatgtaaatgtatatacccacacacatacacacatatgtcatatattactagcatatgagtttcatagctaagaaataaaactgttaaagtctccaaact

SEQ ID NO: 3009 - DNA, 3946 bp, Homo Sapiens
  NM_006565
cccatgctgccctgcgccaacccctcccctcacctttcctcccccgccctctactcgccgcccggccggtccccccacccgtcccttcccttatcagcacccgcggccccggcagcgccgacgcaggcgcactgcaccgcgccgccgccattttgtgtctgagcctgtggagcgattaaaccgtgcgcggagctgcttctttggcggcagcggcggcggcggtggccggtgcggacgcgcggagctcgccggagacgccgggtggccggagccgtggagcggcggcggagcgggcgccgcggggggtgtggcgcggagaatgattacggacctgaagccaaagaacaagatgcgctagtggacagattgctgaccaggggcttgagagctgggttctattttccctcctcaaactgactttgcagccacggagaggcaggggaaatggaaggtgatgcagtcgaagccattgtggaggagtccgaaacttttattaaaggaaaggagagaaagacttaccagagacgccgggaagggggccaggaagaagatgcctgccacttaccccagaaccagacggatgggggtgaggtggtccaggatgtcaacagcagtgtacagatggtgatgatggaacagctggaccccacccttcttcagatgaagactgaagtaatggagggcacagtggctccagaagcagaggctgctgtggacgatacccagattataactttacaggttgtaaatatggaggaacagcccataaacataggagaacttcagcttgttcaagtacctgttcctgtgactgtacctgttgctaccacttcagtagaagaacttcagggggcttatgaaaatgaagtgtctaaagagggccttgcggaaagtgaacccatgatatgccacaccctacctttgcctgaagggtttcaggtggttaaagtgggggccaatggagaggtggagacactagaacaaggggaacttccaccccaggaagatcctagttggcaaaaagacccagactatcagccaccagccaaaaaaacaaagaaaaccaaaaagagcaaactgcgttatacagaggagggcaaagatgtagatgtgtctgtctacgattttgaggaagaacagcaggagggtctgctatcagaggttaatgcagagaaagtggttggtaatatgaagcctccaaagccaacaaaaattaaaaagaaaggtgtaaagaagacattccagtgtgagctttgcagttacacgtgtccacggcgttcaaatttggatcgtcacatgaaaagccacactgatgagagaccacacaagtgccatctctgtggcagggcattcagaacagtcaccctcctgaggaatcaccttaacacacacacaggtactcgtcctcacaagtgcccagactgcgacatggcctttgtgaccagtggagaattggttcggcatcgtcgttacaaacacacccacgagaagccattcaagtgttccatgtgcgattacgccagtgtagaagtcagcaaattaaaacgtcacattcgctctcatactggagagcgtccgtttcagtgcagtttgtgcagttatgccagcagggacacatacaagctgaaaaggcacatgagaacccattcaggggaaaagccttatgaatgttatatttgtcatgctcggtttacccaaagtggtaccatgaagatgcacattttacagaagcacacagaaaatgtggccaaatttcactgtccccactgtgacacagtcatagcccgaaaaagtgatttgggtgtccacttgcgaaagcagcattcctatattgagcaaggcaagaaatgccgttactgtgatgctgtgtttcatgagcgctatgccctcatccagcatcagaagtcacacaagaatgagaagcgctttaagtgtgaccagtgtgattacgcttgtagacaggagaggcacatgatcatgcacaagcgcacccacaccggggagaagccttacgcctgcagccactgcgataagaccttccgccagaagcagcttctcgacatgcacttcaagcgctatcacgaccccaacttcgtccctgcggcttttgtctgttctaagtgtgggaaaacatttacacgtcggaataccatggcaagacatgctgataattgtgctggcccagatggcgtagagggggaaaatggaggagaaacgaagaagagtaaacgtggaagaaaaagaaagatgcgctctaagaaagaagattcctctgacagtgaaaatgctgaaccagatctggacgacaatgaggatgaggaggagcctgccgtagaaattgaacctgagccagagcctcagcctgtgaccccagccccaccacccgccaagaagcggagaggacgaccccctggcagaaccaaccagcccaaacagaaccagccaacagctatcattcaggttgaagaccagaatacaggtgcaattgagaacattatagttgaagtaaaaaaagagccagatgctgagcccgcagagggagaggaagaggaggcccagccagctgccacagatgcccccaacggagacctcacgcccgagatgatcctcagcatgatggaccggtgatggcggagccttgtgcgtcgccaggacttctctgggctgtgtttaaacggcccgcatcttaatttttctcccttctttctttttttggctttgggaaaagcatcattttaccaaacataccgagaacgaaaacttcaaggatgatgttagaaaaaaatgtgatttaactagaacttgctgtctgatgttagcaaatcatggaatgttctgagtccctgagggtttactgtgaagtgctgaggacagtgttgacaactaactcgttttcctagatggaaacggagacattgacccctccctccatgtggtaaaccactccagaatggccaccaggcttcccagagttctatggtcttcttcccaagagagtttttaattgtaaatgcatacttgggaaggacttagagttttaaactgttttttgcttttgcttttccctgactccctttgcttggagtcagctgcacaccagtagtatggcatgctacgatcaggttctgtcctgaaagctttgcctctttcttggcaaagtttctggtatggtcaagcttgtaaataactttttttacattttaatcttttccattaattaagaggttgaaaagaagtgcagtgtaagaaaacccagcattttaattacttgcaaattaagttaccacagactctgtagtgtgtaaatgttgacaaggaattggatcacaatcatgtagcagaatggcacccagaccactgcccaccagtgacggacatgcacgtggcagatcatgatttccagcccacggagccagcatttgaaccttgtataattaactttcagttatgatttcccatcgacattttctttgccctgtttgtagctgattgttgtgttttataaatcttctgttaaggcagaagggtgattatgagtggttcacagcagcccttataagctgggccagaaaatttcactaggtcagtaatttaaaccttggatcttcaaaaaataaaataatgtgaagcaaaaccaactaaaaagtgattcttgcacatgaactgtcacatgtttaaaaatgtgttttttagagagcctcagtcttactgatttcaaacacttttttcttctgtgtattgcttttaagagagccatcagttagctatcagactctaggttgatgcattttgtacttagctgtactgtgtgatatttttcattattttaggacgccaacatgagacctgtaataaaatatgtaatggggttgaaagctggggaggaggatctactgctgtacagctaataaatcataacggattaacaagtgctccaaagaaaaaa

SEQ ID NO: 3010 - DNA, 1841 bp, Homo Sapiens
  NM_006567
tttcaagggtgacttgatttcgcctgatcctggtcggcagggtggggtttcttggcattcctcaggccgggggatgcgacgtctgggtgtggaggtgatgagctaggggttctgtggcactccggctctgctcagggcgacctgcgtaggggcctctggggcaggcccgctttctgtcaaaatggcagcgcccagcgtgcgcgggtatctctgaagttggggtttaagattcttgcccgtgagagcgaacgagcctgccgtacttctgattttgaaacacctgggtctgggcttcccgggcgagcggtggaacctgtgagaagtttctacaatggtgggctcagctctcaggagaggtgcccatgcatatgtctacctggtgagtaaggccagtcacatctccagaggccatcagcaccaggcctggggatcgaggcctcctgcagcagagtgtgccacccaaagagctccaggcagtgtggtggagctgctgggcaaatcctaccctcaggacgaccacagcaacctcacccggaaggtcctcaccagagttggcaggaacctgcacaaccagcagcatcaccctctgtggctgatcaaggagagggtgaaggagcacttctacaagcagtatgtgggccgctttgggaccccgttgttctcggtctacgacaacctttctccagtggtcacgacctggcagaactttgacagcctgctcatcccagctgatcaccccagcaggaagaagggggacaactattacctgaatcggactcacatgctgagagcgcacacgtctgcacaccagtgggacttgctgcacgcgggactggatgccttcctggtggtgggtgatgtctacaggcgtgaccagatcgactcccagcactaccctattttccaccagctggaggccgtgcggctcttctccaagcatgagttatttgctggtataaaggatggagaaagcctgcagctctttgaacaaagttctcgctctgcgcataaacaagagacacacaccatggaggccgtgaagcttgtagagtttgatcttaagcaaacgcttaccaggctcatggcacatctttttggagatgagctggagataagatgggtagactgctacttcccttttacacatccttcctttgagatggagatcaactttcatggagaatggctggaagttcttggctgcggggtgatggaacaacaactggtcaattcagctggtgctcaagaccgaatcggctgggcttttggcctaggattagaaaggctagccatgatcctctacgacatccctgatatccgtctcttctggtgtgaggacgagcgcttcctgaagcagttctgtgtatccaacattaatcagaaggtgaagtttcagcctcttagcaaatatccggctgtgatcaatgatatttcattctggttgccctctgagaattacgcagaaaatgatttctatgacttagtccgaacaattggaggagacctggtggaaaaggttgatctcatagacaagtttgtacatccaaagacgcacaagaccagccactgctaccgcatcacgtaccgccacatggaacggactctgtcccagagagaggtcaggcacatccaccaggccttgcaggaggctgcagtccagctgttgggtgtggagggcaggttctgatgtcaccacttcactcaggctgcagccctcttggggctccaggatttgctgaaagagaaaaagatatggtttgtgaactggggcatcaatcatcttttgataaatggatcagttttaggactttcagaaaataaaagatcgctcttgaaaagct

SEQ ID NO: 3011 - DNA, 1323 bp, Homo Sapiens
  NM_006568
gtggcttttaccctggccgggcgggcggggctcagccgggctgggctgggctccgcggctggagccgggctctacccagagcaagaccctgatggctgcggtgtttctggtaacgctttatgaatactcgccgcttttctacatcgcggtggtctttacctgcttcatcgtgaccaccggcctggtattgggatggtttggttgggatgttccagtaattctgagaaattcagaagagacccagttcagcacaagagttttcaaaaagcaaatgagacaagtcaagaatccttttggcttagagatcactaatccatcttcagcttcaattacaactggcataaccttgacaacagattgccttgaagatagcctccttacatgctactgggggtgcagtgttcaaaaattatatgaagctctgcagaagcatgtttattgcttcagaataagcactccccaagcattagaagatgctctgtatagtgaatatctctatcaggaacagtattttattaaaaaggatagcaaagaagaaatatattgccagttaccaagagatactaaaattgaagactttggtacagtacccagatctcgctatccattggtagcgctattgaccttagctgatgaggatgaccgggaaatttatgatattatttccatggtgtcagtgattcatattcctgataggacttataaactatcctgcagaatattgtatcaatatttactcttggctcaaggtcaatttcatgatcttaagcaacttttcatgtctgcaaataataatttcactccctccaacaattcctcttcagaagaaaaaaacacagacagaagtttgttggaaaaggtgggactctctgaaagtgaagttgagccatcggaagagaacagcaaggactgtgttgtttgccagaatgggactgtgaactgggtactcttaccatgcagacacacatgcctgtgtgatggctgtgtgaagtattttcagcagtgcccaatgtgcaggcagtttgttcaggaatcttttgcactttgcagtcaaaaagagcaagataaagacaaaccgaagactctttgaagacatcgtaacactgaaaagtacactttctactaaagatgcagaaattgatgatcttggaattcatcataacatggaatctacagtactgaccatcaatgaaaattatattttaacttcatatttgtatggtacttggatgataaaaattaattattcctttctgcttagtgaatgaatactggaatccatctgtgttgatacataaaaattcattcaactcttgaaaagaa

SEQ ID NO: 3012 - DNA, 1657 bp, Homo Sapiens
  NM_006570
cgccggaagtgggtggtggcggggacgcagcggctccctcccggaaagcgagcgtatctcccgagccgttgccactgacagccgcgggcgctcccatctgagtaagagccagcccgtccgcggcctctccagccccgggttcgcgctctcgactctcctgcctgcccagctgcgcggcggagcggagcgaggcgcggcctgcgagtccccggcagcccccgacccctccctcggcgctgcgtgtaggccgcgccctcaggcccagtccgcggtgccccggcgggtgatgccaaatacagccatgaagaaaaaggtgctgctgatggggaagagcgggtcggggaagaccagcatgaggtcgataatcttcgccaattacattgctcgcgacacccggcgcctgggggccaccattgacgtggaacactcccacgtccgattcctagggaacctggtgctgaacctgtgggactgtggcggtcaggacaccttcatggaaaattacttcaccagccagcgagacaatatcttccgtaacgtggaagttttgatttacgtgtttgacgtggagagccgcgaactggaaaaggacatgcattattaccagtcgtgtctggaggccatcctccagaactctcctgacgccaaaatcttctgcctggtgcacaaaatggatctggttcaggaggatcagcgtgacctgatttttaaagagcgagaggaagacctgaggcgtctgtctcgcccgctggagtgtgcttgttttcgaacgtccatctgggatgagacgctctacaaagcctggtccagcatcgtctaccagctgattcccaacgttcagcagctggagatgaacctcaggaattttgcccaaatcattgaggccgatgaagttctgctgttcgaaagagctacattcttggttatttcccactaccagtgcaaagagcagcgcgacgtccaccggtttgagaagatcagcaacatcatcaaacagttcaagctgagctgcagtaaattggccgcttccttccagagcatggaagttaggaattccaacttcgctgctttcatcgacatcttcacctcaaatacgtacgtgatggtggtcatgtcagatccgtcgatcccttctgcggccactctgatcaacattcgcaatgcccggaaacactttgagaagctggagagagtggatggccccaagcacagtctccttatgcgttgaatattgccaaatgctctttctgaaaatgctgaattgccttttttgtttgcatcctttatttttaatattcataatgtcgtgtgcttaaaagtgggctttgaagtgtgtgctgcttactcctttcatctttctccccgcttccccagtctttaaacattggacgctatttactcagctacccagtagagcttgaagctgacctttctgagaagttggtatggtgtaacactaaagtaggtggttcgtgtgtgttctcattacctggttatgatagatatgcacatcaaagcctttaccagtatcttcctgtattccgtatcagattgcaaagacggaatgttactattttatcagcaaggtattaaaatgcatttataaattcttcttggcttcattcatgaataaacgtgttagcaatttaaaaaaaaa

SEQ ID NO: 3013 - DNA, 1126 bp, Homo Sapiens
  NM_006571
caaccctgccaggctctccaatcgcatgtggaattatcgctctacccaggcggtggtgtcgatctacgttccaattggggccgtaccatggcggagaagactcaaaagagtgtgaagattgctcctggagcagttgtatgtgtagaaagtgaaatcagaggagatgtaactatcggacctcggacagtgatccaccctaaagcaagaattattgcggaagccgggccaatagtgattggcgaagggaacctaatagaagaacaggcccttatcataaatgcttacccagataatatcactcctgacactgaagatccagaaccaaaacctatgatcattggcaccaataatgtgtttgaagttggctgttattcccaagccatgaagatgggagataataatgtcattgaatcaaaagcatatgtaggcagaaatgtaatattgacaagtggctgcatcattggggcttgttgcaacctaaatacatttgaagtcatccctgagaatacggtgatctatggtgcagactgccttcgtcgggtgcagactgagcgaccgcagccccagacactacagctggatttcttgatgaaaatcttgccaaattaccaccacctaaagaagactatgaaaggaagctcaactccagtaaagaactaagaacagtgtataacatgaagataacattttgtctttgaccactgtcttttgaatgggcccacagtgtttatgtactcttaacaactcacagaataatacatgttcactttattttgtaaaattgggttgagaggaaactaatggagtttcattgtaactgtcctttgtaatttatataaatgtattattttcctatatccttggttcttttctgataatttacagatttagcttttcttttgttatataaactgctagccacaaattttagttatgtaaaaggctacccttgacaagaaaagacatactgtcatgtatttatattctagcatagactaaactgaataaaaatgctgataacaggacctttagtaagcatactttaatcagtttttctccttgaattaatcttttctcttaatttttattatgtactagttgtattaaagctaatgtgtttactttt

SEQ ID NO: 3014 - DNA, 6311 bp, Homo Sapiens
  NM_006572
ctccttccctccctccctcccccgctgtcctggcccgccctgcccggcccgccctgcgagtcagttcgctggttccctccctccctgggcgcgctcgggccgccgccgcgctccccgccctcgagcctcggtgccggagccgcccgccgccggaggaggaggtggagggagccggaggggcccgccgaggcggcggcggcggcggcaagatggcggacttcctgccgtcgcggtccgtgctgtccgtgtgcttccccggctgcctgctgacgagtggcgaggccgagcagcaacgcaagtccaaggagatcgacaaatgcctgtctcgggaaaagacctatgtgaagcggctggtgaagatcctgctgctgggcgcgggcgagagcggcaagtccaccttcctgaagcagatgcggatcatccacgggcaggacttcgaccagcgcgcgcgcgaggagttccgccccaccatctacagcaacgtgatcaaaggtatgagggtgctggttgatgctcgagagaagcttcatattccctggggagacaactcaaaccaacaacatggagataagatgatgtcgtttgatacccgggcccccatggcagcccaaggaatggtggaaacaagggttttcttacaatatcttcctgctataagagcattatgggcagacagcggcatacagaatgcctatgaccggcgtcgagaatttcaactgggtgaatctgtaaaatatttcctggataacttggataaacttggagaaccagattatattccatcacaacaagatattctgcttgccagaagacccaccaaaggcatccatgaatacgactttgaaataaaaaatgttcctttcaaaatggttgatgtaggtggtcagagatcagaaaggaaacgttggtttgaatgtttcgacagtgtgacatcaatacttttccttgtttcctcaagtgaatttgaccaggtgcttatggaagatcgactgaccaatcgccttacagagtctctgaacatttttgaaacaatcgtcaataaccgggttttcagcaatgtctccataattctgttcttaaacaagacagacttgcttgaggagaaggtgcaaattgtgagcatcaaagactatttcctagaatttgaaggggatccccactgcttaagagacgtccaaaaattcctggtggaatgtttccggaacaaacgccgggaccagcaacagaagcccttataccaccacttcaccactgctatcaacacggagaacatccgccttgttttccgtgacgtgaaggatactattctgcatgacaacctcaagcagcttatgctacagtgatgtacaaaagacttgctgttttaatatctttttgtgtttttgatgttttctgtttgttttgttttttaaaatagcagtttacaaccagaattagaacaatcttaattctacgtttaacttcttgaaaatcttagtactttttctgcggcctttggtttgtggctgaaagctgttgagtgactcatcgccaagatttgctgtaatgcaggctttgatctgtttcaccatggcttctattcaagtccagttaaaacctcccagctgacctcagactaggcatatttcaggctttaaattattctactttccaaactgaattctcctgcagtgccaagtatcaaaggtgtccttaaatacttgtagggatgaggttaggaatattcagttccaaaacaagatatcttctgtccgccttacatatagcagtgacacttgttgcctaactttatggtgacctcctattttgtaagggctgttagaagttctatctaagaaatggcattctgtaggtttatagaaggtttagccttcatattttaattgcttgtatacacaacagctgttttgcttttagatttctgtgtttctgaaggtaatgttcttcctgttttcaagtttacataaggatctttggtctgatgctgatgaagagttcacaggtggtatgggagagcaaaaggcaagctaatgctgtttaccgtgttttggtcaaacgtaacgagtgaaatagaatttgcctttctcatatttaattatcatgtagtttaatgtaccatatgtgaaacattctggccatagcagcaactaaaaactgcaagcaacttggtaacagaactttctaaataaacttaacctgttccagaatgtcatgtatttgacttttaagccctatctcagttggtcagtaaagaccaatccttactgtaggaaatcattgttgtatcatcacaaacatctatcttttgctgtcctgtccagtcccatcaactccacactgtgccatttgtggcatcgttttgtttatttggagtttgctaagggcagtatttttctgtcaagactattcaagaaggcattatttgagattcctgttcattcttggtgtgtctctaacagatacagtatgtatacatttgtataattgttgttgttgaaagtccagcttttttgaggtatattttaaatgttttaaggatgcttctaaggatcagtagtaatttttttagttcgcacctaaagatgattacattgacctcccccgactgcttaccaaattaaaatgtgtccacgaagtagctttgtgatcgcagatacattcatagtgaactcatcagaatggctggtttgcagtactgaaatactatcttctaggctgtatgtagtgctacaattagagaaacagaagtccaaggctggcgacagcttgaaaagtctgacagcttttctacttttcctgaaaattttaagactgtgatatctgtcattttactgtatagctgactgtgtactcaggtattttattggtccttgaaagattggtcgttatggatcacccagcctttccaagtcagtggctgttgttctgtcttgctgtctgatacgagagtggggcttttcagtgaactaaccagggattgttcttgacatacctgacttttctcacatttgaacttccactatcattgtatccatataacttctagcattttcatgccatggtaatccatgagctacacatacgtagcccggcaccgtgatgcaagttcatggtatcgtgcatgttcgtggtatcatggtatcattcatgcgtgtttgaatagttctacatctagtgcttcttgccaaaaagaatacattgtttaaattcacaaaattagcataattgcagtgctaatgaatatcggaatatgtgcacagtaacatttggactattcattggagagtttacccatacatttagcaaattgaatggccaaaacatttgactccagtgagggctcaagttagatccctatagaaagaggacacttcatcttacttaagtcatagttaagatctgtgatacgaaccatagatattgcctgacaaagcagaaatcaccaagtttcccccttttgaattaccaccaagaagtgttgaaacaccaaatagatatcatgttattttgggcatttgcagttttcttccctgctgcatgtaatgtctcagaatcaacattcttttaaaatctagactatattttgaggcaatgaattacttatattcaacttaggcttgttttgacattcagtagaactttaagttcaatctaaaggcttcagtccacatttttttatacgttgtattttaaaaacgtttgaaaggagtcttacacctgtatcatgaaaactgaatccttttgaaataccactatatgaagagagagatgaaatttagtgaacagaattgaaaaggtgctcataatttcactatgcaaacttaccccagtctctaaaaaagtaatttagatttaaagttctttgatgtatttgattttctaaatctttatggttatgatttggaataaaatgtgcctaatcctgtgttacattctgttcttaaatctgaatgccttctcatttaattctgaggaaatatcacacaagtgtcttcattgaccttgaagaaatgtatatacagttgccttataaaacaacataaatttagaccataacttttatagagaaagggttttgtcaaatgttttctgaaaatctgagtaattcaaagcatgcctctgcccctttaatatttttaataacctgcattgttgctgtctgccaaatattaaattgaaatcttcatttcaattttattatctggaaagggcactggattgctctgcaaccaaagaaagcaatatggaatgaaaaaactcattcacttttgtcttattttcttttaaggtgtattggcatgtaatttgcatagagaaggtcctctggttagtctctcaaattgaggctgtttagggaaatccttattcagttggtggcagtggttggtttaaagtagaaggaaataagatcgccttaataccagaaatgattagaagtgctgatttagattcaacaaataccatatgtccttatcattttttgtaagaagaaattggttaagtcctaactttcaatgtgtacccaaatacttgtatttatgcttttgataaaatgtattttcagcattaatacacatccgattatgccttatttatatatgaagaataaagttaccatgttatactgttatgtcctaaaattcaaatcactatttgagaaaccctcaaattggtgctttcattatataatgatacatttagacaaaaccccaaactaagccatttgaaacaagattctctccattgcagtttgtagcaatgttatttctgtgtatgtcatgagaaggctaaatatcagtgttaatttcttgtttgaatccgtgaaatcatgcctgtaaagcccaaacatttgtaacaaactccctaataaatttagagaaagtcactctgttaccatttcatttattttagttttatttgagaaattaagaccagaagttttgctcatgtctttttcacttggaaatctgacttagtacctagttaatttgtctctctcccatcattttaaggcgttcgcttctgttaatcacagatgatctgtccttgtgttgtgctgcttgactaaaagcactgttttgttttgttttgttttgttttttaatgataggatacagggtggcttttcagtctagtaaacatgaggaggggagagattgtgggtgggtgtgggtgtgtccgcatgtcccaaatacagcacatgcccatttttttatggtacgaggttagggcttattaataaatgtatactagatcttgaagtgtaagtctaagtctgaacattttaaacaagttggactttatggctttttcaagttccatcaagtagatactagtcttaggctggtaggtgattaacaacatcatttggagtacagtgtttgtaccactagcattcttatgtctgtacttgaacgtgtagttagcatttaagttatgttcactcttgtagcattcaggtcttaccatctggtttcaaatgcgagagcttatatgaacattgttttgaaagcatgaatgatatggcaatattttatgtcttgataaggagagttttgtgacatatacaaatctgctgttgatgatgaaagtttacaggtggatcagagtatgctggaactcagtgtgcataaaatttcagtcagtgaatatcactgaacgtcatatactacttggtatgtgactttggtttgtgttaagaaagcttgtatataatattttttgccatagtaagtgagaaattgtccttaatcatgcctgtttgatggtactaggaaagaaaggggtagagattaattcttgcacagtataagcaacagtgcaacaaactatgccatttaccttttacctcttacttgaaggcagaatcgcaaaacgtttgaaatggcttttctaaactactctactctggtgagagctcatttaccacaagaagccttataaaaaagtatattttgtaataaccccgtagatactgtacctaacaaaacatgactcgtattagctctataaaatatttgtggcttaggattttttttttacatatatctttttataactttccaggaactaagcacattatctgataattgttgtaaatttttttgtcagtgctttagttcaggatgggcaataaattatttctaaaggaggtctaaaagtggaaagaatggtttgattttataaaatgagttgctagttcattacagctttttacttttgtacatattttgcaaaacatttgcctcttgctattaatatttgctttgtaaaaattactgacatttaataaacatttgtaaacaattcaa

SEQ ID NO: 3015 - DNA, 1204 bp, Homo Sapiens
  NM_006573
gaaattcttacaaaaactgaaagtgaaatgaggaagacagattgagcaatccaatcggagggtaaatgccagcaaacctactgtacagtaggggtagagatgcagaaaggcagaaaggagaaaattcaggataactctcctgaggggtgagccaagccctgccatgtagtgcacgcaggacatcaacaaacacagataacaggaaatgatccattccctgtggtcacttattctaaaggccccaaccttcaaagttcaagtagtgatatggatgactccacagaaagggagcagtcacgccttacttcttgccttaagaaaagagaagaaatgaaactgaaggagtgtgtttccatcctcccacggaaggaaagcccctctgtccgatcctccaaagacggaaagctgctggctgcaaccttgctgctggcactgctgtcttgctgcctcacggtggtgtctttctaccaggtggccgccctgcaaggggacctggccagcctccgggcagagctgcagggccaccacgcggagaagctgccagcaggagcaggagcccccaaggccggcctggaggaagctccagctgtcaccgcgggactgaaaatctttgaaccaccagctccaggagaaggcaactccagtcagaacagcagaaataagcgtgccgttcagggtccagaagaaacagtcactcaagactgcttgcaactgattgcagacagtgaaacaccaactatacaaaaaggatcttacacatttgttccatggcttctcagctttaaaaggggaagtgccctagaagaaaaagagaataaaatattggtcaaagaaactggttacttttttatatatggtcaggttttatatactgataagacctacgccatgggacatctaattcagaggaagaaggtccatgtctttggggatgaattgagtctggtgactttgtttcgatgtattcaaaatatgcctgaaacactacccaataattcctgctattcagctggcattgcaaaactggaagaaggagatgaactccaacttgcaataccaagagaaaatgcacaaatatcactggatggagatgtcacattttttggtgcattgaaactgctgtgacctacttacaccatgtctgtagctattttcctccctttctctgtacctctaagaagaaagaatctaactgaaaatacca

SEQ ID NO: 3016 - DNA, 3163 bp, Homo Sapiens
  NM_006576
gatgtttcagtcctggaaagacaagcatcatgcctctgaccagtgccttcagggctgtggacaacgaccctgggatcattgtctggagaatagagaaaatggagctggcgctggtgcctgtgagcgcccacggcaacttctatgagggggactgctacgtcatcctctcgacccggagagtggccagtctcctatcccaggacatccacttctggatcgggaaggactcctcccaggatgagcaaagctgcgcagccatatataccacacagctggacgactacctgggaggcagccctgtgcagcaccgagaggtccagtaccatgagtcagacactttccgtggctacttcaagcagggcatcatctacaagcaggggggtgtcgcctctgggatgaagcacgtggagaccaatacctacgacgtgaagcggctgctacatgtgaaagggaaaagaaacatcagggctaccgaggtggaaatgagctgggacagtttcaaccgaggtgatgtcttcttgctggaccttgggaaagtcatcatccaatggaatggcccagagagcaacagtggggagcgcctgaaggctatgcttctggcaaaggatattcgagacagggagcgagggggccgtgctaaaataggagtgatcgagggagacaaggaggcagccagcccagagctgatgaaggtccttcaggacacccttggccgacgctccattatcaagcctacagtccctgatgagatcatagatcagaagcagaaatcaactatcatgttgtatcatatctcagattcagctgggcagctggcagtcacagaggtagcaacaaggcctctggtccaggacttactgaaccatgatgactgctacatcctggaccaaagtggaaccaaaatctacgtgtggaaaggaaaaggagccacaaaggctgaaaaacaggcagccatgtctaaagcgctgggcttcatcaagatgaagagctaccccagcagcaccaatgtggagaccgtcaacgatggtgctgagtcggccatgttcaagcagctgttccagaagtggtcagtaaaggaccagaccatgggcctggggaaaacgttcagcattggtaaaattgctaaagttttccaggataaatttgatgtgactctgctacacaccaagccagaggtagctgcccaggaaagaatggtcgatgatggcaacggaaaagttgaggtctggagaattgagaacctggagctggtccctgtggagtatcaatggtatggcttcttttatgggggagactgttatctggtcctctacacatacgaggtaaatgggaagccacatcacatcttgtacatctggcagggccgccacgcctcacaggatgagctggcagcctcagcataccaggcagtggaggtggatcggcagtttgatggggctgctgtgcaggttcgagtcaggatgggaacggagccacgccacttcatggccatcttcaaagggaagctagttatctttgagggtgggacttccaggaagggaaatgccgagcctgaccctccagtaagactcttccaaattcatggaaatgacaaatctaacaccaaagcagtggaagttccagcctttgcctcctccctaaactccaatgatgtctttctgctgcgaactcaggcagagcactacctgtggtatggcaaggggtctagtggggatgagcgggcaatggctaaggagctggccagccttctctgtgatggcagcgagaacactgtggccgagggccaggagccagccgagttctgggacctactgggagggaaaactccctatgccaatgataaaagacttcagcaggaaatcctagatgtccagtctcgtctctttgaatgttccaataagaccggccaattcgttgtcactgagatcacagacttcacccaggatgacctgaaccctactgacgtgatgctcctagatacctgggaccaggtgttcttgtggattggggctgaggccaatgccacggagaaggagagtgcccttgccacagcacagcagtacctgcacactcaccccagcggccgagatcccgacacaccaatcctgatcattaagcaggggtttgagcctcccatcttcacaggctggttcctagcctgggaccctaacatttggagtgcaggaaaaacatatgaacaattaaaagaagagctgggagatgctgctgctatcatgcgaatcactgctgacatgaagaatgcaaccctctccctgaattctaatgacagtgagccaaaatattaccctatagcagttctgttgaaaaaccagaatcaggagctgcctgaggatgtaaaccctgccaaaaaggagaattacctctctgaacaggactttgtgtctgtgtttggcatcacaagagggcaatttgcagctctgcctggctggaaacagctccaaatgaagaaagaaaaggggcttttctaaagcaagaaggcctatacctattgcaaggccacagaaaagagcagatagtgccaatatcaggaaataatttatccaccaatttctgcctgacattcagctacttaatttagatataatagagtctgcaaatcacggcatgttctccattttttctcatccttgcattccttgcttgttatatacctaaaatgttaaccatatagtttttgggttttgtggccctctagctaaagcctcagcagaaagcactaaaactgcataaatctggagaaatcaaaagaaagagaaccaaaaaacaatgcttaaaatgtttaataactttatgtttaatattataccaggacctacctttgttttcaattttaagatgattatttctaaaatctatttagcctgtaaatcattgaaatcatatatgcactccataggcaaaatccaaatacccagatctgtaatgtgtcaaagcatttttcacttttcaaataaagatacctataatgaacaaaaaaaaaaaaaaaaaaaaaaaaaaaaaaaaaaaaaaaaaaaaaaaaaaaaaaaaaaaaaaaaaaaaaaaaaaaaaaaaaaaaaaaaaaaaaaaaaaaaaaaaaaaaaaaaaaaaaaaaaaaaaaaaaaaaaaaaaaaaaaaaaaaaaaaaaaaaaaaaaaaaaaaaaaa

SEQ ID NO: 3017 - DNA, 2788 bp, Homo Sapiens
  NM_006577
ggcgcagcggcagcggcagcagcggcaacaagtgccggaggctagcagagccaagccggagcagtccctgccgccgacaccgccgggccgcccgtccggggcgccgcgcatggagcgtgagctgcggcggtcgccgggctgagccgcgcggagcggccgggacgtggatgtggccgcgatctcccgcccttgcccccgccccgccgagctggagctgctcccggacaagatatgagaaatgagtgttggacgtcgaagaataaagttgttgggtatcctgatgatggcaaatgtcttcatttattttattatggaagtctccaaaagcagtagccaagaaaaaaatggaaaaggggaagtaataatacccaaagagaagttctggaagatatctacccctcccgaggcatactggaaccgagagcaagagaagctgaaccggcagtacaaccccatcctgagcatgctgaccaaccagacgggggaggcgggcaggctctccaatataagccatctgaactactgcgaacctgacctgagggtcacgtcggtggttacgggttttaacaacttgccggacagatttaaagactttctgctgtatttgagatgccgcaattattcactgcttatagatcagccggataagtgtgcaaagaaacctttcttgttgctggcgattaagtccctcactccacattttgccagaaggcaagcaatccgggaatcctggggccaagaaagcaacgcagggaaccaaacggtggtgcgagtcttcctgctgggccagacacccccagaggacaaccaccccgacctttcagatatgctgaaatttgagagtgagaagcaccaagacattcttatgtggaactacagagacactttcttcaacttgtctctgaaggaagtgctgtttctcaggtgggtaagtacttcctgcccagacactgagtttgttttcaagggcgatgacgatgtttttgtgaacacccatcacatcctgaattacttgaatagtttatccaagaccaaagccaaagatctcttcataggtgatgtgatccacaatgctggacctcatcgggataagaagctgaagtactacatcccagaagttgtttactctggcctctacccaccctatgcagggggaggggggttcctctactccggccacctggccctgaggctgtaccatatcactgaccaggtccatctctaccccattgatgacgtttatactggaatgtgccttcagaaactcggcctcgttccagagaaacacaaaggcttcaggacatttgatatcgaggagaaaaacaaaaataacatctgctcctatgtagatctgatgttagtacatagtagaaaacctcaagagatgattgatatttggtctcagttgcagagtgctcatttaaaatgctaaaatagatacaaactcaattttgcatagaaaggtgtattttgaatagttcccatgttgtgttctcacattagagtaatttctatattaaaccatgaaaattgcctttatgagtgatacccatttgagggcctctaaacccttcaatttggtactcacgtgaagagggaaagcggaagatggtaatttttttttatggatgatatggcaggatgattggttctgatcttaccggctagtggtcatttttaaaaaacttgtaccctcttatctgaaatcctgtttctggaatttggccattttaagtgattttgtttgccctcttctataatattcctacttcccataataatgactgatttatttgtaattcaggtatttataaacctattggctacaaagactttgttaaacattatccagtggttttcgtgaaatggaattatgtttatttttatgggatttgggtaaattttaaattgtctagaaaactgaaatttcagttgtcagttgtggaattcagtttttcaattgtggaaatttcctgccaccccaacagtatttttgtgtgttaattaattttgcaaaatgagaatcatggtgtgacactcatctaatttatcttgttgtgatgttatggtcataataaggagaaagagggtttaatttttcttgtatttggtttcctggtggtatcatagtgtaattttagtatttgaaaatcagtgtgattccttaatggccaactgaagattgaattgccgctaacaaccatatcgtgttagtgaattttcaatatggaccaggaaggcatatgtattttgaacttgagtgaaaaggttgaagttacagacttttgcatagatggtttgtcaatttaaaattccagaatttattattgccatattttcacatgctgcttatacaagattattattgagtagtaactgcttccctgtctatgtagaagtgcctgtgtttttatttattgttcagatcaaagaccaaaacattttcttaaatatattttatgtaatattttatttgtatacagtgttgttgatgaaatatttaactagagcatgatattttaaatgttaaggtgtaacatatgttaaataaaactgttatttttgaattttaaaatttgttttttgggggtatgaactactagagtttaaaattctgccaaactattacttatatgtactattgtgtaacatactttcttgaaatatttttgtttatagaattgaaggttcttatcagatgggatactggggactataaacaatggaaataaagccactgtatttttaaaaaaaaaaaaaaaaaaaaaaaaaaaaaaaaaaaaaaaaa

SEQ ID NO: 3018 - DNA, 1895 bp, Homo Sapiens
  NM_006585
gaggcggccccacgctgctttcccagaaggctgtgcgtgctcctcgcttcctccgcggtcttccgagcggtcgcgtgaactgcttcctgcaggctggccatggcgcttcacgttcccaaggctccgggctttgcccagatgctcaaggagggagcgaaacacttttcaggattagaagaggctgtgtatagaaacatacaagcttgcaaggagcttgcccaaaccactcgtacagcatatggaccaaatggaatgaacaaaatggttatcaaccacttggagaagttgtttgtgacaaacgatgcagcaactattttaagagaactagaagtacagcatcctgctgcaaaaatgattgtaatggcttctcatatgcaagagcaagaagttggagatggcacaaactttgttctggtatttgctggagctctcctggaattagctgaagaacttctgaggattggcctgtcagtttcagaggtcatagaaggttatgaaatagcctgcagaaaagctcatgagattcttcctaatttggtatgttgttctgcaaaaaaccttcgagatattgatgaagtctcatctctacttcgtacctccataatgagtaaacaatatggtaatgaagtatttctggccaagcttattgctcaggcatgcgtatctatttttcctgattccggccatttcaatgttgataacatcagagtttgtaaaattctgggctctggtatcagttcctcttcagtattgcatggcatggtttttaagaaggaaaccgaaggtgatgtaacatctgtcaaagatgcaaaaatagcagtgtactcttgtccttttgatggcatgataacagaaactaagggaacagtgttgataaagactgctgaagaattgatgaattttagtaagggagaagaaaacctcatggatgcacaagtcaaagctattgctgatactggtgcaaatgtcgtagtaacaggtggcaaagtggcagacatggctcttcattatgcaaataaatataatatcatgttagtgaggctaaactcaaaatgggatctccgaagactttgtaaaactgttggtgctacagctcttcctagattgacacctcctgtccttgaagaaatgggacactgtgacagtgtttacctctcagaagttggagatactcaggtggtggtttttaagcatgaaaaggaagatggcgccatttctaccatagtacttcgaggctctacagacaatctgatggatgacatagaaagggcagtagacgatggtgttaatactttcaaagttcttacaagggataaacgtcttgtacccggaggtggagcaacagaaattgaattagccaaacagatcacatcatatggagagacatgtcctggacttgaacagtatgctattaagaagtttgctgaggcatttgaagctattccccgcgcactggcagaaaactctggagttaaggccaatgaagtaatctctaaactttatgcagtacatcaagaaggaaataaaaacgttggattagatattgaggctgaagtccctgctgtaaaggacatgctggaagctggtattctagatacttacctgggaaaatattgggctatcaaactcgctactaatgctgcagtcactgtacttagagtggatcagatcatcatggcaaaaccagctggtgggcccaagcctccaagtgggaagaaagactgggatgatgaccaaaatgattgaaattggcttaatttttactgtaggtgaaggctgtatttgtagtagtactcaagaatcacctgatgttttcttattctccttaaattaagagttattttgtgtttgtattcttggctggatgttataataaacatattgttactgtcaaa

SEQ ID NO: 3019 - DNA, 2234 bp, Homo Sapiens
  NM_006590
tggcgcctgcgctggacgactcggccggtagtggagatgtccggccggtctaagcgggagtctcgcggttccactcgcgggaagcgagagtctgagtcgcggggcagctccggtcgcgtcaagcgggagcgagatcgggagcgggagcctgaggcggcgagctcccggggcagccctgtgcgcgtgaagcgggagttcgagccggcgagcgcgcgcgaggccccggcttctgttgtcccgtttgtgcgggtgaagcgggagcgcgaggtcgatgaggactcggagcctgagcgggaggtgcgagcaaagaatggccgagtggattctgaggaccggaggagccgccactgcccgtacctggacaccattaacaggagtgtgctggactttgactttgagaaactgtgttctatctccctctcacacatcaatgcttatgcctgtctggtgtgtggcaagtactttcaaggccggggtttgaagtctcacgcctacattcacagtgtccagtttagccaccatgttttcctcaacctccacaccctcaagttttactgccttccagacaactatgagatcatcgattcctcattggaggatatcacgtatgtgttgaagcccactttcacaaagcagcaaattgcaaacttggacaagcaagccaaattgtcccgggcatatgatggtaccacttacctgccgggtattgtgggactgaataacataaaggccaatgattatgccaacgctgtccttcaggctctatctaatgttcctcctctccggaactactttctggaagaagacaattataagaacatcaaacgtcctccaggggatatcatgttcttgttggtccagcgttttggagagctgatgagaaagctctggaaccctcgaaatttcaaggcacatgtgtctccccatgagatgcttcaggcagttgtactttgcagtaagaagacttttcagatcaccaaacaaggagatggcgttgactttctgtcttggtttctgaatgctctgcactcagctctggggggcacaaagaagaaaaagaagactattgtgactgatgttttccaggggtccatgaggatcttcactaaaaagcttccccatcctgatctgccagcagaagaaaaagagcagttgctccataatgacgagtaccaggagacaatggtggagtccacttttatgtacctgacgctggaccttcctactgcccccctctacaaggacgagaaggagcagctcatcattccccaagtgccactcttcaacatcctggctaagttcaatggcatcactgagaaggaatataagacttacaaggagaactttctgaagcgcttccagcttaccaagttgcctccatatctaatcttttgtatcaagagattcactaagaacaacttctttgttgagaagaatccaactattgtcaatttccctattacaaatgtggatctgagagaatacttgtctgaagaagtacaagcagtacacaagaataccacctatgacctcattgccaacatcgtgcatgacggcaagccctccgagggctcctaccggatccacgtgcttcatcatgggacaggcaaatggtatgaattacaagacctccaggtgactgacatccttccccagatgatcacactgtcagaggcttacattcagatttggaagaggcgagataatgatgaaaccaaccagcagggggcttgaaggaggcgtctagggctttgctcccaagggctgtggctgatgatggtaaataagaacacagaagctgtagctgaacacaggctggctggtgggcttcctaggccagcccagcttgtatgggttctggctacaccagagcaccaagagcccacttgcctgggatggccccacactgtcactcagctgttctttgatcatttttttctagattgatgctcctttctcccatgcattgagctcccatctagcttcagcagggcagaacccttctccagatgtgtgtaacttatgtcttgagtatctgggagtagttgaagaacagataattccttccaaacatcaagccttgggattcttggagcaagcagaaagccagtaacttcgctctgttagaggtggaggattttcctatggttccccccatttcctgatttgtatttttagatggattaaatagtctcctgtttttaaaccaaaaaaaaaaaaaaaaaaaaaaaaaa

SEQ ID NO: 3020 - DNA, 2500 bp, Homo Sapiens
  NM_006594
ttccgcagaaagcaagattgggcctatccgcgatgagaacggcgtggagggggaattaaggctggaactggagagggaggggtctgcggtcagtcggacgcggcgctggaaatccggcggaggacctagaagtagcgggagcgatctgtgggcggggcgaacggcctgccggccgacggctcccacatcaggacgagaaggagccctcgagttaccgtgggagctgtgggagctgccctgtgactcttaggaagatgccgtaccttggctccgaggacgtggtgaaggagctgaagaaggctctgtgcaatcctcacattcaagctgataggctgcgctaccggaatgtcatccagcgagtgattaggtacatgactcaaggcttggacatgtctggtgtttttatggaaatggtgaaggccagtgccactgtagatattgtccagaagaagttggtttatctgtacatgtgcacatatgctcccctgaaaccagatctggctctcctggccatcaatacgctgtgcaaagactgctcagaccccaatccaatggtgcgagggctggcgttacggagcatgtgtagcctcaggatgcctggtgtgcaggagtatatacaacagcctattctcaatggtctgcgggataaggcttcatatgtcaggagagtggcagtccttggatgtgccaagatgcataatcttcatggagactctgaagtagatggtgccctggtaaatgaattatacagtttgctgcgtgaccaggatccaattgtagttgtgaactgcttgaggtctctagaggaaattctgaaacaggaaggaggcgttgtcatcaataagcccattgctcaccatctcttaaatcgaatgtcaaaactggaccaatggggccaggctgaagtattgaactttctgctacgctaccaaccccgcagtgaggaagaactatttgacattctcaatctgttggatagtttcctcaagagcagtagcccaggtgtggtgatgggagctaccaaactttttctgatcttggcaaaaatgtttccccacgtacaaactgatgtccttgtgcgggtcaagggacctttgctagctgcctgttcttcagagagccgtgagctctgttttgttgctctttgtcatgtacgccagatcttgcatagtttaccaggtcactttagcagccactacaaaaagtttttttgctcctactcggagccccactacatcaaactacagaaagtggaggtgctgtgtgaactggtgaacgatgagaatgtgcagcaggtgctagaggagcttcgagggtactgcacggatgtgtctgcggactttgcacaggctgccatctttgccataggtggcattgccaggacttacacagatcaatgtgttcagattttaacagagttgctgggtcttcgacaagagcacattaccacagtggtggtgcagactttccgagacctggtttggttgtgtcctcagtgtactgaagctgtatgtcaggccctgcccggctgtgaagagaacattcaagatagtgaggggaagcaagcacttatttggctacttggtgtccatggggaaagaattcctaatgctccttatgtgttagaggactttgttgagaatgtgaagtcggaaacatttccagctgttaagatggagctgctcactgctttgctgcgccttttcctctcccgacctgctgagtgccaggacatgctaggacgtttgttgtattactgcatagaggaagaaaaagatatggctgtacgggaccgaggtctcttctattatcgcctcctcttagttggcattgatgaagttaagcggattctgtgtagccctaaatctgaccctactcttggacttttggaggatccggcagaaagacctgtgaatagctgggcctcagacttcaacacactggtgccagtgtatggcaaagcccactgggcaactatctctaaatgccagggggcagagcgttgtgacccagagcttcctaaaacttcatcctttgccgcatcaggacccttgattcctgaagagaacaaggagagggtacaagaactccctgattctggagccctcatgctagtccccaatcgccagcttactgctgattattttgagaaaacttggcttagccttaaagttgctcatcagcaagtgttgccttggcggggagaattccatcctgacaccctccagatggctcttcaagtagtgaacatccagaccatcgcaatgagtagggctgggtctcggccatggaaagcatacctcagtgctcaggatgatactggctgtctgttcttaacagaactgctattggagcctggaaactcagaaatgcagatctctgtgaaacaaaatgaagcaagaacggagacgctgaatagttttatttctgtattagaaactgtgattggaacaattgaagaaataaaatcataacagagtcttgaaaaaaaaaaaaaaaa

SEQ ID NO: 3021 - DNA, 3777 bp, Homo Sapiens
  NM_006595
gtctttacgtagacgtcgggggcgcagccgcgctgtgcgcggtgactggcggctgcactggcggcagctggaggtgtaatagtgcgggtagtgggtttggagaagttccgaggcggcggtggcgccggtcaggacaaggatagcggaaccgggccctgggcttgtcgctcaccatgccgacagtagaggagctttaccgcaattatggcatcctggccgatgccacggagcaagtgggccagcataaagatgcctatcaagtgatattggatggtgtgaaaggtggtactaaggaaaagcgattagcagctcaatttattccgaaattctttaagcattttccagaattggctgattctgctatcaatgcacagttagacctctgtgaggatgaagatgtatctattcgacgtcaagcaattaaagaactgcctcaatttgccactggagaaaatcttcctcgagtggcagatatactaacgcaacttttgcagacagatgactctgcagaatttaacctagtgaacaatgccctattaagtatatttaaaatggatgcaaaagggactttaggtgggttgttcagccaaatacttcaaggagaggacattgttagagaacgagcaattaaattcctttctacaaaacttaagactttaccagatgaagtcttaacaaaggaagtggaagagcttatactaactgaatccaaaaaggtcctagaagatgtgactggtgaagaatttgttctatttatgaagatactgtctgggttaaaaagcttacagacagtgagtggaagacagcaacttgtagagttggtggctgaacaggccgacctagaacagaccttcaatccctcggatcctgactgtgtggacaggctcttacagtgcactcggcaggcagtacccctcttctctaaaaatgtccattccacaaggtttgtgacatatttctgtgagcaggttctccctaacctcggtaccttgactaccccagtggaaggtcttgatatacagttggaggtattgaaattgttggcggagatgagttcattttgtggtgacatggaaaaactagaaacaaatttaaggaaactatttgataagttattggaatacatgcccctccctccagaagaggcagaaaatggagagaatgctggtaatgaagaacccaagctacagttcagttatgtggaatgtttgttgtacagttttcaccagttgggccgaaaacttccagatttcttaacagccaaactgaatgcagaaaagctcaaagatttcaaaatcaggctgcagtactttgcacggggcctgcaagtttatatcagacaacttcgcttagctctccagggtaaaacgggtgaggccttaaaaacagaagagaacaagattaaagtcgttgcattgaaaataacaaacaatatcaatgttttaatcaaggatctcttccacattcctccttcttataagagcacagtaacactatcctggaaacctgtacaaaaggttgagattgggcaaaagagagccagtgaagatacaacttcaggttcaccacccaagaaatcttcagcaggaccaaaaagagatgccaggcagatttataaccctcccagtgggaaatatagcagcaatttgggcaactttaattatgagaggagccttcaggggaagtagaggtggccgaggttggggcacacgaggaaatcgtagtcggggaagactctactgaataagacatcagcattcttcagcattgtcatgagcttaatatacttaaattctactactcattggattgccggggatgtccctttaaacagactgctgccttcagctaaaaacttaatgttctttatacctttgtatgtatgacctacttttgtaacagaccatggttgtgtccaaggtaaaaccacagtgatatttttggatgctttgtctgcaatcttgacttgtttttgcagtatcattattcagacttcaaattgtgaatcttttaaacatcttgataatttgttgttgagagctgttcattctaaaatgtaatgaaattcagtctagttctgctgataaagatcatcagttttgaaaggttactgattttcctcttccctcttagttttttacccaatatatggagaagagtaatggtcaatcttaacattttgttttaattgtttaataaagctgctgggcagtggtgcagcattcctacctagtgtcataaaagcaaaatacttacatagctttcttaaaatataggaatgacattacatttttaggagaaagtaagttgctttgcaccgcctacttaattcttttccatatattgtgatacaaacttttgaatatggaatcttactatttgaatagaaatgtgtatgtataatatacatacatacataagcatatatgtgtgtgtgtgtgtgtatatatatatatatgcatgctgtgaaacttgactacacaacataaatcactttttaaattccaggaacgggtagtctgacacggtgattatccttttgaggctgaatccgttattaacttgttatttaggtttttactcccagtagcaagggattctaagttagttgcacttacatgattattgttatttaaaactaagaataaaggctgcattttcaaagataaattggaattgctgttggtgaaataacaaccaaaatactgaatctgatgtacatacaggtttctacaggaagagatggtataatttacaatttggagatttaataaccagggctacccagaaaaagtgacttgataacatggtaccaataagtaagggatgctctctcggtttgcttttgccactttcaagattttaacttctcaggttattaatcaaaattattgtataagttagccaatagaatttttaggttaaaacaacagatggggggtttgtggagtgtttaatgtcatgggcatttttagtagcatagaccctttgttctgcatttgaatgtttcgtatatttttgtttcacagttaatcttccctccccaagtttgctattcaaatcaactgcctgaatgacatttctagtagtctgatgtatttttctgaggaatagtttgtgattccaatgcaggtgtcttcattaccattacctctacactgcagaagaagcaaaactcctttattagaattactgcacatgtgtatggggaaaatagttctgaaaggctagaatgatacaagtgagcaaaagttggtcagcttggctatggagtggtggcaataatctctaaacattccaaaagaccatgagctgaacctaaactcccttggaatctgaacaaaggaatataaaattgccatttgaaaactgaccagctaatctggacctcagagatagatcagccagtggcccaaagccatttcaagtacagaaattatagagactacagctaaataaatttgaacattaaatataattttaccactttttgtctttataagcatatttgtaaactcagaactgagcagaagtgactttactttctcaagtttgatactgagttgactgttcccttatccctcacccttccccttccctttcctaaggcaatagtgcacaacttaggttatttttgcttccgaatttgaatgaaaaacttaatgccatggatttttttcttttgcaagacacctgtttatcatcttgtttaaatgtaaatgtccccttatgcttttgaaataaatttccttttgtaattttgaaaaaaaaaaaaaa

SEQ ID NO: 3022 - DNA, 2276 bp, Homo Sapiens
  NM_006597
ctcattgaactcgcctgcagctcttgggttttttgtggcttccttcgttattggagccaggcctacaccccagcaaccatgtccaagggacctgcagttggtattgatcttggcaccacctactcttgtgtgggtgttttccagcacggaaaagtcgagataattgccaatgatcagggaaaccgaaccactccaagctatgtcgcctttacggacactgaacggttgatcggtgatgccgcaaagaatcaagttgcaatgaaccccaccaacacagtttttgatgccaaacgtctgattggacgcagatttgatgatgctgttgtccagtctgatatgaaacattggccctttatggtggtgaatgatgctggcaggcccaaggtccaagtagaatacaagggagagaccaaaagcttctatccagaggaggtgtcttctatggttctgacaaagatgaaggaaattgcagaagcctaccttgggaagactgttaccaatgctgtggtcacagtgccagcttactttaatgactctcagcgtcaggctaccaaagatgctggaactattgctggtctcaatgtacttagaattattaatgagccaactgctgctgctattgcttacggcttagacaaaaaggttggagcagaaagaaacgtgctcatctttgacctgggaggtggcacttttgatgtgtcaatcctcactattgaggatggaatctttgaggtcaagtctacagctggagacacccacttgggtggagaagattttgacaaccgaatggtcaaccattttattgctgagtttaagcgcaagcataagaaggacatcagtgagaacaagagagctgtaagacgcctccgtactgcttgtgaacgtgctaagcgtaccctctcttccagcacccaggccagtattgagatcgattctctctatgaaggaatcgacttctatacctccattacccgtgcccgatttgaagaactgaatgctgacctgttccgtggcaccctggacccagtagagaaagcccttcgagatgccaaactagacaagtcacagattcatgatattgtcctggttggtggttctactcgtatccccaagattcagaagcttctccaagacttcttcaatggaaaagaactgaataagagcatcaaccctgatgaagctgttgcttatggtgcagctgtccaggcagccatcttgtctggagacaagtctgagaatgttcaagatttgctgctcttggatgtcactcctctttcccttggtattgaaactgctggtggagtcatgactgtcctcatcaagcgtaataccaccattcctaccaagcagacacagaccttcactacctattctgacaaccagcctggtgtgcttattcaggtttatgaaggcgagcgtgccatgacaaaggataacaacctgcttggcaagtttgaactcacaggcatacctcctgcaccccgaggtgttcctcagattgaagtcacttttgacattgatgccaatggtatactcaatgtctctgctgtggacaagagtacgggaaaagagaacaagattactatcactaatgacaagggccgtttgagcaaggaagacattgaacgtatggtccaggaagctgagaagtacaaagctgaagatgagaagcagagggacaaggtgtcatccaagaattcacttgagtcctatgccttcaacatgaaagcaactgttgaagatgagaaacttcaaggcaagattaacgatgaggacaaacagaagattctggacaagtgtaatgaaattatcaactggcttgataagaatcagactgctgagaaggaagaatttgaacatcaacagaaagagctggagaaagtttgcaaccccatcatcaccaagctgtaccagagtgcaggaggcatgccaggaggaatgcctgggggatttcctggtggtggagctcctccctctggtggtgcttcctcagggcccaccattgaagaggttgattaagccaaccaagtgtagatgtagcattgttccacacatttaaaacatttgaaggacctaaattcgtagcaaattctgtggcagttttaaaaagttaagctgctatagtaagttactgggcattctcaatacttgaatatggaacatatgcacaggggaaggaaataacattgcactttataaacactgtattgtaagtggaaaatgcaatgtcttaaataaaactatttaaaattggcaccataaaaaaaaaaaaaaaa

SEQ ID NO: 3023 - DNA, 1397 bp, Homo Sapiens
  NM_006600
cggctccgctgcggaaggcggacgactagagtcgttgggcccggcgcgacccgcaggagcgtagagagcgcgggactagagtgcagagctccgggacgtggatcggagccggcgcgatgggcggagagcaggaggaggagcggttcgacggcatgttgctggccatggctcagcagcacgagggcggcgtgcaggagcttgtgaacaccttcttcagcttccttcgacgcaaaacagactttttcattggaggagaagaagggatggcagagaagcttatcacacagactttcagccaccacaatcagctggcacagaagacccggcgggagaagagagcccggcaggaggccgagcggcgggagaaggcggagcgggcggccagactggccaaggaagccaagtcagagacctcagggccccagatcaaggagctaactgatgaagaggcagagaggctgcagctagagattgaccagaaaaaggatgcagagaatcatgaggcccagctcaagaacggcagccttgactccccagggaagcaggatactgaggaagatgaggaggaagatgagaaggacaaaggaaaactgaagcccaacctaggcaacggggcagacctgcccaattaccgctggacccagaccctgtcggagctggacctggcggtccctttctgtgtgaacttccggctgaaagggaaggacatggtggtggacatccagcggcggcacctccgggtggggctcaaggggcagccagcgatcattgatggggagctctacaatgaagtgaaggtggaggagagctcgtggctcattgaggacggcaaggtggtgactgtgcatctggagaagatcaataagatggagtggtggagccgcttggtgtccagtgaccctgagatcaacaccaagaagattaaccctgagaattccaagctgtcagacctggacagtgagactcgcagcatggtggaaaagatgatgtatgaccagcgacagaagtccatggggctgccaacttcagacgaacagaagaaacaggagattctgaagaagttcatggatcaacatccggagatggatttttccaaggctaaattcaactagcccctgttttttcctccctgaactcttggggctgagctgcaaccacccaactttctttcccactcttctctgggacttgtgggcctcagggcttggggcaggcatgggactggcccaggcacacaggtcccggggcatcaggagaaaggctgggtcttgggaccttgtcctccccagttggcctactgttacacattaaaacgatttgcccagctaaaaaaaaaaaaaaaaaaaaaaaaaaaaaaaaaaaaaaaaaaaaaaaaaaaaaaaaaaaaaaaaaaaaaa

SEQ ID NO: 3024 - DNA, 3871 bp, Homo Sapiens
  NM_006606
cgcaggctccctgcgggagcaggctgggctcagctccgctggacccgcgctggggaactctggcctcgctgcactcatggcttctcctagcaaggcagtgattgttcccgggaacggaggcggggatgtgaccacccacggctggtatggctgggtgaaaaaggagctggagaagatacctggtttccagtgtttggctaaaaacatgcccgacccaattacagcacgagagagcatctggctgcccttcatggagacagagctgcactgtgatgagaagactatcatcattggccacagttctggggccatcgcggccatgaggtatgcagaaacacatcgagtatatgctattgtattagtgtctgcgtacacatcagacttgggggatgaaaatgagcgtgcaagtggatacttcacccgcccctggcagtgggagaagatcaaggccaactgcccttacattgtgcagtttggctctactgacgacccgttccttccctggaaggaacaacaagaagtggccgataggttggaaaccaaattgcacaaattcactgactgtggccactttcagaacacagagtttcatgaactgattactgttgtaaagtctttgctgaaagtaccagcatagactgtatgatttctgctattttgcatcccaatataggagtagaataatatctactatcagctgattactagacacatagaacatccagttaagttccgtaagtgcctgaaaaacaaacacaagtttcaacattcaatctaagttacaaatagcacttccattttccatagactctaaaactccccaaattgctatgaactaccacagtattttcctcatttgataagaaacataaggacagcttaactacccttctctatccgaagtgagtcagaaacagaacccaggtttcttgattcccactcctgagtaaaattaaataggttttatgtatgttgcaggtattgcacacttttcctctttgaaatcaaacttttctatttcactggggaaagaaaacatgactgaaagtccagagtgttagcttagagctcaaaatactagctgctgtttcaagctggccccagacattaaactcagactagggccttcacctctgacacttgcccctaagtccttcagacatgttgagagagactgagacaggagtcttccggagtcaggcaggaaggagaagcacagcaatatacattcataatatacgtacaactgactagatttgtttgagacaagagtggtgggatcagagccatgtggagagctcatggcctgtctaaattgttgccatgtggaaatggggcagagtgttgccaattttctgattttttgtgtggaaaaaaatctccaaattgtagtttttaaatttggggaatgcaaatatatatatatatacacacacacacacacacatacacatacaatccatatacatatggagtatgtaagttggcaataacagtatacatcaaaaaatttacaaacactgcaagacaaataaaatccaagccatccatttgtgaccacagtcataagcattcacttagccaggggcttttagataattgtctgtgaagtctgagaaaagactaagataaccaagatgaacataatgtcaaaggacgaaatcatggggacaatttggattttgttccaaaagacaagtgtttttaaaaagaacctttccatacttcgtgttctgttctatagagttaaaccttttaacttccatggccctttagatctctttcaagcacattccattttcttctgatcatacttcctcagaaaacctttttttggctgggtgtggtggctcatgcctgtaatcccagcactgtgggaggctgaggtggttgtattgcttgaggccaggtgtttgaggccagccagggcaacacagcaagaccccatctctacaaaatattaaaacattagctaggcatggtggtgcacacctgtagtcctagcttcttgggaggctgaggcaggattgcttgagcccaggagtttgagccttcagtgagctatgatcgcgccactgtactccatcctgggtgatggagcgaagaacctgtctcttaaaaaaaaaaatttttttttaattaaaaaaacccaccctttttcatttcccaacattttttggctattatgatcgctatgtgttccttcaaataatttccagtgaatccacacttgatgttgcaaagcctaagtttgctgcagaaatacaatttcctacacttcatacctaaaggagattcagagctatcgctcaaaaccaaaagtcttggtttttaaatgtgcttagacaaaaaaaatcaggaaaggtaccctaatcgttcaacagcaatcatctttggggaatgggcattttggtaggtaaagtgtggtggacgtccttattattatttttgagacagtgtcttgctctgtctcccaggctggaggtcagtggcacaaatctcagctcactctaacctgcacctcccgggttcaagtgattctcatctcagcctcccaagtagtgtgaactaaaggcatgtgccaccacgcctggctaatttttgtatttttagtagagacagggtttcaccatgttggccaggctggtctcgaactcctggcctcaagtgatccacccacctcagccgcccaaagtgttgggattacaggcatgagccaccatgcccggccccttattttactttatcctcctgattatttgaatttgttacactaagcatgtattttataatcaaaaataattaagatttaaaacaatgtatttgactactaaaaagcaaattatataaatcagttgaataataatgttgttaaagaggctgtttagcactaatttgaccaaatctatagtcaaagtttgattctacttgaattttttggaaatttgctgttgtattacttattctttgccttgttctctgtgaagtcctttcctaaaaaagaaacttatacaatttagttcacaaaactttgttgacctctttctctgtagaaatgaaaactaaatatatataattgagaaataattctgatactcttcattcctataaaagtaattaagatagacctataggattgttgaactttgctgccaaatatagtaaccagtaaccacagctagctgtaaaattgaaaattcagttcagtcaaactagccatatttcaagtgctcaacagccactggtggctattggttaccttactgaccagccaatataggctatttccgtcattatagaaagctctattggacaacattggtctaggacatatattttgtattttcccctcacccaccatccaataatgagtaatagcacaaagtaaaagtgacttaatttgaaattacttctgtttggctagtttgcttagctgatcaccaccaacatcataggtctataaatcacccaactaagatcaggggtgtttcatgggaaaatctacacaaactattcattaaaaaccatagagccatggactgtcatttctgatttctgtttgattctttgtggtcatcattgaatatacaggggcctctatacactctggggagtatctattctcaggtgagcaaaataccgaatactgaatggaaatcaactgtaagtattaggacttcatatgcaacttgaatttttggtgctgtccggagtctagagccccacaatctgttttggttacagtttatccctgtaggataaatgatccatttaactattcatcagaggtgctgtaattttaaattgtctcttgtctccttcagttaattttcagaattaaaaacataccatgggaaaaaaaaaaaaaaaa

SEQ ID NO: 3025 - DNA, 3244 bp, Homo Sapiens
  NM_006608
ctctccggcgtctccgcctggaggggaagatgcggcctgcctggcccgccgcctcgcccccggcctcacggtgggaccccgggcactgaggacggaggtcccgggcgccggcccgcggggcaacgggcactaggtgagagccggacgcgggcgagcgaaggaggcgggtgccgggcgactccagcggcggcccctgcccctcccccgcacccacgaacacgctcgcccgatatattgcagaggcttctccggtcgccgctgcgccagtttttttttgtttgtttgttgtgttttccctggcaaacagctggagaaagagcagctcatggagaggctgagagaagcggttttcgcgtcctacccaaactgggagagtaaccttcagcagctggactcaccgattggttttccttcattttcagtgaaatcccattctctggctggagacacagatggcctcaaatgagagagatgctatatcgtggtaccaaaagaagattggagcctacgatcagcagatatgggaaaagtcaatcgaacagactcagattaagggtttgaaaaacaaaccgaaaaagatgggccacataaagccagacttgattgacgttgacttaatcagagggtcaacatttgccaaagcaaaacctgaaattccatggacatctctgactcggaaggggcttgttcgagttgtattttttccattgttcagcaattggtggattcaggttacctctttaagaatctttgtttggctgttactactttatttcatgcaagttatagcaattgtcttatatttgatgatgcctattgtgaacataagtgaagtacttggacccttgtgccttatgctactcatgggaactgtccactgtcaaattgtgtctactcagataacaagaccatcaggaaacaatggaaatcgaagaagaagaaaattacgaaaaactgtaaatggtgatgggagccgagaaaatggaaataactcctctgataaagtcagaggaatagaaactttggaatctgtacccattattggtggtttttgggagactatctttggcaacaggattaaaagagtaaaattaatatctaacaaagggactgaaactgacaatgacccaagttgtgtccatcctatcattaagaggagacaatgtcgaccagagattagaatgtggcaaacaagagagaaagcaaaattttcagatggagaaaagtgccgtagggaggcttttaggcgtttgggtaatggggtgtctgatgacctgtcaagtgaagaagatggtgaagcacggacacagatgatattattgcgtaggagtgtggaaggggcctcaagtgacaatggttgtgaagttaagaatagaaaatcaatactttcaaggcacctaaactctcaggtaaagaaaaccactacaaggtggtgtcatattgtgcgggattcagatagtctggctgaatcagaatttgaatcagcagccttcagccagggctctagatcgggtgtgagtggtggctctcgaagcctcaacatgtcaagaagagactcagaaagcacccgccatgactcggagactgaggacatgttatgggacgacctgctacatggcccagagtgccggtcatctgtcaccagtgacagtgagggggcccatgtgaatacccttcactcagggaccaaacgtgaccccaaagaggatgtttttcagcagaatcatttattctggcttcagaattcaagtccttcctctgatcgagttagtgcaataatctgggaggggaatgagtgcaaaaagatggatatgtctgtgttggaaataagtggcatcatcatgagcagggtcaatgcctatcagcaaggagtaggttatcagatgctgggaaatgttgtcactattggattagcattttttccattcttacatcgacttttccgtgagaagagccttgaccaactaaagtccatttcagctgaggagatcttgactctcttttgtggggcaccacctgttacacctattattgttttgtcgataattaatttttttgaaagattgtgtcttacttggatgttttttttcatgatgtgtgtggcagagagaacatataaacagagatttttatttgcaaaactcttcagccatattacttctgccaggaaagctaggaaatatgaaatacctcatttcagacttaagaaggtggagaatattaaaatatggttatcactgcgttcctatctaaagagacgggggccacagcgttcagttgatgtggttgtatcctcggttttcctactgacactttcgattgctttcatttgttgtgctcaggttctccaaggacataaaactttcctgaatgatgcttataactgggagtttttgatctgggaaacagctttactactttttttattgcgtctggcctcactggggtctgaaaccaataagaaatacagcaatgtttcaatattacttacagaacagattaatttatatcttaagatggaaaaaaagccaaataagaaagaacagcttactctagtaaacaatgtattaaagctgtccaccaagttgttgaaagagctggacacaccatttagactctatggactgacaatgaatcccttaatctacaatatcacaagagtagttatcctttctgctgtctcaggtgttataagtgatcttctaggatttaatataagactgtggaaaattaaatcataagctgagtaaatgcctggactctcccctggctggtatcaaaacttacctatcaaggaaagtgatgactgcagaaaccagtgagatacccacctgcttgttcacatgcacaggtgctctcagctctgccaaagcgaatgaatggtgtttccggaggagcaagtccttttccaactgggtgtgcatgctaaaaacctgtattttcatgcttttcaaacaacatgaatagtcagctgactaaagactgtgtgtgttgtggtaacacaaagacaattttgtaagtttgcgcttcagtactgtgacagttatgtttactggacatagtcttttgggcaactatgatagatgcccaaagcatgaagcaaatatcttttattggaaatatgcaaattcaatacttttccattatagtctatagaactggagatttcatttctctatcaaagagagatcaagcgaactattttaggttaaatccgaataaaagaactttactggagactttc

SEQ ID NO: 3026 - DNA, 2089 bp, Homo Sapiens
  NM_006613
cgcactcaaaacaaaggaagaccgtcctcgactgcagaggaagcaggaagctgtcggcccagctctgagcccagctgctggagccccgagcagcggcatggagtccgtggccctgtacagctttcaggctacagagagcgacgagctggccttcaacaagggagacacactcaagatcctgaacatggaggatgaccagaactggtacaaggccgagctccggggtgtcgagggatttattcccaagaactacatccgcgtcaagccccatccgtggtactcgggcaggatttcccggcagctggccgaagagattctgatgaagcggaaccatctgggagccttcctgatccgggagagtgagagctccccaggggagttctctgtgtctgtgaactatggagaccaggtgcagcacttcaaggtgctgcgtgaggcctcggggaagtacttcctgtgggaggagaagttcaactccctcaacgagctggtcgacttctaccgcaccaccaccatcgccaagaagcggcagatcttcctgcgcgacgaggagcccttgctcaagtcacctggggcctgctttgcccaggcccagtttgacttctcagcccaggacccctcgcagctcagcttccgccgtggcgacatcattgaggtcctggagcgcccagacccccactggtggcggggccggtcctgcgggcgcgttggcttcttcccacggagttacgtgcagcccgtgcacctgtgagcagcccggcggccgatctggccaacgggcctttttacaggaactgaggtccagagaggacatggacacccccagctctgtcagagtcacacggggctcagtggacggccttggactgaacgtgggctcctaactgcctccggccgctctgcacaaactgggatggcccaggtcccccagcaagggtacccagcaagggtagctccggggcttcctggctggttgctttccattggctgccagctgtgtgacaccacagggcggagtctgtggaggccccgcccacctcctcttgtcaatggccccatctgccaggaaggttgaggactcccaggtttcacccactggaggctcaacctaaggaaccctggccatggtgggtgggttcaccttgggctgaccacccactgggcctgcctgcccctccctcaaaaggcccctggagttgttcaggctgttgggaggtggctcagcctcgaaggacagactgcacacctgttgacctaaactcactggacagactccaggtggacaccaactcctcaacagccccatgacttcagctccacctggggcacccagcaccccaccacagggctagaggccctaagaccctgaaaaaggggcgggcagtagggaaggtggaggcacactcctcttctgttggacaggtgagctctgagggcaagccctgggcccagccacgcagagaccctggctgccctggctcttgtttgtttaggcccaggttctgcccagaccggggcccagcagagctctcaggaggctgagaaacctccagggcagacagaaagttggggccagagctaggttttagagatcctacaggatcccacatgggacggctacctaggtggggcacggcccctacccgagaacaggagggtcctccagagaatgtgccatgatcagggatatgagcagggcctgcccagagcctgggcacctttgggagagggaaaagtgaggtgggacttggaaaggctttgaacgccaggctgatggttgagggatggtgggcagggagggagggcgaagaggctccctctggcatttgggagccggtgggtggagggaggagcccttggaggtggctgcagtcccttaatggggggccttgctctgggcatgtggggctcttcctccatccagagctggcccaagacccttagaaccctgagtgctggcaaatctcactgctcctgacccagcctgtgtattcaaaacgaaaacagtaaaaccaacatcaggatgtccgtcaaaaaaaaaaaaaaaaaaaaaaaaaaaaaaaaaaaaaaaaaaaaaaaaaaaaaaaaa

SEQ ID NO: 3027 - DNA, 4024 bp, Homo Sapiens
  NM_006621
cagagtgccctttctccccgcctcttccccctcccgggagctgccagtacttgacgtggcgtcaccgccctctaccctcgctttgcgtgcgtgtttgcgtacagcggaggtggcggcgcgggcaggtcggagctcggagctgctgttctggttctcttgtggccgccgtcgctgtccggctgccttgggctgccgaacagacaaggcgtgggccacagcacctcagaagccgacgcagctcgacgcaggggccggcaggagggtgggcgatcgcgtgtcggagggcgccgcgcgggcaggcgggcgggcgccagagggggaaagaggcgggggcggcgggtcagccgctggccgggccggccggggaatgtcgatgcctgacgcgatgccgctgcccggggtcggggaggagctgaagcaggccaaggagatcgaggacgccgagaagtactccttcatggccaccgtcaccaaggcgcccaagaagcaaatccagtttgctgatgacatgcaggagttcaccaaattccccaccaaaactggccgaagatctttgtctcgctcgatctcacagtcctccactgacagctacagttcagctgcatcctacacagatagctctgatgatgaggtttctccccgagagaagcagcaaaccaactccaagggcagcagcaatttctgtgtgaagaacatcaagcaggcagaatttggacgccgggagattgagattgcagagcaagacatgtctgctctgatttcactcaggaaacgtgctcagggggagaagcccttggctggtgctaaaatagtgggctgtacacacatcacagcccagacagcggtgttgattgagacactctgtgccctgggggctcagtgccgctggtctgcttgtaacatctactcaactcagaatgaagtagctgcagcactggctgaggctggagttgcagtgttcgcttggaagggcgagtcagaagatgacttctggtggtgtattgaccgctgtgtgaacatggatgggtggcaggccaacatgatcctggatgatgggggagacttaacccactgggtttataagaagtatccaaacgtgtttaagaagatccgaggcattgtggaagagagcgtgactggtgttcacaggctgtatcagctctccaaagctgggaagctctgtgttccggccatgaacgtcaatgattctgttaccaaacagaagtttgataacttgtactgctgccgagaatccattttggatggcctgaagaggaccacagatgtgatgtttggtgggaaacaagtggtggtgtgtggctatggtgaggtaggcaagggctgctgtgctgctctcaaagctcttggagcaattgtctacattaccgaaatcgaccccatctgtgctctgcaggcctgcatggatgggttcagggtggtaaagctaaatgaagtcatccggcaagtcgatgtcgtaataacttgcacaggaaataagaatgtagtgacacgggagcacttggatcgcatgaaaaacagttgtatcgtatgcaatatgggccactccaacacagaaatcgatgtgaccagcctccgcactccggagctgacgtgggagcgagtacgttctcaggtggaccatgtcatctggccagatggcaaacgagttgtcctcctggcagagggtcgtctactcaatttgagctgctccacagttcccacctttgttctgtccatcacagccacaacacaggctttggcactgatagaactctataatgcacccgaggggcgatacaagcaggatgtgtacttgcttcctaagaaaatggatgaatacgttgccagcttgcatctgccatcatttgatgcccaccttacagagctgacagatgaccaagcaaaatatctgggactcaacaaaaatgggccattcaaacctaattattacagatactaatggaccatactaccaaggaccagtccacctgaaccacacactctaaagaaatattttttaagataacttttattttcttcttactcctttcctcttgatttttttcctataatttcattcttgttttttcatctcattatccaagttctgcagaccacacaggaacttgcttcatggctctttagatgaaatagaagttcagggttcctcactctagtcactaaagaaggattttactctcccagcccagaaaggtgattctttctttaccatttctggggactttagtcttaattaggtaccttattaacaggaaatgctaaggtaccttctctgtggaacaatctgcaatgtctaaatcgccttaaaagagcccatttcttagctgctgaaatcagtgctctttcacttcttcagagaagcagggatggtacctacccggcaggtaggttagatgtgggtggtgcatgttaatttcccttagaagttccaagccctgtttcctgcgtaaaggtggtatgtccagttcagagatgtgtataatgagcatggcttgttaagatcaggaggcccacttggatttatagtatagcccttcctccactcccaccagacttgctcatttttcgagtttttaactagactacactctattgagtttaattttgtcctctaggatttatttctgttgtccaaaaaaaaaaaaaaagaaaagaaaaattaaggagaatttttggtgttaatgctgaggaattgcttgagtggttagttgttaccaatttctcttttgaacctttggagctaaggatgctgagtctagagaaatgctagtctcaagccctgttaagtccctctgtttctagcccgtagttcatagcatcagtgaactggagccacaacagcaaattctatcagctgtgtaccatacagcttgtgctgaaggcgaatttcttgagccattactcagtataaagcactgagttctatctttaggatttatctttaagagcaaatttctggtcagctgtgcttctgcaacctaaaatatttaaagggaggtaggtgtgggcaggaggaggaatgataaattgggccagggcaagaaaaatctagcttcatataatttgtctgggactatacaccctatataatgttagttttacagaagtaatatgacttttgattgctacataccacaaagagtttatgaactgagatcataaagggcaactgatgtgtgaagaaagtagtcagtacatcctggctcatgctctgaaagaatatccagagaggctctctcaaagatcagggagatgtattcccatgccatgcaccctgcttcccagcatttctgcatggtcaagtgagctttatgctcatgagctttaagtatataattatccaggattttaaatcctcaacttgttctagcttgtgatccctcaaagttgggtcatacgttagtgctagatactagaaattttcacttttccactgatcagagagacagacattaaaaacaaaaatagaagaaaggaaagctttcaccctgcagcttcttagcagggaacaattgtcttgccaaaacttttttcccttttctctcccattttcttttacccaatcccttcttactccttgccagtgtgaccatgctttcttctctgtagatgttaacagttaaggcctattttcctcgggcacttaaccaaccaatcagaacaccacatctgttaggggaggtaacctggccaacagtgtatccatcacgttagccctgctggagggaagggacccacattcacctgccctctgacctgccccttgatcccatatctattaccgtgtccataggaataataggtaagggctctgtctctgtcaagccatgtaacaaaggacactgttaaaaaaaaaaaaaagtctggcatcagagggagcatgtggagagcaacttgggaagaacaagttcattttgtattgaatgatttttaatgaatgcaatattaatccttgcagatgagcaataatcattaaaatcgattaaaatgataagaccttaaa

SEQ ID NO: 3028 - DNA, 4336 bp, Homo Sapiens
  NM_006624
acttctcgcgcaaatctgcagtgttcttgcagggctgctgatgggtggtcctgttcttttcgcggtcctgtttgcgcagagatgaaacggggaacttagcgtatccctaccgctctttttgatgacaggagtaaagggctgttcagactacctaaacaatgttgttaagagaagcactcgtacttctcagacttcgctgttccggaccccgcgagccaggggcaggcaccgggtccacccggggctgagctgcggcggcgcctgacaatgccccctcgcgccccggcctcggcgcccgctcccggctccagcgcgcctgcacctaaagaagtaaacaggtcatggcacgtttaacaaaaagacgacaggcggatacaaaagctatccagcatctttgggcagccattgagattatacggaaccagaagcagattgccaacattgaccgtattacaaagtatatgtctcgagtccacggtatgcaccctaaagagaccacccgtcagctgagcttagctgtgaaagatggtcttattgtcgaaactctaacagtgggctgcaaaggttcaaaagctggtattgaacaagaaggatattggttgccaggagatgagattgactgggaaacagaaaatcatgactggtattgttttgaatgccatttgcctggagaggtgttgatatgtgacctgtgttttcgtgtgtatcattccaagtgtttgtctgatgagttcaggcttagagacagcagtagtccctggcagtgcccagtttgcaggagcattaagaagaagaatacaaacaaacaggagatgggcacatacctcagattcattgtctcccgcatgaaggagagggctatagatcttaataaaaaggggaaggacaataaacacccgatgtacaggaggctggtgcactcagctgtggacgttcccaccattcaagagaaagtgaatgaagggaaataccgaagttatgaagagttcaaagctgatgcccaattgcttctccacaataccgtgattttctatggagcagacagtgagcaagctgacattgcgaggatgctatataaagacacatgtcatgagctggatgaactgcagctttgcaagaattgcttttacttgtcaaatgctcgtcctgacaactggttctgttatccttgtatacctaatcatgagctggtttgggctaaaatgaaaggttttgggttttggccagccaaagtcatgcagaaagaagacaatcaagtcgacgttcgcttctttggccaccaccaccagagggcctggattccttctgaaaacattcaagatatcacagtcaacattcatcggctgcacgtgaagcgcagtatgggttggaaaaaggcctgtgatgagctggagctgcatcagcgtttcctacgagaagggagattttggaaatctaagaatgaggaccgaggtgaggaagaggcagaatccagtatctcctccaccagtaatgagcagctaaaggtcactcaagaaccaagagcaaagaaaggacgacgtaatcaaagtgtggagcccaaaaaggaagaaccagagcctgaaacagaagcagtaagttctagccaggaaatacccacgatgcctcagcccatcgaaaaagtctccgtgtcaactcagacaaagaagttaagtgcctcttcaccaagaatgctgcatcggagcacccagaccacaaacgacggcgtgtgtcagagcatgtgccatgacaaatacaccaagatcttcaatgacttcaaagaccggatgaagtcggaccacaagcgggagacagagcgtgttgtccgagaagctctggagaagctgcgttctgaaatggaagaagaaaagagacaagctgtaaataaagctgtagccaacatgcagggtgagatggacagaaaatgtaagcaagtaaaggaaaagtgtaaggaagaatttgtagaagaaatcaagaagctggcaacacagcacaagcaactgatttctcagaccaagaagaagcagtggtgctacaactgtgaggaggaggccatgtaccactgctgctggaacacatcctactgctccatcaagtgccagcaggagcactggcacgcggagcacaagcgcacctgccgccggaaaagatgaagctggcccttcccggagtcaccccgatgattactcttttcagacacagcggtttttgtttccaagaagccaaaattgtttagaatttgcttcccattttgcaccagcctttaaacacttttcgtgaagaaattttgcacagtagtttaaatcttttgttaatgctcctccgaagtttttcagggggtaaaagtaacatcagtggagggtattattttaaataaattttaattgagaatttgttgcattttcagcaaattttaaaacatttttaggttttacagagattttaacctttaaacaacagatctttaaaaaacaggtgaatacaagtgagtttaacaaagaaacatttagaatagatctgaatgtaagaactacagaactgtttcagaaataaaacatactaccttgatgtgacatttttttcttaaccttgttgagctggttttgttcagcttaatttactgttcaaaggcattatctgttggtcacaccagtgggtatatgattgaatttagggaacagggttgacacagcagggctagtcctgcatattttttcttaaatatttcccaattgtgtttttcattatttcttttcaatatataacttttataacaaattattagctttgatcttgtagtttaaaattgcagggaactggggtaatcttttactgagctggatcttagagaaaatgaatatttaaattttaaagtttgcacatttcatctttgtcctaacatgagtgcttgtaacaaaataaacaacaaaaacaaagccaaaaactacctttatccatatgtgaaattatagatgaggcatacgaatttgtttaatgcttcccttcccttcccacatatcatctcactgcctattatctggtgtcacctcatgtatcgtaagttaatactaaaagaagagaaagcacttaagtttcacagaagccgttatgtttgtagtaatgggtcattgcctactaatgaactccatcactgtacacagaatgaagaataatgcatgttaattttcttgtattaaagatgccgtgatttgtaaaaagtctgtattttgcggaatgtctggattaagaagcattaccaataggaatggatcgatagttgaataatgattttttatacatagatatataaaatacagccaggaaaacttaaattacttttcttttaaaatatctcacaatttatgtggtatttttaaagactgatcttagaccaagtcaaattcccatttatcatttagttattttttgaggttagagaataatttgtacatatttatttagacctttgatatttattaaagcaattactcacaatggaagtgaaagaatcaggagaaaagccttttaaaaagtattctccaggtttgtcagggtcactctaaagataaaaatgtaactaagtcttctgtgaaatatcatccatctaatcttgatgctgttgcagatggtggtgacacaagttaattgacaaactactgccaaatggtgcacaatattttgtaaaaagtacccagtagccccatttcatacaatgtacctaaattatgcagtaacttggcatcatcgttccctccttgttgctgtgtaattagtcagtgttgccacagtgtgtggcgctgatggagatgtcagaaccgagaacacttaaccttctttgattgtttttcaagttttaagacttcgatccacccctatgagagcaagtaattgtggaaatatttttggtgtaaaatcattccagagtatgtaatatttaactgatagctgcatgaaagtgagattcgtgttactttggcttttctgtctctgttgacacggttgcacatttccaagttactacagcgtgaaaactgtgtgtttaaaaaaaaacaaaattaaaaaaagagattgtggcctggttttgtaaaagttttaggtaaaattacaattgattgttttaggaatcattattaaaaattttctgcaaatcataaagctatatcgaggtgttgagcttagccactatgcacattgtaattattcattgtggctgtccagttctatgatgcattctggcattttgtaagctgctctgactagcaatatatagattcatttaatgtgttaacattggttaataaatgtatttaaaaaaaactaaaaaaaaaaaaaaaaaaaa

SEQ ID NO: 3029 - DNA, 4897 bp, Homo Sapiens
  NM_006629
gagcactcctcccagattcctagagcggacagggcgatggcaggttcgccgggtgtgaggcttcacagcggtccggtgaccaagtcgagatggtgagaacaagaccaagattggaaagccagcttcagaggagggaattacagcaaaaattgaaccattgacagaagagtctagcagtctcagaatgttctccaggattctgaaggcaaagaattctgtgaatttggggataaattaaatgaaaaagatcagaacgtctttaaaaggagacctcataactgtgacgaatatgggcaaagctttgtttggagtacaagcctttttaggcatcgaaaaacgcactgtgagaaaccttatgaatgggataagtgtggaaaggccactggggagaaaccttattcctgtaattggtgtattaaaagtttcagttggagctcagaccttattaaacaccaaagagtccacactggtgaaaaaccttataaatgtgatgagtgtgggaaagccttcagtcagagctcagatcttattatacatcagagaatccatataggagaaaaaccctatcaatgccgtcattgtagtaaaagttttagccagcgctcagatctggttaaacatcagagaatccatactggagagaagccttatacttgtaaccagtgtaacaaacattttagagttctgatgtgataaaacatcaaagaatccacactggggagaaaccatataaatgtgatgtgtgtgggaaagccttcagtcagagctcagatcttattctgcatcagagaatccatactggggagaaaccatatccatgtaatcagtgtagcaaaagtttcagtcagaattcagaccttattaaacatcgaaggatccacactggagagaaaccctataaatgtaatgagtgtgggaaagcttttaatcagagctcagtccttattttacatcagaggattcatactggagagaaaccctatccctgtgatcaatgtagcaaaaccttcagtaggctttcagatcttattaatcatcaacgaattcacactggagagaagccttacccatgtaatcagtgcaataaaatgtttagtcgaagatgagatcttgttaaacatcacagaattcatacaggtgagaaaccctatgaatgtgatgaatgtgggaaaacctttagtcagagctccaaccttattcttcatcagagaatccacactggagagaaaccttatgcatgtagtgattgtactaaaagctttagtcgccgttcagatcttgttaagcatcaaagaatacacactggagagaaaccatatgcatgtaatcagtgtgataaaagttttagtcaaagctcagacctcactaaacatcagagagtacactctggtgaaaagccttatcattgcaatagttgtgagaaagccttcagtcagagttctgaccttattcttcatcagagaattcacactggagaaaaactattatctgtgcacacagtgcagcaaaagtttcagtcagatctcagacctcattaaacaccagagaatccacactggggaaaaaccatataaatgcagtgagtgcaggaaggctttcagtcagtgctcagctcttaccctacaccagagaatccacactgggaagaaaccaaatccatgtgatgagtgtggcaaaagctttagtcggcgttctgatctcattaaccatcaaaaaatacacactggtgaaaagccgtataagtgtgatgcatgtgggaaagccttcagcacatgtactgatcttattgaacaccagaaaacccatgctgaggagaaaccctaccagtgtgttcagtgcagcagaagttgtagccaactctctgaacttactattcatgaggaagtccattgtggagaagacagtcaaaatgtgatgaatgtgagaaaacctttagtgtgtacaccaactctattcagtaccagagacactgtaccagaaaaaaatctaatgaatgctgttgattattgatgagtatgaaaaaggttttaatcagtgttcaactcttatgctacattaaaaccacactggatccggatacgtatggtggctcacgcctgtaatcccaacactttgggaggcagatgtggaagcatcatttgagcccaggagtttgaggctgcagtgagctatgattccaccattgcactccagtctgggcaacagagcaagaccctgtctatttaaaaaaaaaaaaaaaccaccaataccacatgggagaaaacattaattcagtttttgtaatgaaaggttaactcagagctcagacattactaaaattaagaaaaattctccagcctgaccaacatggtgaaaccctgtctctaccaaaaaataaaaaataattagctgggcatggtggcaggcgcctgtagtcccagctattcgggaggctgaggcatgagaatcacttgaacctgggaggtgggggttgcagggagccgagatctgccactgcattccagcctgggcaacagagtgagactctctcaaaaaaaaaaaaaaaagaaaaaaaaactctgaggaagagtcctgcgagttgtgggaaaaccttcaaagtgaaaaacatttttactgaatgtcagtataccacaatagaaacaaatttctatcttttctataaggttggaaaagctctagtcttattcagacataacctacaggaagagagttgtattattgtaagagatctaatgcagaacttatcagatattgtaaaaatcagtgtgggaggtattcagtcaaaagtcagaaggaaatgtattatcgttataatttcaaaccttaagaaagcctaaattaccaattgcatatcaaatttttttgataatgtaaggaaaacttaaatcccctccatatcctaattggcatttataataatatgacacttaaccctgacagctagagtcttactttatgctaatgctagatatctatttttaaattccacgtgtgtaaacatgctatactcttctgatattaaacttactaagtacataattccagtgcccccttttctcagaatttttttttgtttttaattttggggggtatagttttggttttcctagtgcacattagtttgtgcaagttcttgcaatgttcacagcaaatatagatttattttgctttgaataatgcagcccataaactttattggtttgaaagttcttcactaccatttaatcacagcttctaaacatgtgaaacaggatctttaaaaaaattttccatatgtcaaagtgtagagatgtttctagcagcatttatcttgtcatctatagattgaacaaaaagtggtagctgtgaaattgtgatttataataaatacatatttggtcttcatcccctggtacagagcttctaagacccttgaaatttcctgagtggtaagagtaattaggatgacaagcccctttaaccacacctgagtttatgttaatgggattacttttggaaagacagaaccacaggatgggggctagttgcctcgagaaccaaccatgtgattagagggttggaactttcagatcaaccccaccctaccttgacctctgagaggagagaggctggagactgaattcagtcaccagtggccagtgatttaatcattcatgcctacgtgatgtagccttcataaaaaactgaaggacaggattcagagagcttccaggttgaacttgttgaggtactaggagggtggtgtacctagggagggcatggaagctcagtgttcttcccacacaccttgccttatgcatctctttcatctggctgatccttagttgtgttcttttacaagaatctagtaaataaacttttcctacattctatgagtcattctagctaatgctgaaactcaaagaggggattgtaggaaccttggatttatagccagttggtcagaagcaccagtgaaaacatggacatgagattggtgtccaaaactgacacaattggtgtcagttgtagaactgagcccttaacctgaagcatctatgttgatctgattccaggtagatagcttcaaaatttaattacaggcacttagtgggtgtccacagaaaattggagaattgtttggtttggggaaacctcatacacatctggtgtcagaaatgttgtgagtatagagaagacaataagtttttcctatacagtagctaaagtacctacatcattaatttgtatagtatattctgtgtaaaaataagactttctgatatttttttcaagtggcaacatttatcagacttttttgatttctgacatacatactgaaaacaggcaacatacatgcaaagttttccactgaaaaatagaaatagtttgaaaaaataaaaaattcaaattgtctttctggtattaacaatttgataagttctgctactaaaagtactacaaagttgtttcctttgattatcccctataattgtctaattaatattttaatttagcagacattgttaaattctattccttaggagtgtaatgctaaggcaaggccttttgggaggttttgtagtacattaaaagaatatactatctcttccaatgaagtgtatattgtatagtgatagagactaatatgtacagaaaacacatggctcaatgtaatcataaaggtaggacatgcttgtaagaactcagaggagtcaaggttcaattctgattagaaagaaaagggagagctttgtggaactcctgaagtttgagccttgaaggatgggaatagaggcataaaggcagggagggaataatcaacaaaggcacaaaaggaagtgcaagaaatgtggagcatggtggttatcatttattcaataaatattcagtgtcaggcaaaaaaaaaaaaaaaaaa

SEQ ID NO: 3030 - DNA, 4600 bp, Homo Sapiens
  NM_006630
ggagtcgcgggcacttccgctccagggaagagggggcgattgtcacggcacattccacggtagtttcttccagttccgcgactcgcgggcccctcctaatgtcagggacttaagattggggctcgctgggacctggtggtccggttatgggaaaagaagcctcgtgggagagcagagcctgaaaaaggactgcgcggactgacttcttggctactgaaagcaaagctccactgttccaggcacgattctgccttctctcaaatggcataactcaggactctgcaaattcccagaaacaggaggaaaaatgaccacattcaaggagggactgaccttcaaggatgtggctgtggtcttcactgaggaggagctggggctgctggaccctgtccagaggaatctgtaccaagatgtgatgctggagaacttcaggaacctgctgtcagtggggcatcaccccttcaaacatgatgtattccttttagaaaaggaaaaaaagcttgatataatgaagacagcaactcaaagaaaagggaaatcagcagacaagatccaaagtgaggtggagactgttccagaagcaggacgacatgaagagctttactgggggcaaatctggaaacagattgcaagtgatttaatcaagtatgaagactctatgataagtatttctcggttccccagacaaggtgatttgtcctgccaggttagggcaggactatatacaactcacacaggacagaaattttaccaatgtgatgagtacaaaaaatccttcactgatgtcttcaactttgatcttcatcaacagttacactcaggagagaagtctcatacatgtgatgagtgtggaaaaagcttctgttacatctcagcccttcatattcatcaaagagtccacatgggagagaaatgctataagtgtgacgtgtgtggtaaggaatttagtcagagctcacatcttcaaactcatcagagagtccacactgtagagaaaccattcaaatgtgtggaatgtgggaaaggcttcagtcgtagatcaacacttactgtacattgcaaattacactcaggagagaaaccttacaattgtgaggaatgtggaagggccttcatacatgcttcccatcttcaggaacatcagagaattcatactggggagaaaccattcaaatgtgatacatgtggtaagaacttccgtcgtagatcagcacttaataatcattgcatggtccacacaggagagaaaccatacaaatgtgaggactgtggtaagtgtttcacttgtagctcaaaccttcgtatccatcaaagggtccacacaggagagaaaccttacaagtgtgaagaatgtggtaagtgctttattcagccttcacaatttcaggcccatcggagaatccacactggagagaaaccatacgtatgtaaagtgtgtggtaagggtttcatttacagttcaagttttcaggcccatcagggagtccacactggagagaagccatacaaatgcaatgagtgtgggaagagcttcagaatgaaaattcattatcaagtgcatctggtagtccacacaggggaaaaaccctataaatgtgaagtatgtggtaaagccttccgtcagagttcatatcttaaaatccatctgaaagcacatagtgtacagaaaccttttaagtgtgaagagtgtgggcagggcttcaatcagagctcacgacttcagattcaccagctgatccataccggtgagaaaccatacaaatgtgaagagtgcggaaagggatttagtcgtagagcagatcttaaaattcattgtaggatccacacaggggagaaaccatataattgtgaggagtgtgggaaggtcttcagtcaggcctcgcatcttctaacccatcagagagttcacagtggggaaaaaccatttaaatgtgaagagtgtgggaagagcttcagtcggagtgcacaccttcaagcccatcaaaaagtccacactggagaaaagccatacaaatgtggggagtgtggaaagggcttcaagtggagcttgaaccttgacatgcatcagagggtgcacacaggagaaaaaccctatacatgtggggagtgtgggaagcacttcagtcaggcctcaagtctccaacttcatcagagtgtccacacaggagagaaaccatacaaatgtgatgtatgtggtaaagtcttcagtcggtcttcacaattacagtatcataggcgagttcacactggggaaaaaccttacaaatgtgagatatgtggtaagaggttcagctggcgatcaaatcttgtaagtcatcacaaaattcatgctgctggtacattttatgaaaatgatgagaatagtaagaacatcagagagttgtcagagggaggaagttctacaaggtgattaaaaaaaaaaaaacagaactcatgtacaacctgaatgcttgtaattagatttcataggagggaaaaattttctttatcaacctctttgaatttatttgatttgtaacgctccacatttccacctagacttttttttgttttttattttttgttttgaaacagaatctcgctctgttgcccatgctggatgcagtggtgctatctcagctcactgtaacctccacttcccgggttcaagtgattctcctgcctcagtggattacaggtgcacaccaccacgcctggctaatttttgtatttttagtagagatggagtttcaccatactggccaggctggtctcaaactcctgacctcatgtgatccacccacctcggcctcccaaagtgctgggattacaggcatgagccaccgcccctggcctccatctagactttgaaatgattgccttctaattacagtagcattctcttatttaaaatatttgttttatttaagtcagtgtttaagcaatagctcagcatatcccagtggtccagtgaccacacagctgagaacccttgttaagtggtacagtaaagcattctgtcaaaactttgacatttatgacatgttacctaggaaataggacttagaaaatgagtttgacctgggctttaaaaaagtatactgatgaaggtgccagaattgatgtccattagactgtaagctccatgggggcaggaactttgctaccgaatctatacaaccttaacattgactagtgcttgtaggtgtgctcaatacttgtttgttaactgaatcaaaaggagtaaatgcacaatatttgaacattgtatccaaaggaagaaacctgcgaaataaaattatttgcagaaatgaacatttgttgaaatgcagaaaaccactggatactgcagcctacaatattaatatgatattactcttttacagttgacacctgtcctctctgtagtctcttctctcaaatttggttcttattgagagcctgtctagtttcccaaaggttttataaaacataagttgaagtacctttatttttaattttatttttgagacaggacctcgctctgtcaccgaggctggagtgcagtggcataatcatggctcactgcagcctcgtcctcccaggctccatccatctgcccatctctccctctgagtagctgggaccacgggcacgtgccaccacacccagctaatttttgtatgtttggtagagaaagggtttcaccacattgcccaggctggtcttgaacacctgagctcaagcaatccaacctccttggcctcccagtgttaaattacaggcgtaagccaccacacccggccaagttgaagtatattttgtgatttttctgacagtgcagactgaaaaaaatttaattaacctgacaagagtttactgaatatcacacaattgagtttttaatccattaatgttaaggcaggggtttactctaacacttttaaagtgtcagaagtagttgccaatgccaaatttttatcagcccccttgaatttatttgatttctgactttccacatttccatccagactttgacatgattgccgtctaataactgtagcattctcttattaaaacttctggctgggtgtggtggctcatgcctgtaaccccagcactttaggaggccaaggcaggtgaatcacctgaggtcaggacttagagaccagcctgaccaacatggtgaaaccccatctctactaaatacaaaaattagctgggcatggtggcaggcgcctgtaatcccagctactcaggaggctgaggcaggaggattgcttgaacccgggaggcggaagttgcagtgagccgagactgcgccattgcactccagcttgggtgacagagcaagactccgtctcaaaaaaaaaaaaaaaaacttctgaggtaggggctgtaccatatttttgccccacacccattaagcgaataccaaaaacaacttgtggaaatttgataattttatcaaatttattatttgggcaggattggcatttaccatgcttttccctattgctggcagtaaaacatgggtttaaggaagagtgtttttcagaatttacactgtatatctctgatttggaagttatataattggaatttatgattatgagattaaaataccaaaaagactaagtaa

SEQ ID NO: 3031 - DNA, 3618 bp, Homo Sapiens
  NM_006631
gctttctccgcgccgccaaacccgttttcttcctggtggcgtttgggcttaatacagctttggcgaggtcggatgacgggtgggagccagcggtggaaggggtggcgaaagtaccggtttgccccaggccgccgaggggcctccttagagagaccttgcctgctccgctcgcgtccgccggggccgcgcgggtcctcctggcgccgccaggttcaaaaagccactcgagttgtcactgcgacggccctgggccaggagccgtttcgggatctgtcaaacaacgagttttcgtcgttcgaatcaggttgactggtccttcatccccccaatctcccgtacctggcgagtccagctcgtcgcggcaatgctaagaaaagagtgatatgcaagctgagaccaaaaatatggtatgatttagccatactgaaggggaaggaaataagagctgggcaaagcattctgtgaattggctgactccacttctatggtgagagagaggagtgcatcaaagattactcccagtagagatggtttcagcatgttggccagtctggtctcagactcctgacctcaagtgatccacccacctcggcctcccaaaatgctgggattacaggtataagccactgtgcctggccaaagataccgttaaccctggataaagagaatggaggttacctctgtccgtgtagattcctaagctgtcctggagtgatccttggagtaaaggaaaggtgctttgaagcacattcagccatcagccctgtgggatggcagccactgatttgtcctatggtctttacagggacccagtctgccttcaagaaaagacagaagtagaaagggtggtggctgactgtctgacaaattgttatcaggtatgcaggaagtatatccttctccaaaatatcatacttgcatcaccaggtagacacatttccttctacacagaattatcttcagagcttcttaaagcaaataaagcctgcttcaaggactgagtccctagtcgaattcccggaaggagtggagcctgtcatattgtgtttatctagcatctgctcaagagtgtgctgcagtggagggaaatcagatgacctcccagtctggttgtgttacatacaatcatgtgtaagaagtgccattcaagccgtgtcactggaggggactgacagtgagattcagtgacttttgatgatctggctgtggacttcaccccagaagaatggactttactggacccaactcagagaaacctctacagagatgtgatgctggagaactacaagaatttggccacagtaggatatcagctcttcaaacccagtctgatctcttggctggaacaagaagagtctaggacagtgcagagaggtgatttccaagcttcagaatggaaagtgcaacttaaaaccaaagagttagcccttcagcaggatgttttgggggagccaacctccagtgggattcaaatgataggaagccacaacggaggggaggtcagtgatgttaagcaatgtggagatgtctccagtgaacactcatgccttaagacacatgtgagaactcaaaatagtgagaacacatttgagtgttatctgtatggagtagacttccttactctgcacaagaaaacctctactggagagcaacgttctgtatttagtcagtgtggaaaagccttcagcctgaacccagatgttgtttgccagagaacgtgcacaggagagaaagcttttgattgcagtgactctgggaaatccttcattaatcattcacaccttcagggacatttaagaactcacaatggagaaagtctccatgaatggaaggaatgtgggagaggctttattcactccacagaccttgctgtgcgtatacaaactcacaggtcagaaaaaccctacaaatgtaaggaatgtggaaaaggatttagatattctgcataccttaatattcacatgggaacccacactggagacaatccctatgagtgtaaggagtgtgggaaagccttcaccaggtcttgtcaacttactcagcacagaaaaactcacactggagagaaaccttataaatgtaaggattgtgggagagccttcactgtttcctcttgcttaagtcaacatatgaaaatccatgtgggtgagaagccttatgaatgcaaggaatgtgggatagccttcactagatcttctcaacttactgaacatttaaaaactcacactgcaaaggatccctttgaatgtaagatatgtggaaaatcctttagaaattcctcatgcctcagtgatcactttcgaattcacactggaataaaaccctataaatgtaaggattgtgggaaagccttcactcagaactcagaccttactaagcatgcacgaactcacagtggagagaggccctatgaatgtaaggaatgtggaaaggcctttgccagatcctctcgccttagtgaacatacaagaactcacactggagagaagccttttgaatgtgtcaaatgtgggaaagcctttgctatttcttcaaatcttagtggacatttgagaattcacactggagagaagccctttgagtgcctggaatgtggtaaagcatttacgcattcctccagtcttaataatcacatgcggacccacagcgccaaaaaaccattcacgtgtatggaatgtggcaaagcttttaagtttcccacgtgtgttaaccttcacatgcggatccacactggagaaaaaccctacaaatgtaaacagtgtgggaaatccttcagttactccaattcgtttcagttacatgaacgaactcacactggagagaaaccctatgaatgtaaggagtgcgggaaagccttcagttcttccagttcctttcgaaatcatgaaagaaggcatgcggatgagagactgtcagcataaggaatgtgggaaaacctaaaggtgtccctgttctctctgaagacatgaaaactcactggggagaaaccctatgaatgtaaaaatgtggaagcaactttgtatctcaggtcttaatgaacacatatgaattcacagtggagaagaccctgcatcagggaatgtggaaatgactttgctgaattctcaagccttaccaaacacatcagaaatctcactggagagaaactgtatgaatgtagagaatctgggaatacctttctgaatcccacaaaccttaatgtgtgtatgtgaactcacattggagagaaaccctgcaatttaaatggtatggtctggatgatgccccactccatatttgtaagccctaagtcctagttccttacactataactgtatttggacatagggttttcaaacaggtgagtaacttcaaatgaggttgttgggttcgatccctaatctgacatcactggtgtccctataagggaaactgaaggaaggatacacatggagaagactgtgtggatccaccagaagatggccatctacaagccaaggacagagacctggaacagatgctttcattatggcctccagaggaaaccaaccctgtctccaccttgatattgcacttccaggctccagaactgtgaggcaataaatttctcttggttaaatcaaaaaaaaaaaaaaaaaa

SEQ ID NO: 3032 - DNA, 2208 bp, Homo Sapiens
  NM_006636
ggggcctgccacgaggccgcagtataaccgcgtggcccgcgcgcgcgcttccctcccggcgcagtcaccggcgcggtctatggctgcgacttctctaatgtctgctttggctgcccggctgctgcagcccgcgcacagctgctcccttcgccttcgccctttccacctcgcggcagttcgaaatgaagctgttgtcatttctggaaggaaactggcccagcagatcaagcaggaagtgcggcaggaggtagaagagtgggtggcctcaggcaacaaacggccacacctgagtgtgatcctggttggcgagaatcctgcaagtcactcctatgtcctcaacaaaaccagggcagctgcagttgtgggaatcaacagtgagacaattatgaaaccagcttcaatttcagaggaagaattgttgaatttaatcaataaactgaataatgatgataatgtagatggcctccttgttcagttgcctcttccagagcatattgatgagagaaggatctgcaatgctgtttctccagacaaggatgttgatggctttcatgtaattaatgtaggacgaatgtgtttggatcagtattccatgttaccggctactccatggggtgtgtgggaaataatcaagcgaactggcattccaaccctagggaagaatgtggttgtggctggaaggtcaaaaaacgttggaatgcccattgcaatgttactgcacacagatggggcgcatgaacgtcccggaggtgatgccactgttacaatatctcatcgatatactcccaaagagcagttgaagaaacatacaattcttgcagatattgtaatatctgctgcaggtattccaaatctgatcacagcagatatgatcaaggaaggagcagcagtcattgatgtgggaataaatagagttcacgatcctgtaactgccaaacccaagttggttggagatgtggattttgaaggagtcagacaaaaagctgggtatatcactccagttcctggaggtgttggccccatgacagtggcaatgctaatgaagaataccattattgctgcaaaaaaggtgctgaggcttgaagagcgagaagtgctgaagtctaaagagcttggggtagccactaattaactactgtgtcttctgtgtcacaaacagcactccaggccagctcaagaagcaaagcaggccaatagaaatgcaatatttttaatttattctactgaaatggtttaaaatgatgccttgtatttattgaaagcttaaatgggtgggtgtttctgcacatacctctgcagtacctcaccagggagcattccagtatcatgcagggtcctgtgatctagccaggagcagccattaacctagtgattaatatgggagacattaccatatggaggatggatgcttcactttgtcaagcacctcagttacacattcgccttttctaggattgcatttcccaagtgctattgcaataacagttgatactcattttaggtaccaaaccttttgagttcaactgatcaaaccaaaggaaaagtgttgctagagaaaattagggaaaaggtgaaaaagaaaaaatggtagtaattgagcagaaaaaaattaatttatatatgtattgattggcaaccagatttatctaagtagaactgaattggctaggaaaaaagaaaaactgcatgttaatcattttcctaagctgtccttttgaggcttagtcagtttattgggaaaatgtttaggattattccttgctattagtactcattttatgtatgttacccttcagtaagttctccccattttagttttctaggactgaaaggattcttttctacattatacatgtgtgttgtcatatttggcttttgctatatactttaacttcattgttaaatttttgtattgtatagtttctttggtgtatcttaaaacctatttttgaaaaacaaacttggcttgataatcatttgggcagcttgggtaagtacgcaacttacttttccaccaaagaactgtcagcagctgcctgcttttctgtgatgtatgtatcctgttgacttttccagaaattttttaagagtttgagttactattgaatttaatcagactttctgattaaagggttttctttcttttttaataaaacacatctgtctggtatggtatgaatttctgaaaaaaaaaaaaaaaaaaaaaaa

SEQ ID NO: 3033 - DNA, 1174 bp, Homo Sapiens
  NM_006638
agcggaggccgggaggaccaggaacccaggagagcatggccacgctgcgccggcttcgggaggcgccgcggcacttactggtttgcgagaaatccaacttcggcaaccacaagtcgcgccaccggcatcttgtgcagacgcactactataactacagggtttcatttctcattcctgaatgtgggatactatcggaagaactgaaaaacctggtcatgaacactggaccctattactttgtgaagaatttacctcttcatgaattaattacacctgaattcatcagtacctttataaagaaaggttcttgctatgcactaacatacaatacacatattgatgaagataatactgttgccctgctaccaaatgggaaattaattttgtcactggataaagacacttatgaagaaactggacttcagggtcatccatctcagttttctggcagaaaaattatgaaatttattgtttccattgatttgatggaattatccttaaacttggattctaagaagtatgaaagaatatcttggtctttcaaagaaaagaagccattgaaatttgattttcttttggcttggcataaaacaggttcagaagaatcgacaatgatgtcatatttttccaagtaccaaattcaggagcatcagccaaaagtagcactgagcacgttgagagatctccagtgcccagtgctgcagagcagcgagctggagggaacgccagaggtgtcctgccgggctctggagctcttcgactggctcggcgccgtcttcagtaatgtcgacctaaataatgagcctaataatttcatatcaacctattgctgtcctgagccaagcacagtggtggcaaaagcttatttgtgtacaatcactggcttcatacttccagagaagatctgtctcctattggaacatctctgtcactactttgatgaaccgaagttagctccatgggttacactgtccgttcaaggctttgcagacagccctgtttcttgggaaaaaaatgaacatggttttcgaaaaggaggagaacatttatataactttgtgatttttaataatcaggactattggcttcagatggctgttggggcaaatgatcactgtccaccataaaaaataaaaattaaaaatcgtgtttacttacaaaaaaaaaaaaaaaa

SEQ ID NO: 3034 - DNA, 1537 bp, Homo Sapiens
  NM_006639
gaggaagaagaatctgtatatctgtatatattggctagcaaatgtgccctgctctctcccctcttaaaaatagcagcaacccatctttgcaaagaagcttgcctatagagcaggcactctgtgaatggactgtgcttttacgaccctacagggtatcaagatactgtgcagctcgccaacaaggattaattgcaaggactggtagatcgaatttactgaagacttggagcttgcttctgagaacaaacgcaaaaggacagtaaactgtggaccttgaagttagcagcgtgggcttcctctaatattacaccgtaaaaggcattgatcaccataagaaggaacatttgtgaaggtactccagtgccagaaagaggcacaaagcagacattcgtagagaaacatggatgaaacaggaaatctgacagtatcttctgccacatgccatgacactattgatgacttccgcaatcaagtgtattccaccttgtactctatgatctctgttgtaggcttctttggcaatggctttgtgctctatgtcctcataaaaacctatcacaagaagtcagccttccaagtatacatgattaatttagcagtagcagatctactttgtgtgtgcacactgcctctccgtgtggtctattatgttcacaaaggcatttggctctttggtgacttcttgtgccgcctcagcacctatgctttgtatgtcaacctctattgtagcatcttctttatgacagccatgagctttttccggtgcattgcaattgtttttccagtccagaacattaatttggttacacagaaaaaagccaggtttgtgtgtgtaggtatttggatttttgtgattttgaccagttctccatttctaatggccaaaccacaaaaagatgagaaaaataataccaagtgctttgagcccccacaagacaatcaaactaaaaatcatgttttggtcttgcattatgtgtcattgtttgttggctttatcatcccttttgttattataattgtctgttacacaatgatcattttgaccttactaaaaaaatcaatgaaaaaaaatctgtcaagtcataaaaaggctataggaatgatcatggtcgtgaccgctgcctttttagtcagtttcatgccatatcatattcaacgtaccattcaccttcattttttacacaatgaaactaaaccctgtgattctgtccttagaatgcagaagtccgtggtcataaccttgtctctggctgcatccaattgttgctttgaccctctcctatatttcttttctgggggtaactttaggaaaaggctgtctacattcagaaagcattctttgtccagcgtgacttatgtacccagaaagaaggcctctttgccagaaaaaggagaagaaatatgtaaagtatagtttaaacccatttccagtccaaaccaatgaaaatagtttcccaaataagtattttgtcaaatcatttacaaaaaaaataaaaattttacttaatattttaaaaaaaaaaaaaaaaaaaaaaaa

SEQ ID NO: 3035 - DNA, 4469 bp, Homo Sapiens
  NM_006640
tgcctctgtcactgcagactaatgggacggaggggggtgacttctcagggttcctcctgggcaggtgctccggaaccttttctcagcacgctggcctggggcacggccgttcctcctgcccagccacgttggggtacagggtgaagaagggctggggccagcccaggacagaggaaggcgaggcaggcacgcaggaactgggctttttaaacccttaagcccaaggaaatcgtagcatcgcgggacagggaaaatgaaagactttggaagtcgtcaggaatttgactctgtgagttggtttccaagagtctaagttaagcatctccaagtggatattaaaaaggagcagcaagcctcggggcggcgggggctggaggaggtggagagaggaggctgccggaagccgcactcgggacctctgcagccaccgaccagaccgggcggccgggactctgggactctcgcaggcagacccggtggtctgccggactcctcggggcccacttcgggccctctctcctgcctcctatttttggatttctctcctttgctccctttttcctcccgttttgaagagacaatgctacttcagtttggagcacaaacatatgatcagcacatggaaatgtggtaattcggatgcattcgtgattgcaacagattgaagaaattagaccagacaaagagtgtttttagaggaggaggaggaggaggaggaggctgagagagggagggcgacgggggtgagaaaggggaggccgcctctgagcgggacgccgggactcccgccgctgctaaatatatccgtaggaatggagagggaccggatctcagccttgaaaagatcttttgaggtcgaggaggtcgagacacccaactccaccccaccccggagggtccagactcccctactccgagccactgtggccagctccacccagaaattccaggacctgggcgtgaagaactcagaaccctcggcccgccatgtggactccctaagccaacgctcccccaaggcgtccctgcggagggtggagctctcgggccccaaggcggccgagccggtgtcccggcgcactgagctgtccattgacatctcgtccaagcaggtggagaacgccggggccatcggcccgtcccggttcgggctcaagagggccgaggtgttgggccacaagacgccagaaccggcccctcggaggacggagatcaccatcgtcaaaccccaggagtcagcccaccggaggatggagccccctgcctccaaggtccccgaggtgcccactgcccctgccaccgacgcagcccccaagagggtggagatccagatgcccaagcctgctgaggcgcccaccgcccccagcccagcccagaccttggagaattcagagcctgcccctgtgtctcagctgcagagcaggctggagcccaagccccagccccctgtggctgaggctacaccccggagccaggaggccactgaggcggctcccagctgcgttggcgacatggccgacacccccagagatgccgggctcaagcaggcgcctgcatcacggaacgagaaggccccggtggacttcggctacgtggggattgactccatcctggagcagatgcgccggaaggccatgaagcagggcttcgagttcaacatcatggtggtcgggcagagcggcttgggtaaatccaccttaatcaacaccctcttcaaatccaaaatcagccggaagtcggtgcagcccacctcagaggagcgcatccccaagaccatcgagatcaagtccatcacgcacgatattgaggagaaaggcgtccggatgaagctgacagtgattgacacaccagggttcggggaccacatcaacaacgagaactgctggcagcccatcatgaagttcatcaatgaccagtacgagaaatacctgcaggaggaggtcaacatcaaccgcaagaagcgcatcccggacacccgcgtccactgctgcctctacttcatccccgccaccggccactccctcaggcccctggacatcgagtttatgaaacgcctgagcaaggtggtcaacatcgtccctgtcatcgccaaggcggacacactcaccctggaggagagggtccacttcaaacagcggatcaccgcagacctgctgtccaacggcatcgacgtgtacccccagaaggaatttgatgaggactcggaggaccggctggtgaacgagaagttccgggagatgatcccatttgctgtggtgggcagtgaccacgagtaccaggtcaacggcaagaggatccttgggaggaagaccaagtggggtaccatcgaagttgaaaacaccacacactgtgagtttgcctacctgcgggaccttctcatcaggacgcacatgcagaacatcaaggacatcaccagcagcatccacttcgaggcgtaccgtgtgaagcgcctcaacgagggcagcagcgccatggccaacggcatggaggagaaggagccagaagccccggagatgtagacgccaccctgcccacccccgggatcctgcccccaagtcatttccgtccccccccaggccctcccaccaccccattttattttatatgattttctccatttgtcatcgttccccaccccttcgacatgctgccaggaaacaagggaaggggcctccctccgagtgagtcagtgatgaggccgcggcctccccgaggttgtggggaggctgcactggagccacaggcaggggtgagagcacccactgaattgacatgaccctctgtccccaggcctggctccccgagggctcagaagagcagcttcggtgtgcagatcatccgtctgtgtggggttctcagtgccggaggccttggggtgggggccaggcctcgcacttgcagaggagcccagtgggctgcacgctcccctccatccccatcggccctgtcccctggagtgtgtcagagcccaggggagaatgcagcccaccaggagcacctggaccccctgcccgccacatggtgtggccatcactcagcccctacccctgccctgctcctaagggtagaaaactccagggtcccctgccaccgactgcccagccactccaagccccctggcagctgcccctcctggagcagaaagtgcctttatctcagccatccgcagactgcttggccagatgcggggacaggctggaatgagggaggcgtcttcatctccctgccatccccctctcacgccacccccgcccccaccgggctgcaggtgctgctgatgcgctgggatctgattgaggataaaaaggaaggagagatgacccctaccccctcatcccccagttttgaaaaggtctaagcaagtgagtctggtggaggagctgagggagggagccatggaaggtgccagaaggaaggttggcgggggcacgtgtgggccgtggcttgggctggtcagagtggcgtgagctgcccggcgcctgccctgcccaagtgaccagggaagtgtgtgtgtgtccatgtgtatgcgtgtccgtctgtctgtctagtgtctgggtttggcccaagactgggctgtagttacattaatgcccagccagccacccctgccactcacccctcctggcccaggccttgctgactctctgagctggggaggtgggaggccaggcgagcctgactctgttgatctacccgtgcctgggcccctcccctcagagcccatggtaacgaacccctagaaaggagagaacgggcgtcaggggtgcacagtccacagctgaagagcaaggtttcgtggcagcacggcccggcccctcaccctctgtccccacgaggggacccatgggggctgtctttgcagggcacagatgaccaaagtcccttcctgcttcctgttacctgtcttgctcctggggagaaagaggggcctgatgagactccactcaggtgcacacatcaccaggtgcatctgcaggcaccgggctggctgcttgcagccaggagaaggtcagcgagaaggagtgtatgagtgtgagtgtgtgtgcatggaagttggggcactgggcgtctgactccctccccacccaagagaggaaggacccctcaccacccccactggcgagacagtttactttgccgacttgccatgtttttgccaaaaccaagattttgaaggaaatgagtggccagcgccagggcccaggccatgtggcctgcccagcctcaatgtcacttggtggcggggtggggtgggggtgggcagcagcatcccagccttgagatgcttcactttccttctctgtaaccagactttgaaaaattgttcgtttcatcaggctctgttcctcaatggccttttgctacgtgcctcccgagaaatttgtctttttgtataaatgacaaagtgttgaaaatgtatttcctgaaataaatgtttcaaatgcagaaacccagaaaaaaaaaaaaaa

SEQ ID NO: 3036 - DNA, 3680 bp, Homo Sapiens
  NM_006644
tgagtaaatgccgcagattctggaaagttctgatcagtgcgatacataaggctgaggaagtgggacctccccttttgggtcggtagttcagcgccggcgccggtgtgcgagccgcggcagagtgaggcaggcaacccgaggtgcggagcgacctgcggaggctgagccccgctttctcccagggtttcttatcagccagccgccgctgtccccgggggagtaggaggctcctgacaggccgcggctgtctgtgtgtccttctgagtgtcagaggaacggccagaccccgcgggccggagcagaacgcggccagggcagaaagcggcggcaggagaagcaggcagggggccggaggacgcagaccgagacccgaggcggaggcggaccgcgagccggccatgtcggtggtggggttggacgtgggctcgcagagctgctacatcgcggtagcccgggccgggggcatcgagaccatcgccaatgagttcagcgaccggtgcaccccgtcagtcatatcatttggatcaaaaaatagaacaatcggagttgcagccaaaaatcagcaaatcactcatgcaaacaatacggtgtctaacttcaaaagatttcatggccgagcattcaatgaccccttcattcaaaaggagaaggaaaacttgagttacgatttggttccattgaaaaatggtggagttggaataaaggtaatgtacatgggtgaagaacatctatttagtgtggagcagataacagccatgttgttgactaagctgaaggaaactgctgaaaacagcctcaagaaaccagtaacagattgtgttatttcagtcccctccttctttacagatgctgagaggcgatctgtgttagatgctgcacagattgttggcctaaactgtttaagacttatgaatgacatgacagctgttgctttgaattacggaatttataagcaggatctcccaagcctggatgagaaacctcggatagtggtttttgttgatatgggacattcagcttttcaagtgtctgcttgtgcttttaacaagggaaaattgaaggtactgggaacagcttttgatcctttcttaggaggaaaaaacttcgatgaaaagttagtggaacatttttgtgcagaatttaaaactaagtacaagttggatgcaaaatccaaaatacgagcactcctacgtctgtatcaggaatgtgaaaaactgaaaaagctaatgagctctaacagcacagaccttccactgaatatcgaatgctttatgaatgataaagatgtttccggaaagatgaacaggtcacaatttgaagaactctgtgctgaacttctgcaaaagatagaagtacccctttattcactgttggaacaaactcatctcaaagtagaagatgtgagtgcagttgagattgttggaggcgctacacgaattccagctgtgaaggaaagaattgccaaattctttggaaaagatattagcacaacactcaatgcagatgaagcagtagccagaggatgtgcattacagtgtgcaatactttccccggcatttaaagttagagaattttccgtcacagatgcagttccttttccaatatctctgatctggaaccatgattcagaagatactgaaggtgttcatgaagtctttagtcgaaaccatgctgctcctttctccaaagttctcacctttctgagaagggggccttttgagctagaagctttctattctgatccccaaggagttccatatccagaagcaaaaataggccgctttgtagttcagaatgtttctgcacagaaagatggagaaaaatctagagtaaaagtcaaagtgcgagtcaacacccatggcattttcaccatctctacggcatctatggtggagaaagtcccaactgaggagaatgaaatgtcttctgaagctgacatggagtgtctgaatcagagaccaccagaaaacccagacactgataaaaatgtccagcaagacaacagtgaagctggaacacagccccaggtacaaactgatgctcaacaaacctcacagtctcccccttcacctgaacttacctcagaagaaaacaaaatcccagatgctgacaaagcaaatgaaaaaaaagttgaccagcctccagaagctaaaaagcccaaaataaaggtggtgaatgttgagctgcctattgaagccaacttggtctggcagttagggaaagaccttcttaacatgtatattgagacagagggtaagatgataatgcaagataaattggaaaaagaaaggaatgatgctaaaaatgcagttgaggaatatgtgtatgagttcagagacaagctgtgtggaccatatgaaaaatttatatgtgagcaggatcatcaaaattttttgagactcctcacagaaactgaagactggctgtatgaagaaggagaggaccaagctaaacaagcatatgttgacaagttggaagaattaatgaaaattggcactccagttaaagttcggtttcaggaagctgaagaacggccaaaaatgtttgaagaactaggacagaggctgcagcattatgccaagatagcagctgacttcagaaataaggatgagaaatacaaccatattgatgagtctgaaatgaaaaaagtggagaagtctgttaatgaagtgatggaatggatgaataatgtcatgaatgctcaggctaaaaagagtcttgatcaggatccagttgtacgtgctcaggaaattaaaacaaaaatcaaggaattgaacaacacatgtgaacccgttgtaacacaaccgaaaccaaaaattgaatcacccaaactggaaagaactccaaatggcccaaatattgataaaaaggaagaagatttagaagacaaaaacaattttggtgctgaacctccacatcagaatggtgaatgttaccctaatgagaaaaattctgttaatatggacttggactagataaccttaaattggcctattccttcaattaataaaatatttttgccatagtatgtgactctacataacatactgaaactatttatattttcttttttaaggatatttagaaattttgtgtattatatggaaaaagaaaaaaagcttaagtctgtagtctttatgatcctaaaagggaaaattgccttggtaactttcagattcctgtggaattgtgaattcatactaagctttctgtgcagtctcaccatttgcatcactgaggatgaaactgacttttgtcttttggagaaaaaaaactgtactgcttgttcaagagggctgtgattaaaatctttaagcatttgttcctgccaaggtagttttcttgcattttgctctccattcagcatgtgtgtgggtgtggatgtttataaacaagactaagtctgacttcataagggctttctaaaaccatttctgtccaagagaaaatgactttttgctttgatattaaaaattcaatgagtaaaacaaaagctagtcaaatgtgttagcagcatgcagaacaaaaactttaaactttctctctcactatacagtatattgtcatgtgaaagtgtggaatggaagaaatgtcgatcctgttgtaactgattgtgaacacttttatgagctttaaaataaagttcatcttatggtgtcatttctaaaaaaaaaaaaaaa

SEQ ID NO: 3037 - DNA, 1650 bp, Homo Sapiens
  NM_006647
cggggttgcacctggcgcttggcgcccgcacctctgcccgcctcggagaccccgcagccccgcgccgccgcctggccccggccccggcccctccgcgggatcctggcccctcctcgagcgccgccaccggccgccatggcctctctgggggacctggtgcgcgcctggcacctgggcgcgcaggctgtggatcgtggggactgggcccgcgccttgcacctcttctcgggcgtcccggcgccgcccgccaggctgtgcttcaacgcgggctgcgtgcacctgctggccggggaccccgaggccgcgctgcgggcatttgaccaagccgtgaccaaggacacctgcatggcggttggcttcttccagcgaggagtggccaacttccagctggcaaggttccaggaggctctgtctgacttctggctggccctggagcagctgaggggccacgctgccatcgactacacgcagctgggcctgcggttcaagctgcaagcctgggaggtgctacacaatgtggcgtcggcacagtgccagctggggctctggacagaggcggccagcagcctaagggaggccatgtccaagtggccggaggggtccctgaatggcctggactcagccctggaccaagtgcagagacggggctcactgccgccacggcaggtccccaggggcgaggtcttccggccccaccggtggcacctgaagcacttggagcccgtggatttcctgggcaaggccaaggtggtggcctctgccatccccgacgaccagggctggggcgtccgccctcagcagccacagggaccaggagcgaaccatgatgccaggtccctaatcatggactccccaagagctggcacccaccagggccccctcgatgcagagacagaggtcggtgctgaccgctgcacgtcgactgcctaccaggagcagaggccccaggtggagcaagttggcaaacaggctcctctctccccagggctgccggcaatgggggggcctggccccggcccctgtgaggaccccgcgggtgctgggggagcaggtgcagggggctccgagcccctggtgactgtcaccgtgcagtgcgccttcacagtggccctgagggcacgaagaggagccgacctgtccagcctgcgggcactgctgggccaagccctccctcaccaggcccagcttgggcaactcagttacctagccccaggtgaggacgggcactgggtccccatccccgaggaggagtcgctgcagagggcctggcaggacgcagctgcctgccccagggggctgcagctgcagtgcaggggagccgggggtcggccggtcctctaccaggtggtggcccagcacagctactccgcccaggggccagaggacctgggcttccgacagggggacacggtggacgtcctgtgtgaagagcccgatgtcccccttgcagtggaccaggcatggctggagggccactgtgacggccgcatcggcatcttccccaagtgcttcgtggtccccgccggccctcggatgtcaggagcccccggccgcctgccccgatcccagcagggagatcagccctaatgatgctgtgtccatgatgcttttaataaaaacaacccccactgcaaaaaaaaaaaaaaaaaa

SEQ ID NO: 3038 - DNA, 2577 bp, Homo Sapiens
  NM_006649
acggaaacagaaattgctttgcggcccgcacggaaattgctttccttcggcttccgttcttggtccatgtgagagaagctggctgctgaaatgactgcgaaccggcttgcagagagccttctggctttgagccaacaggaagaactagcggatttgccaaaagactacctcttgagtgagagtgaagatgagggggacaatgatggagagagaaagcatcaaaagcttctggaagcaatcagttcccttgatggaaagaataggcggaaattggctgagaggtctgaggctagtctgaaggtgtcagagttcaatgtcagttctgaaggatcaggagaaaagctggtccttgcagatctgcttgagcctgttaaaacttcatcttctttggccactgtgaaaaagcaactgagtagagtcaaatcaaagaagacagtggagttacctctgaacaaagaagagattgaacggatccacagagaagtagcattcaataaaaccgcacaagtcctctccaaatgggaccctgtcgtcctgaagaaccggcaggcagagcagctggtttttcccctggagaaagaggagccagccattgctcccattgaacatgtgctcagtggctggaaggcaagaactcccctggagcaggaaattttcaacctcctccataagaacaagcagccagtgacagaccctttactgacccctgtggaaaaggcctctctccgagccatgagcctagaagaggcaaagatgcgacgagcagagcttcagagggctcgggctctgcagtcctactatgaggccaaggctcgaagagagaagaaaatcaaaagtaaaaagtatcacaaagtcgtgaagaaaggaaaggccaagaaagccctaaaagagtttgagcagctgcggaaggttaatccagctgcagcactagaagaactggaaaaaattgaaaaggccagaatgatggaaagaatgagccttaagcaccaaaacagtgggaaatgggccaagtcaaaggcaattatggccaaatatgacctggaggctcgccaagctatgcaggaacagttgtctaagaacaaagaactgacacagaaactccaggtagcctctgagagtgaggaagaggagggaggcacagaagatgtggaagaactccttgtccctgatgtagtgaatgaagtgcagatgaatgcagatgggccgaatccctggatgctcaggagctgcaccagtgacaccaaagaggctgcaacccaggaggaccctgagcaactgccagagcttgaggcccatggagtttctgaaagtgagggagaagaaagaccagtggcagaagaagaaattttgttgagagaatttgaggaaaggcgatcccttagaaaaagatctgagctcagccaagatgctgagccagcaggcagtcaagaaacaaaagattctggcagccaggaggtgctgtctgaattgagagtactatctcagaaattgaaggaaaaccatcagtccaggaagcaaaaagcaagttcagaggggactattccccaggtccagagagaggaacctgccccagaagaagaggagcccctgttgctacagagaccagagagagtacagacgctggaagagctagaagagctgggaaaagaagaatgttttcaaaataaggagcttcccagacctgtgttagaagggcagcagtcagagaggaccccaaataatcgccctgatgcccctaaggagaagaaaaagaaggagcaaatgatcgacctacagaacctcctaaccacacaatctccctccgtgaagtctttggcagttcccacaatagaggagctggaagatgaagaggagagaaaccataggcagatgataaaggaagcttttgctggggatgatgtcatcagagatttcttgaaagagaagagggaagctgtggaggcgagtaagccaaaggacgtggacctgacactacctggctggggcgagtggggtggtgtgggcctaaagcccagtgccaagaaaagacgccggtttctcattaaagcccctgagggtcctccaagaaaagataagaatttgccaaatgtgattatcaatgagaagcgcaacatccacgcagctgctcatcaggtacgagtgcttccatatccatttacccaccattggcaatttgaaaggaccatccagacccccataggatccacatggaacacccagagggctttccaaaagctgactactcccaaggtcgtcaccaagccaggccatatcattaaccccataaaagcagaagacgtgggctaccggtcttcctcaaggtcggacctgtctgtcatacagaggaatccaaaacgaatcaccacacgtcacaaaaaacagctgaagaaatgctctgtagattgagttgctggaggagtgacagccaggagccctgacttcacttcctttggtccagttttactctgatacagggtggattccaaaactggctcagtacattgcatgtagttaagccacattttaaaaataaaggcattttttaatctatttacctggaaaaaaaaaaaaaaaaaa

SEQ ID NO: 3039 - DNA, 4668 bp, Homo Sapiens
  NM_006665
ccagcgctgctccccgggcgctcctccccgggcgctcctccccaggcctcccgggcgcttggatcccggccatctccgcacccttcaagtgggtgtgggtgatttcctggcggggggagcagccaggtgagcccaagatgctgctgcgctcgaagcctgcgctgccgccgccgctgatgctgctgctcctggggccgctgggtcccctctcccctggcgccctgccccgacctgcgcaagcacaggacgtcgtggacctggacttcttcacccaggagccgctgcacctggtgagcccctcgttcctgtccgtcaccattgacgccaacctggccacggacccgcggttcctcatcctcctgggttctccaaagcttcgtaccttggccagaggcttgtctcctgcgtacctgaggtttggtggcaccaagacagacttcctaattttcgatcccaagaaggaatcaacctttgaagagagaagttactggcaatctcaagtcaaccaggatatttgcaaatatggatccatccctcctgatgtggaggagaagttacggttggaatggccctaccaggagcaattgctactccgagaacactaccagaaaaagttcaagaacagcacctactcaagaagctctgtagatgtgctatacacttttgcaaactgctcaggactggacttgatctttggcctaaatgcgttattaagaacagcagatttgcagtggaacagttctaatgctcagttgctcctggactactgctcttccaaggggtataacatttcttgggaactaggcaatgaacctaacagtttccttaagaaggctgatattttcatcaatgggtcgcagttaggagaagattttattcaattgcataaacttctaagaaagtccaccttcaaaaatgcaaaactctatggtcctgatgttggtcagcctcgaagaaagacggctaagatgctgaagagcttcctgaaggctggtggagaagtgattgattcagttacatggcatcactactatttgaatggacggactgctaccaaggaagattttctaaaccctgatgtattggacatttttatttcatctgtgcaaaaagttttccaggtggttgagagcaccaggcctggcaagaaggtctggttaggagaaacaagctctgcatatggaggcggagcgcccttgctatccgacacctttgcagctggctttatgtggctggataaattgggcctgtcagcccgaatgggaatagaagtggtgatgaggcaagtattctttggagcaggaaactaccatttagtggatgaaaacttcgatcctttacctgattattggctatctcttctgttcaagaaattggtgggcaccaaggtgttaatggcaagcgtgcaaggttcaaagagaaggaagcttcgagtataccttcattgcacaaacactgacaatccaaggtataaagaaggagatttaactctgtatgccataaacctccataatgtcaccaagtacttgcggttaccctatcctttttctaacaagcaagtggataaataccttctaagacctttgggacctcatggattactttccaaatctgtccaactcaatggtctaactctaaagatggtggatgatcaaaccttgccacctttaatggaaaaacctctccggccaggaagttcactgggcttgccagctttctcatatagtttttttgtgataagaaatgccaaagttgctgcttgcatctgaaaataaaatatactagtcctgacactgaatttttcaagtatactaagagtaaagcaactcaagttataggaaaggaagcagataccttgcaaagcaactagtgggtgcttgagagacactgggacactgtcagtgctagatttagcacagtattttgatctcgctaggtagaacactgctaataataatagctaataataccttgttccaaatactgcttagcattttgcatgttttacttttatctaaagttttgttttgttttattatttatttatttatttattttgagacagaatctctctctgtcacccaggctggagtgccatggtgcgatcttggctcactgcaactttaagcaattctcctgcctcagcttcctgagtagctgggattataggcgtgtgccaccacgcccagctactttctatattttttgtagagatggagtttcgccatattggccaagctggtctcgaactcctgtcctcgaactcctgtcctcaagtgatccacccgcctcagcctctcaaagtgctgggattacaggtgtgagccaccacacccagcagtgttttatttttgagacagggtatcattctgttgcccaggcttgagtgcagtggtgcaatcatagatcactgcagccttttaactcctgggctcaagtcatcctcctgcttagcctcccaagtagctaggaccacagacacatgccatcacacttggctatttttaaaaaattttttgtagagatggggtctcgctatgttacccaaactggtcctgaactcctggactcaattgatcctcccaccttggccttccaggtgctgggatttctttgggagtacagcatggtacagcaggagatcatttgatgttacctctgtgcagtgttgctagtcagcgaaagactataatacctgtggggacagcgattagccaccacaaccagtctttatttaaagttattaaaaatggctgggcgcagtggctcacacctgtaatcctagcactttgggaggccgaggcagatggatcacctgacgtgaggaatttgataccagcctggccaacatggtgaaaccccatctctactaaaaaatacaaaaattagctgggtgtggtcctgtagtcccagctacttgggaggctggggcaggagaattacttgaacccaggaggcagaggttgcagtgagccgagattgtgccactgcactccagcctgggtgacagagagagattccatctcaaaaaaacaagttattaaaaatgtatatgaatgctcctaatatggtcaggaagcaaggaagcgaaggatatattatgagttttaagaaggtgcttagctgtatatttatctttcaaaatgtattagaagattttagaattctttccttcatgtgccatctctacaggcacccatcagaaaaagcatactgccgttaccgtgaaactggttgtaaaagagaaactatctatttgcaccttaaaagacagctagattttgctgattttcttctttcggttttctttgtcagcaataatatgtgagaggacagattgttagatatgatagtataaaaaatggttaatgacaattcagaggcgaggagattctgtaaacttaaaattactataaatgaaattgatttgtcaagaggataaattttagaaaacacccaataccttataactgtctgttaatgcttgctttttctctacctttcttccttgtttcagttgggaagcttttggctgcaagtaacagaaactcctaattcaaatggcttaagcaataaggaaatgtatattcccacataactagacgttcaaacaggccaggctccagcacttcagtacgtcaccagggatctgggttcttcccagctctctgctctgccatctttagcgctggcttcattctcagactctggtagcatgatggctgtagctgtttcatgggccccttcaaacctcatagcaaccagaggaagaaaatgagccattttttgagtctccttcatagacttgaataactctttttcagagcttctcacagcaaacctctcctcatgtctcctcatgtcttattgttcagaaatgggtaatgtggccatttcaccagtcactgccaacaacaacgaggttcctataattgtctctgagtaaccctttggaatggagagggtgttggtcagtctacaaactgaacactgcagttctgcgctttttaccagtgaaaaaatgtaattattttcccctcttaaggattaatattcttcaaatgtatgcctgttatggatatagtatctttaaaattttttattttaatagctttaggggtacacactttttgcttacaggggtgaattgtgtagtggtgaagactcggcttttaatgtacttgtcacctgagtgatgtacattgtacccaataggtaatttttcatccattaccctccttccgccctcttcccttctgagtctccaacatcccttataccactgtgtatgttcttgtgtacctacagctaagcttccacttataagtgagaacatgcagtatttggttttccattcctgagttacttcccttaggataacagcccccagttccgtccaagttgctgcaaaatacattattcttctttatggctgagtaatagtccatggtacatatataccacattttctttatccacttatcagttgatggacacttaggttaattccattcaatttcattcaatttaagtatatttgtaaggagctaaagctgaaaattaaattttagatctttcaatactcttaaattttatatgtaagtggtttttatattttcacatttgaaataaagtaatttttataatcttgaaaaaaaaaaaaaaaaa

SEQ ID NO: 3040 - DNA, 1488 bp, Homo Sapiens
  NM_006666
gttggtgagcatcatggcaaccgttacagccacaaccaaagtcccggagatccgtgatgtaacaaggattgagcgaatcggtgcccactcccacatccggggactggggctggacgatgccttggagcctcggcaggcttcgcaaggcatggtgggtcagctggcggcacggcgggcggctggcgtggtgctggagatgatccgggaagggaagattgccggtcgggcagtccttattgctggccagccgggcacggggaagacggccatcgccatgggcatggcgcaggccctgggccctgacacgccattcacagccatcgccggcagtgaaatcttctccctggagatgagcaagaccgaggcgctgacgcaggccttccggcggtccatcggcgttcgcatcaaggaggagacggagatcatcgaaggggaggtggtggagatccagattgatcgaccagcaacagggacgggctccaaggtgggcaaactgaccctcaagaccacagagatggagaccatctacgacctgggcaccaagatgattgagtccctgaccaaggacaaggtccaggccggggacgtgatcaccatcgacaaggcgacgggcaagatctccaagctgggccgctccttcacacgcgcccgcgactacgacgctatgggctcccagaccaagttcgtgcagtgcccagatggggagctccagaaacgcaaggaggtggtgcacaccgtgtccctgcacgagatcgacgtcatcaactctcgcacccagggcttcctggcgctcttctcaggtgacacaggggagatcaagtcagaagtccgtgagcagatcaatgccaaggtggctgagtggcgcgaggagggcaaggcggagatcatccctggagtgctgttcatcgacgaggtccacatgctggacatcgagagcttctccttcctcaaccgggccctggagagtgacatggcgcctgtcctgatcatggccaccaaccgtggcatcacgcgaatccggggcaccagctaccagagccctcacggcatccccatagacctgctggaccggctgcttatcgtctccaccaccccctacagcgagaaagacacgaagcagatcctccgcatccggtgcgaggaagaagatgtggagatgagtgaggacgcctacacggtgctgacccgcatcgggctggagacgtcactgcgctacgccatccagctcatcacagctgccagcttggtgtgccggaaacgcaagggtacagaagtgcaggtggatgacatcaagcgggtctactcactcttcctggacgagtcccgctccacgcagtacatgaaggagtaccaggacgccttcctcttcaacgaactcaaaggcgagaccatggacacctcctgagttggatgtcatcccccgaccccaccctgttttccaccagagttctgacactgtgactctgtataaaatggttgggaagctgc

SEQ ID NO: 3041 - DNA, 2971 bp, Homo Sapiens
  NM_006669
gaggaggaacagaaaagaaaagaaaagaaaaagtgggaaacaaataatctaagaatgaggagaaagcaagaagagtgacccccttgtgggcactccattggttttatggcgcctctactttctggagtttgtgtaaaacaaaaatattatggtctttgtgcacatttacatcaagctcagcctgggcggcacagccagatgcgagatgcgtctctgctgatctgagtctgcctgcagcatggacctgggtcttccctgaagcatctccagggctggagggacgactgccatgcaccgagggctcatccatccacagagcagggcagtgggaggagacgccatgacccccatcctcacggtcctgatctgtctcgggctgagtctgggccccaggacccacgtgcaggcagggcacctccccaagcccaccctctgggctgaaccaggctctgtgatcacccaggggagtcctgtgaccctcaggtgtcaggggggccaggagacccaggagtaccgtctatatagagaaaagaaaacagcactctggattacacggatcccacaggagcttgtgaagaagggccagttccccatcccatccatcacctgggaacatgcagggcggtatcgctgttactatggtagcgacactgcaggccgctcagagagcagtgaccccctggagctggtggtgacaggagcctacatcaaacccaccctctcagcccagcccagccccgtggtgaactcaggagggaatgtaatcctccagtgtgactcacaggtggcatttgatggcttcagtctgtgtaaggaaggagaagatgaacacccacaatgcctgaactcccagccccatgcccgtgggtcgtcccgcgccatcttctccgtgggccccgtgagcccgagtcgcaggtggtggtacaggtgctatgcttatgactcgaactctccctatgagtggtctctacccagtgatctcctggagctcctggtcctaggtgtttctaagaagccatcactctcagtgcagccaggtcctatcgtggcccctgaggagaccctgactctgcagtgtggctctgatgctggctacaacagatttgttctgtataaggacggggaacgtgacttccttcagctcgctggcgcacagccccaggctgggctctcccaggccaacttcaccctgggccctgtgagccgctcctacgggggccagtacagatgctacggtgcacacaacctctcctccgagtggtcggcccccagcgaccccctggacatcctgatcgcaggacagttctatgacagagtctccctctcggtgcagccgggccccacggtggcctcaggagagaacgtgaccctgctgtgtcagtcacagggatggatgcaaactttccttctgaccaaggagggggcagctgatgacccatggcgtctaagatcaacgtaccaatctcaaaaataccaggctgaattccccatgggtcctgtgacctcagcccatgcggggacctacaggtgctacggctcacagagctccaaaccctacctgctgactcaccccagtgaccccctggagctcgtggtctcaggaccgtctgggggccccagctccccgacaacaggccccacctccacatctggccctgaggaccagcccctcacccccaccgggtcggatccccagagtggtctgggaaggcacctgggggttgtgatcggcatcttggtggccgtcatcctactgctcctcctcctcctcctcctcttcctcatcctccgacatcgacgtcagggcaaacactggacatcgacccagagaaaggctgatttccaacatcctgcaggggctgtggggccagagcccacagacagaggcctgcagtggaggtccagcccagctgccgatgcccaggaagaaaacctctatgctgccgtgaagcacacacagcctgaggatggggtggagatggacactcggagcccacacgatgaagacccccaggcagtgacgtatgccgaggtgaaacactccagacctaggagagaaatggcctctcctccttccccactgtctggggaattcctggacacaaaggacagacaggcggaagaggacaggcagatggacactgaggctgctgcatctgaagccccccaggatgtgacctacgcccagctgcacagcttgaccctcagacgggaggcaactgagcctcctccatcccaggaagggccctctccagctgtgcccagcatctacgccactctggccatccactagcccagggggggacgcagaccccacactccatggagtctggaatgcatgggagctgcccccccagtggacaccattggaccccacccagcctggatctaccccaggagactctgggaacttttaggggtcactcaattctgcagtataaataactaatgtctctacaattttgaaataaagcaacagacttctcaataatcaatgaagtagctgagaaaactaagtcagaaagtgcattaaactgaatcacaatgtaaatattacacatcaagcgatgaaactggaaaactacaagccacgaatgaatgaattaggaaagaaaaaaagtaggaaatgaatgatcttggctttcctataagaaatttagggcagggcacggtggctcacgcctgtaattccagcactttgggaggccgaggcgggcagatcacgagttcaggagatcgagaccatcttggccaacatggtgaaaccctgtctctcctaaaaatacaaaaattagctggatgtggtggcagtgcctgtaatcccagctatttgggaggctgaggcaggagaatcgcttgaaccagggagtcagaggtttcagtgagccaagatcgcaccactgctctccagcctggcgacagagggagactccatctcaaattaaaaaaaaaaaaaaaaaagaaagaaaaa

SEQ ID NO: 3042 - DNA, 2547 bp, Homo Sapiens
  NM_006674
gactcagattctccccagacgccaaggttgcgggtcatggagtcccgaaccctcctcctgctgttctcgggagccgtggccctgatccagacctgggcagattacaattacaatcaaggcagaaatgatctcatttttacattacaactctggaaaaggcaatagactgagatgcaagtgtgcccccaagtgatgggcagaaggagagaaggtgttttggatgcattctagaacacaggtaatctaaggagagttgatcaaggccgtggaagagtcctccagccactattggccatcaaaggagtcctctgtgtcccaggaatggtcctgctttggtgtccctggtgtgacccatcacccgctgggaacagcctgagagaagtagggcctctgcaccaatgctgctgaggatgtcagagcacaggaacgaggccttgggaaattacctggaaatgcgactgaaatcttccttcctgaggggtctgggctcttggaaatcaaaccctctcaggttgggtggctggacgattctcctcacacttacaatgggacaaggggaaccaggaggcccccaaggggatccctgggttccacacgaactcctcctaccctcattgtgtgacagcagccatgcctcctcctggggatcaggatctattacctgtgcctggagaggaggggactcctcttctcacccgctggtctctggacacatactgtccaattcccctgtggcagctgtaatgtgtagttcaatgggcactcatttgtccccttttaagggtaccctcctttagaatccaggaccttctaccctgcagagtgtggttttgggagagaagtgcaaaatcccacgacaggtgagttgaaggaatgggatatggagccacatccacttccaccccttggtatctggacccacgtgttcttcctactgagattacagaactgtagagatgtctttgatttttaaaatgcaccatgtcctgaaagatggcaccctcccacccgcagagtgcttcctgcaagctggcgttgagctgtgcctatagaagctcttttcaacattctttatggccagcagcccttggttggtgcagatggtgataggaccagtgggtcccacagcatggccacactgcacctccttcgctgtcaagtgggtcccccacgaagatactgcacggagagcagtgccaagcctgtggatcaggaatatcaacagcccccagagagtggtgctggctgagggtctgagagcaggacaggaaaacccacctatggaataggtgcctatccctgtgaagatgaacctctggcccttccaggatggaaggagtgcaatgtagtcaactcctcacttagggtctggttggtcacctaaagaaatagagccctaccagggaagatcattgggttcaaatgctgatgagtaggacatttagaggtggcagtgtctggatctaccttggtaggagggagtcagtactgttggacccataggtagcctcatccctgccactgtgtttgctccatttatgtacccatcctacccggcctgggctgacccatggggaaggctggctaatttcagtgcttctgcttggttgttcagggccatttcaggtttgggtgttttctggggatgttaacatgggattcaggctcaactcacaagaaacttttccatctcatgatggatgctgttgggcatgtccaatgtatgacttcatgagttacacagatgctaattcgtaggggcacttggaatcacatggttgttttgtgtcccatggtcaagcattctatcttatcagggcctacagtaacatgccaaaagttgcttccaacatatttctctgctttggatggggcatatttctgtgctgtggatgacatggccttactccagaatcccaggccctccactgtgactctcctactggtgcttggttcagctccaccccaaatcttaccccaccactggcactttcagcaccagggggtctgaaggatggtgactgcgccatggcctggatctgctgcagtgtcctttcctgtggaggctccactcaaagctggcatcctcctatgtcacctagagtgtgggtcaaagcaatacacctacatgtagaatgtgatgtcagaactcaaacaggctcaccaggcagtgtgcttccttccttgcatgaggatgcaagatgcaacagtttgtctttcacattggaagggacacccctggatgcccctaaccactagacctgtaaaacttcactgcagtggccacttctgaatctctgtaaggtttatttatcttcaccctctggagagaagatgttttaccaaagcctctagtgtaccttcctcctcttactcatccatcccagtcaacatgatgttgtcaatgaaataaaggaatttaatattctatagtatatccaggttctccagatctcttaagactgtactatagaggcctggggaattataatagccctgaggcaaactatgaattaaagtgttgtggatcccacatgaaaaaaaaaa

SEQ ID NO: 3043 - DNA, 4268 bp, Homo Sapiens
  NM_006682
gccctgcgcactccctgctggggtgagcagcactgtaaagatgaagctggctaactggtactggctgagctcagctgttcttgccacttacggttttttggttgtggcaaacaatgaaacagaggaaattaaagatgaaagagcaaaggatgtctgcccagtgagactagaaagcagagggaaatgcgaagaggcaggggagtgcccctaccaggtaagcctgccccccttgactattcagctcccgaagcaattcagcaggatcgaggaggtgttcaaagaagtccaaaacctcaaggaaatcgtaaatagtctaaagaaatcttgccaagactgcaagctgcaggctgatgacaacggagacccaggcagaaacggactgttgttacccagtacaggagccccgggagaggttggtgataacagagttagagaattagagagtgaggttaacaagctgtcctctgagctaaagaatgccaaagaggagatcaatgtacttcatggtcgcctggagaagctgaatcttgtaaatatgaacaacatagaaaattatgttgacagcaaagtggcaaatctaacatttgttgtcaatagtttggatggcaaatgttcaaagtgtcccagccaagaacaaatacagtcacgtccagttcaacatctaatatataaagattgctctgactactacgcaataggcaaaagaagcagtgagacctacagagttacacctgatcccaaaaatagtagctttgaagtttactgtgacatggagaccatggggggaggctggacagtgctgcaggcacgtctcgatgggagcaccaacttcaccagaacatggcaagactacaaagcaggctttggaaacctcagaagggaattttggctggggaacgataaaattcatcttctgaccaagagtaaggaaatgattctgagaatagatcttgaagactttaatggtgtcgaactatatgccttgtatgatcagttttatgtggctaatgagtttctcaaatatcgtttacacgttggtaactataatggcacagctggagatgcattacgtttcaacaaacattacaaccacgatctgaagtttttcaccactccagataaagacaatgatcgatatccttctgggaactgtgggctgtactacagttcaggctggtggtttgatgcatgtctttctgcaaacttaaatggcaaatattatcaccaaaaatacagaggtgtccgtaatgggattttctggggtacctggcctggtgtaagtgaggcacaccctggtggctacaagtcctccttcaaagaggctaagatgatgatcagacccaagcactttaagccataaatcactctgttcattcctccaggtattcgttatctaatagggcaattaattccttcagcactttagaatatgccttgtttcatatttttcatagctaaaaaatgatgtctgacggctaggttcttatgctacacagcatttgaaataaagctgaaaaacaatgcattttaaaggagtcctttgttgttatgctgttatccaatgaacacttgcaagcaattagcaatattgagaattatacattagatttacaattcttttaatttctattgaaactttttctattgcttgtattacttgctgtatttaaaaaataattgttggctgggtgtggtagctcacgcctgtaatcccagcactttggaatgtcaaggcaggcagatcacttgaggtcaggagtttgagaccagcctggccaaacatgtgaaacgctgtctctattaaaaatacaaaaattagccgggcatggtggtacatgcctgtaatcctagctacttgggaggctgaggcaggagaatcgcttgaacctgagaggaagaggttgcagtgagccaagactgagccactgcactccagcatgggtgacagagaaaactctgtctcaaacaaaaaaataataaaatttattcagtaggctggattctacacaaagtaatctgtatttgggccatgatttaagcacatctgaaggtatatcactcttttcaggctataattatttgggtaatcttcattctgagacaaacttaatctatatcatttactttgcaacagaacaaccctacagcattttggttcccagactaagggaactaatatctatataattaaacttgttcatttatcattcatgaaatataaaatacttgtcatttaaaccgtttaaaaatgtggtagcataatgtcaccccaaaaagcattcagaaagcaatgtaactgtgaagaccagggtttaaaggtaattcatttatagtttataactccttagatgtttgatgttgaaaactgctttaacatgaaaattatcttcctctgctctgtgtgaacaatagcttttaatttaagattgctcactactgtactagactactggtaggtttttttggggggggtgggtagggatatgtgggtaatgaagcatttacttacaggctatcatactctgaggccaattttatctccaaagcaataatatcattaagtgattcacttcatagaaggctaagtttctctaggacagatagaaaacatgaattttgaaatatatagaacagtagttaaaatactatatatttcaaccctggctggtagattgcttattttactatcagaaactaaaagatagatttttacccaaacagaagtatctgtaatttttataattcatcaattctggaatgctatatataatatttaaaagactttttaaatgtgtttaatttcatcatcgtaaaaagggatcatctcagagagaacagcagtattctgcgtatttttaaaaatgctctagagtaacatttgaagtaattcactgtagtgtatgccagtcctagaaataatttttttaatttctggtgtctgtttctaatacactaaccaagttttcaaaatatatttacaaagatgcatctttacccattattttaaaatgattaaggaggatagttgcttcaggtaacaagctaatttttcaaatattaggcccttacagaactatttagtcaaaaagtaagatattcctttaaaatatataacccaaagctttcagttaaacatgatatatcacaaatactattaaaatgttaaagagaaatgcaaatagcattaaatgatgaccaaaatgtaaaatattgtagatttcaaaagctgtgtctctattaggtgggataccaaatgtaaatgatgtaactgacgttgttttttactttttactttttaaaaaagactaaaaacgttttgatattatacaatgtatttgtttcagataaggtcattgtcatttagtatatataattaatatatgtacaagtttaagtaaattcctgtgagtaaaaatggacttatcacaaaacatagttctaaagaaaggtatatgctcatatacacggtgtccattaatttaatgggaactaggtataacttcaggagaatttggcaaataattcattaatccatgtaaatattcaaaagcttgttctatccacattatttcaagggatcactttatttttcattatactttcacagcacttttctagtaaattctgtaacacagaaattccattttggaatcatttcatgttaccaataattctagacttttataacatttaacatgttgatggaaatagattacatctgctagaaccttttgccttaactattcaccaatatatgctaatattcataaatatggattgactgtttacaaacattagaatcttgtcttggttccattttgatggctaatatttgttatcttaattaagactatttctgaggtcatgattacttgaaaatattgactaaaactgggtccttagaaattccaggtggagctgatttacctatgactgaggggaaaaaaaaatcaaattttactgataatagtaatgctccaaatgaattaatgacacatctgttcaataaataaagagcttaaatatacaaaacataagaaatctgggcaacaaaacttgtggtctttacttttgaatagctacccaagaaaaggttttaaaggtaaaagttatgagtaatgtcatcacaataagctcttgtttaaaattcttttcttttatgtataattaggtttatgtttcatgtctttttaaaaccttataaaagatttaattatcacatctattcttcaatgtggaaatattaaatattgttggttgtaaaataa

SEQ ID NO: 3044 - DNA, 4344 bp, Homo Sapiens
  NM_006690
gggatgccgaggagccggggcggccgcgccgcgccggggccgccgccgccgccgccgccgccgggccaggccccgcgctggagccgctggcgggtccctgggcggctgctgctgctgctgctgcccgcgctctgctgcctcccgggcgccgcgcgggcggcggcggcggcggcgggggcagggaaccgggcagcggtggcggtggcggtggcgcgggcggacgaggcggaggcgcccttcgccgggcagaactggttaaagtcctatggctatctgcttccctatgactcacgggcatctgcgctgcactcagcgaaggccttgcagtcggcagtctccactatgcagcagttttacgggatcccggtcaccggtgtgttggatcagacaacgatcgagtggatgaagaaaccccgatgtggtgtccctgatcacccccacttaagccgtaggcggagaaacaagcgctatgccctgactggacagaagtggaggcaaaaacacatcacctacagcattcacaactataccccaaaagtgggtgagctagacacgcggaaagctattcgccaggctttcgatgtgtggcagaaggtgaccccactgacctttgaagaggtgccataccatgagatcaaaagtgaccggaaggaggcagacatcatgatcttttttgcttctggtttccatggcgacagctccccatttgatggagaagggggattcctggcccatgcctacttccctggcccagggattggaggagacacccactttgactccgatgagccatggacgctaggaaatgccaaccatgacgggaacgacctcttcctggtggctgtgcatgagctgggccacgcgctgggactggagcactccagcgaccccagcgccatcatggcgcccttctaccagtacatggagacgcacaacttcaagctgccccaggacgatctccagggcatccagaagatctatggacccccagccgagcctctggagcccacaaggccactccctacactccccgtccgcaggatccactcaccatcggagaggaaacacgagcgccagcccaggccccctcggccgcccctcggggaccggccatccacaccaggcaccaaacccaacatctgtgacggcaacttcaacacagtggccctcttccggggcgagatgtttgtctttaaggatcgctggttctggcgtctgcgcaataaccgagtgcaggagggctaccccatgcagatcgagcagttctggaagggcctgcctgcccgcatcgacgcagcctatgaaagggccgatgggagatttgtcttcttcaaaggtgacaagtattgggtgtttaaggaggtgacggtggagcctgggtacccccacagcctgggggagctgggcagctgtttgccccgtgaaggcattgacacagctctgcgctgggaacctgtgggcaagacctactttttcaaaggcgagcggtactggcgctacagcgaggagcggcgggccacggaccctggctaccctaagcccatcaccgtgtggaagggcatcccacaggctccccaaggagccttcatcagcaaggaaggatattacacctatttctacaagggccgggactactggaagtttgacaaccagaaactgagcgtggagccaggctacccgcgcaacatcctgcgtgactggatgggctgcaaccagaaggaggtggagcggcggaaggagcggcggctgccccaggacgacgtggacatcatggtgaccatcaacgatgtgccgggctccgtgaacgccgtggccgtggtcatcccctgcatcctgtccctctgcatcctggtgctggtctacaccatcttccagttcaagaacaagacaggccctcagcctgtcacctactataagcggccagtccaggaatgggtgtgagcagcccagagccctctctatccacttggtctggccagccaggcccttcctcaccagggtctgaggggcagctctggccagtgctcaccagggccagcagggccctaggctggggtcgtacagctgaagtggtgggtgcattggcctaggctgagcgtggggcagggaattatgggggctgtgccccagggtgggtgtctggcacccagctgccagccttctgtcctgggcaaactactccctacttaagggaataggccaggctccatccggaggcagggaccatgccaggaggagcccctgtggtcacggcatcctgtggtgtccatgaggtaccacagctccactcctggctggaacccagcaccctctgtgggaagccagcactagctctcatcccccatccgggagataccaccagtcctggtccccttttgccaacacctgctggtcagatgtccccctacccccaccccactgtcctccaaggctacaggacccctgcttctgacacagtgagcaacaagcctgggtttccctgctggcagacggcagatccctcaggaaacctgctccacttgtcagggtctcttcggagacccaggatttagggtcacatgctgcaggcagggctgtggcccagctgggtctgacaaggacccagctgtcacatcgtgaatatttaaatgtcctgtcactactgtcccattttgcaaaggctgcttgaggctttaggtgaactagaggtgactgtcttggtgatgaggccagcatagcggccctcccccaggcgacaaggaccaaggtgctgctaaggccactctagcgcccagacaccccagtagctgagctctgctcctatggctacagagctggggcagaagctgaccccatttctggaggaagatccgagtttgtgaccgtcctccactcccctctattgtcactgtccccagctttgctccagtctgtcacttgcagcctggagctcagcctcaccagttaggtgaggcagagatggctgcagggccaacactggcagagcctgggagtccttcggaaggggaccagggcgtctgaagtgctcagtgcccccactactctgaggccgactccagctactctgaggccgactcaatctctcggctggaagcagtgttttcccagagcttggcccttgctgacctcgctcactgggcccatcttcccacactgctcttagaaggacacccctaccggtagcagccccaagctgagggggctccctttttgaccttcactggcccgcccttcactgtctccagcaggagttcctagggcttggcctgccttgctccacagtacggcggaggcagccctgcttgtcactgaggagccctagacaaggccaatgggttcatcaatgcccactggctctctgccaaagccaaaaaggtgtcaggcagtctccagcgtgctggccgggtctcggatgccacccctgctcactgagcctgcatgggccttgcccccgaccctgtggtctctgggattggggtcggcttaccctgtagcacagacagggactcctgctgccctgggagctgtctcaagcaaaatctcttgtcccagaggtgcccatgtgggtccgctgtgtcccctgtcatcatccttgttttttctcattttggccaagggcaggctccctgggacaggcagggaacaactgcggagatattagtgattcataggtttgtacagtgttttatactttgcaaagcactttattagctcacacctgtccactcacatgaaactcgtgttaggccctgggaggccgacggtaactctcaccgtgccctcagatgaagcacagagaggttgttacttgcccgggccatccagtgggctggctgggtcttgtgtccccatctgtggacccctctagggtctgagatgagatgagaagtgtctcctgtatccacctcttcctggcctcccttcccccacttcctggtccctgtccactcctcaggttggtgctctcacttcttgaaagctctaggcacccccgcctcccgccaggctccccattggctcctggcaggccagctgagaatgaacaggagatggaggcaggcagcccaggctgcagaggtgagggatgtggggccaggcccagagggctcagcctagaggcttccaatctcagattctcctgcctgtggtcatctgtttgtccatcaccccaggacagggcagacagaggggcaaagcactgggggccccagagcctagcttcccctcagcctgggggacatcacagcatttcagtgtcagtcacattttaaactgatcagcctttgtataatgttttttaaatcatttctaaataaaacagaaatacagagtgaaaaaaaaaaa

SEQ ID NO: 3045 - DNA, 2087 bp, Homo Sapiens
  NM_006698
aggatgggtcctcggccggctcgactagaagactaagggggcgtctccccggcttcctgcggcgtcggtggcgagctgaggtggaggcaggctgcggcagacggcgacagtggcggcggcgccatggcagggcttgcaggatccctgctgccttggtgatcccgggctgacagccagagagcacagcggctcagctcctggagagtgagggttgaagaaagcggagggcagccgcctgcgcccgctggctcccattaggtcggttcctgcagcggtgcccggcagccttggtgaaggccctgcccggcagagatcatgtattgcctccagtggctgctgcccgtcctcctcatccccaagcccctcaaccccgccctgtggttcagccactccatgttcatgggcttctacctgctcagcttcctcctggaacggaagccttgcacaatttgtgccttggttttcctggcagccctgttccttatctgctatagctgctggggaaactgtttcctgtaccactgctccgattccccgcttccagaatcggcgcatgatcccggcgttgtgggcacctaacggcctgccctgttagctttccaaggaagcagaagacgggaggggaggcattgacataggtcataaagcattggagtttcaaatcccgcagcctcgcgggtgtcacattcctgacggcgcctttttggcctgtgatgttttatccttacaatgtgaataatggcactgaccggtgcttttattgtaaagtcctatagtcgtgggtggtcttgtggttgtgtgtgttctgtccccatctaggtcctggctggccgcatgaccacccctctcgcctcattactgtgaggagtctgggtccatcctggtcagctgccccaatgtgacctggggcagataaaatgccagtctcattgtcacctctgtgacccctccttgtcagggtctccttccttcccagaatgttactgactcctcagtccctcttctggtttccctttatttctcttctacccttttccttttttggggagtacctgtccaagacagggctcatttttgcacttatctcgaatttgaagagattgctgacgcccgagagcctcgctttttcatccttctttccttgttcagcaggctagacagaaacatgtcttgactgttagttgtccacaaatcttcagtattttctccacttcatttttaagaaaggaagcaacagatagatgttgctctttcacctgggtgtctgggctcaagctttcccgcccagcctcacttcctttgcccttcctcctgcctttctcaactgtcccaaggagggggcctcattgtgtctcccgtgcatgctctgcagcattgaagtatggtgtgttcacgtagttctagcagtccccagctgagtgagtgggagagtacctgtgtgtttcgtaacggccttgatccccttgatagatgtttggatattttttggtgtgccctgtgtgtgtgtgtgtacaaatacatgtgtatattccttttaaagaagctttatcgaacgtggtctgattttgaggtttagcaatagctagctatatatggtaggtgccgctacagtttttatttagcatggggattgcagagtgaccagcacactggactccgaggtggttcagacaagacagaggggagcagtggccatcatcctcccgccaggagcttcttcgttcctgcgcatatagactgtacattatgaagaatacccaggaagactttgtgactgtcacttgctgctttttctgcgcttcagtaacaagtgttggcaaacgagactttctcctggcccctgcctgctggagatcagcatgcctgtcctttcagtctgatccatccatctctctcttgcctgaggggaaagagagatgggccaggcagagaacagaactggaggcagtccatctagggaatgggactgtgaggccatacttgtgaaacgtctggactgctattctagagcttttatttggtgtgttcgttgcacagctgtttgaaatgtttaataaagctttataaactttaaaaaaaaaaaaaaa

SEQ ID NO: 3046 - DNA, 1415 bp, Homo Sapiens
  NM_006701
gtttgcgggtgcgggcgggaccggatttcgtccgtgggcccgggggcggcgggggccggggagtgaggggccggctgagcccacctcgctgggccctccctggcgccccgccttgggcggcggcgagcgcgcgggccgccatgtcgtacatgctcccgcacctgcacaacggctggcaggtggaccaggccatcctctcggaggaggaccgcgtggtcgtcatccgcttcggccacgactgggatcctacgtgcatgaagatggacgaggtcctgtacagcatcgccgagaaggttaaaaattttgcagttatttatcttgtggatattacagaagtgcctgacttcaacaaaatgtatgagttatacgatccatgtactgtcatgtttttcttcaggaacaagcacatcatgattgacttggggactggcaacaacaacaagattaactgggccatggaggacaagcaggagatggtggacatcatcgagacggtgtaccgcggggcccgcaaaggccgcggcctggtggtgtcccccaaggactactccaccaagtaccgctactgaggcgccctcagtctgcgcggataaatgtcgtggagccctttttgtatggaaacgttttaagctatttaaagcctttggaaaatacaggaagctccagggctggagcacctctgagatggaattgataacatggtcttaactcaccgaaataaacaagcacgtggtgagaggagcaggcctacttgtttgttctcaggaaacttaatgaatagattactgattttcctagtcaaagttaattcttacccttggagtaaaacgaaggtgtttatcctgtgagcctgtgcgttttgcatactgggttggtttgctggggctgcggtgacagcatatgccgcgagctgggctttaacagagatgtgtgctctcacagctttgcaggcgggggtctgagatcagggtgtcgcgggtggggggtcactgctgaggccgtgaggggaatctgctcaggcctgtccctggcttctgggggctgctggtggtattttcagttccttggtgtgtggatacttcgccccatctctgccttcacctgtgtcctccctgtgtgggtgctggtgtccaaaatttccccttttcgtagtgacaccagctgtgttggattggggcccaccctgctccagcatggcctaatcttaactaattacatttgcaaggatcttatgtccacaaaagtcacagtctgaggtgctgggggttaggacttcaatatataaattttgcggttacacaattcaatccatgacagaatccaaaggtttactctggttataaaaacagtacaataaaatattgtttatagccttccctgtaaggaaaaaaaaaaaaaaaaaaaaaaaaaaaaaa

SEQ ID NO: 3047 - DNA, 4490 bp, Homo Sapiens
  NM_006702
agtgaataatttaaaggggccgtgcctgcggagccgggcggaacgctagcggtgttggcgcggagtggaccccggctgcggcccctggcaatggcgccaccatcggtcccggagtcccagtgatgctctgtgccatagagcccccataacttcactactacgtgatagtaaatccccggcaaaaaccagcagcgccttgcaagcccacgccaccccaagcatcccaggactcttctgaaacgactccgggctaccagatcggccgtccagctggaatcaaccgatggaggctccgctgcaaactggaatggtgcttggcgtgatgatcggggccggagtggcggtggtggtcacggccgtgctcatcctcctggtggtgcggaggctgcgagtgccaaaaaccccagccccggatggcccccggtatcggttccggaagagggacaaagtgctcttctatggccggaagattatgcggaaggtgtcacaatccacctcctccctcgtggatacctctgtctccgccacctcccggccacgcatgaggaagaaactgaagatgctcaacattgccaagaagatcctgcgcatccagaaagagacgcccacgctgcagcggaaggagcccccgcccgcagtgctagaagctgacctgaccgagggcgacctggctaactcccatctgccctctgaagtgctttatatgctcaagaacgtccgggtgctgggccacttcgagaagccactcttcctggagctctgccgccacatggtcttccagcggctgggccagggtgactacgtcttccggccgggccagccagatgccagcatctacgtggtgcaggacgggctgctggagctctgtctgccagggcctgacgggaaggagtgtgtggtgaaggaagtggttcctggggacagcgtcaacagccttctcagcatcctggatgtcatcaccggtcaccagcatccccagcggaccgtgtctgcccgggcggcccgggactccacggtgctgcgcctgccggtggaagcattctccgcggtcttcaccaagtacccggagagcttggtgcgggtcgtgcagatcatcatggtgcggctgcagcgagtcaccttcctggcactgcacaactacctgggtctgaccaatgagctcttcagccacgagatccagcccctgcgtctgttccccagccccggcctcccaactcgcaccagccctgtgcggggctccaagagaatggtcagcacctcagctacagacgagcccagggagaccccagggcggccacccgatcccaccggggccccgctgcctggacctacaggggaccctgtgaagcccacatccctggaaaccccctcggcccctctgctgagccgctgcgtctccatgccaggggacatctcaggcttgcagggtggcccccgctccgacttcgacatggcctatgagcgtggccggatctccgtgtccctgcaggaagaggcctccggggggtccctggcagcccccgctcggacccccactcaggagcctcgtgagcagccggcaggcgcctgtgaatacagctactgtgaggatgagtcggccactggtggctgccctttcgggccctaccagggccgccagaccagcagcatcttcgaggcagcaaagcaggagctggccaagctgatgcggattgaggacccctccctcctgaacagcagagtcttgctgcaccacgccaaagctggcaccatcattgcccgccagggagaccaggacgtgagcctgcacttcgtgctctggggctgcctgcacgtgtaccagcgcatgatcgacaaggcggaggacgtgtgcctgttcgtagcgcagcccggggaactggtggggcagctggcggtgctcactggcgaacctctcatcttcacactgcgagcccaacgcgactgcaccttcctgcggatctccaagtccgacttctatgagatcatgcgcgcacagcccagtgtggtgctgagtgcggcgcacacggtggcagccaggatgtcgcccttcgtgcgccagatggacttcgccatcgactggactgcagtggaggcgggacgcgcgctgtacaggcagggcgaccgctccgactgcacttacatcgtgctcaatgggcggctgcgtagcgtgatccagcgaggcagtggcaagaaggagctggtgggcgagtacggccgcggcgacctcatcggcgtggtggaggcactgacccggcagccgcgagccacgacggtgcacgcggtgcgcgacacggagctggccaagcttcccgagggcaccttgggtcacatcaaacgccggtacccgcaggtcgtgacccgccttatccacctactgagccagaaaattctagggaatttgcagcagctgcaaggacccttcccagcaggctctgggttgggtgtgcccccacactcggaactcaccaacccagccagcaacctggcaactgtggcaatcctgcctgtgtgtgctgaggtccccatggtggccttcacgctggagctgcagcacgccctgcaggccatcggtccgacgctactccttaacagtgacatcatccgggcacgcctgggggcctccgcactggatagcatccaagagttccggctgtcagggtggctggcccagcaggaggatgcacaccgtatcgtactctaccagacggacgcctcgctgacgccctggaccgtgcgctgcctgcgacaggccgactgcatcctcattgtgggcctgggggaccaggagcctaccctcggccagctggagcagatgctggagaacacggctgtgcgcgcccttaagcagctagtcctgctccaccgagaggagggcgcgggccccacgcgcaccgtggagtggctaaatatgcgcagctggtgctcggggcacctgcacctgcgctgtccgcgccgcctcttttcgcgccgcagccctgccaagctgcatgagctctacgagaaggttttctccaggcgcgcggaccggcacagcgacttctcccgcttggcgagggtgctcacggggaacaccattgcccttgtgctaggcgggggcggggccaggggctgctcgcacatcggagtactaaaggcattagaggaggcgggggtccccgtggacctggtgggcggcacgtccattggctctttcatcggagcgttgtacgcggaggagcgcagcgccagccgcacgaagcagcgggcccgggagtgggccaagagcatgacttcggtgctggaacctgtgttggacctcacgtacccagtcacctccatgttcactgggtctgcctttaaccgcagcatccatcgggtcttccaggataagcagattgaggacctgtggctgccttacttcaacgtgaccacagatatcaccgcctcagccatgcgagtccacaaagatggctccctgtggcggtacgtgcgcgccagcatgacgctgtcgggctacctgcccccgctgtgcgaccccaaggacgggcacctactcatggatggcggctacatcaacaatctgccagcggacatcgcccgcagcatgggtgccaaaacggtcatcgccattgacgtggggagccaggatgagacggacctcagcacctacggggacagcctgtccggctggtggctgctgtggaagcggctgaatccctgggctgacaaggtaaaggttccagacatggctgaaatccagtcccgcctggcctacgtgtcctgtgtgcggcagctagaggttgtcaagtccagctcctactgcgagtacctgcgcccgcccatcgactgcttcaagaccatggactttgggaagttcgaccagatctatgatgtgggctaccagtacgggaaggcggtgtttggaggctggagccgtggcaacgtcattgagaaaatgctcacagaccggcggtctacagaccttaatgagagccgccgtgcagacgtgcttgccttcccaagctctggcttcactgacttggcagagattgtgtcccggattgagccccccacgagctatgtctctgatggctgtgctgacggagaggagtcagattgtctgacagagtatgaggaggacgccggacccgactgctcgagggatgaaggggggtcccccgagggcgcaagccccagcactgcctccgagatggaggaggagaagtcgattctccggcaacgacgctgtctgccccaggagccgcccggctcagccacagatgcctgaggacctcgacaggggtcaccccctccctcccacccctggactgggctgggggtggccccgtgggggtagctcactccccctcctgctgctatgcctgtgacccccgcggcccacacactggactgacctgccctgagcggggatgcagtgttgcactgatgacttgaccagcccctcccccaataaactcgcctcttggaaatggaaaaaaaaaaaaaaaaaa

SEQ ID NO: 3048 - DNA, 1087 bp, Homo Sapiens
  NM_006705
gcactcgctggtggtgggcgcgccgtgctgagctctggctgtcagtgtgttcgcccgcgtcccctccgcgctctccgcttgtggataactagctgctggttgatcgcactatgactctggaagaagtccgcggccaggacacagttccggaaagcacagccaggatgcagggtgccgggaaagcgctgcatgagttgctgctgtcggcgcagcgtcagggctgcctcactgccggcgtctacgagtcagccaaagtcttgaacgtggaccccgacaatgtgaccttctgtgtgctggctgcgggtgaggaggacgagggcgacatcgcgctgcagatccattttacgctgatccaggctttctgctgcgagaacgacatcgacatagtgcgcgtgggcgatgtgcagcggctggcggctatcgtgggcgccggcgaggaggcgggtgcgccgggcgacctgcactgcatcctcatttcgaaccccaacgaggacgcctggaaggatcccgccttggagaagctcagcctgttttgcgaggagagccgcagcgttaacgactgggtgcccagcatcaccctccccgagtgacagcccggcggggaccttggtctgatcgacgtggtgacgccccggggcgcctagagcgcggctggctctgtggaggggccctccgagggtgcccgagtgcggcgtggagactggcaggcggggggggcgcctggagagcgaggaggcgcggcctcccgaggaggggcccggtggcggcagggccaggctggtccgagctgaggactctgcaagtgtctggagcggctgctcgcccaggaaggcctaggctaggacgttggcctcagggccaggaaggacagactggccgggcaggcgtgactcagcagcctgcgctcggcaggaaggagcggcgccctggacttggtacagttgcaggagcgtgaaggacttagccgactgcgctgctttttcaaaacggatccgggcaatgcttcgttttctaaaggatgctgctgttgaagctttgaattttacaataaactttttgaaacaaaaaaaaaaaaaaaaaaaaaaaa

SEQ ID NO: 3049 - DNA, 4233 bp, Homo Sapiens
  NM_006706
agacgtcgggtcggcgggtggatgaacgcggccctctgtaatggcggagcgtggcggggacgggggcgagagtgaacgattcaacccgggggagctcaggatggcccaacagcaggccttgaggttccgaggtccggctcccccaccaaatgcagtgatgcgaggcccaccacctctgatgcgacctcctccaccttttggtatgatgcgaggccctcctccaccaccacggccgccctttggacgtcctccttttgatcctaatatgccgccaatgcctcctccaggagggatacctccacctatgggccctccacacctccagagaccacctttcatgcctcctcccatgagttccatgcctcctcctccgggtatgatgtttccaccaggaatgcctcctgtgactgctcctggtactccagcactacctcctacggaggagatatgggttgaaaataaaactccagatgggaaggtttattattataatgctcggacacgtgaatctgcatggaccaagccagatggagttaaggttattcagcaatcagaactgacacctatgcttgcagcccaggcacaggttcaggctcaggcccaggcgcaggctcaggcccaggcgcaggctcaggcccaggcacaagctcaggcccaggctcaggctcaggcccaggcccaggcccaggcccaggcccaggcccaagcccaagcccaggcccaggctcaggctcaggcacaagctcaggcccaggcccaggctcaggtccaggcccaggtccaggcacaagtgcaagcacaagcagttggagcttccacccctacgaccagtagcccagcacctgcagtatccacttcaacatcatcatccaccccttcctctaccacttctaccacaacaactgctacttcagttgcgcagacagtatcaacacccacaacacaagatcagaccccaagttctgctgtttcagttgccacgcctacagttagtgtttcaactcctgctcctacagccacacctgtgcaaaccgttccccagccgcaccctcagacgttacctcctgctgttcctcattcagtacctcagccaacaacagcaatacctgcttttccaccagtaatggtacctccgtttcgtgttccccttcctggcatgccaattccacttccaggtgtagcaatgatgcaaatagtcagctgcccgtatgtaaagacagtcgctaccaccaagaccggtgtattgccaggaatggcccctcctatcgtacccatgatacatccccaggttgctattgcagcttcacctgctaccttagctggagcaacagcagtttctgaatggactgaatataaaacagcagatgggaagacatattattataataatagaacattagaatcaacctgggaaaaaccccaagaactaaaggaaaaagaaaagttagaagagaagattaaagagccaattaaagaaccctctgaagagcctctgccaatggagacggaggaggaggatcctaaagaagagcctataaaggagataaaggaggagcccaaagaagaggagatgactgaagaagaaaaggctgcccagaaggcaaagccagttgctactgctcctattcctggtactccatggtgtgtcgtttggactggtgatgagcgggtcttcttttataatcccaccactcgtctttctatgtgggaccgacctgatgatctgattggcagggcagatgttgacaaaattattcaggagccccctcataaaaaaggaatggaggaattgaagaaactaaggcacccaactccgacaatgctgtcgatccaaaagtggcaattctctatgagtgcaattaaagaggaacaagaattaatggaagaaattaatgaagatgagcctgttaaagcaaaaaaacggaagagagacgataataaagacattgactcagagaaagaagctgccatggaagctgaaattaaagctgcccgagaaagggccattgtccctctggaggctcgaatgaagcagttcaaggacatgctgctagagagaggggtgtctgctttttcaacgtgggagaaggagttgcacaagatagtttttgatccccggtacttacttctcaatcctaaagagagaaaacaggtgtttgatcagtatgtaaagaccagggcagaggaagaacgcagggaaaagaaaaataaaataatgcaagccaaggaagatttcaaaaaaatgatggaagaagcaaaatttaatccaagagcaacttttagtgaatttgcagccaagcatgctaaagattcaagattcaaagcaattgaaaagatgaaagaccgagaagccttgtttaatgagtttgtggccgctgctaggaagaaagagaaagaagattcgaagaccagaggtgagaagattaaatcggatttctttgaactattatctaatcatcacttggacagtcagtctcgatggagcaaagtaaaagacaaagtagaaagtgatccacgttacaaagcagtagatagttcatcaatgagagaagaccttttcaaacagtacattgaaaaaatagccaagaatttagactcagaaaaagaaaaggagcttgaaaggcaagcccgcattgaggcaagccttcgagaacgagaaagggaggttcaaaaggcccgttcagaacaaacaaaagaaatagatcgagagagagagcagcacaaacgagaagaagctatccagaatttcaaagctcttctgtctgacatggtacgttcttcagatgtgtcatggtctgatactcgtaggaccctccgaaaagatcaccgctgggaatctggatccttattggaaagagaggagaaagagaagctttttaatgaacacattgaagcacttaccaaaaaaaagagagagcactttaggcaacttctggatgaaacttctgcaattaccttaacatccacgtggaaagaagtaaaaaaaatcattaaggaagatcctcgatgtattaagttctcctccagtgacaggaaaaaacaaagagaatttgaagaatatatcagagacaaatatatcacagccaaagctgacttcaggacgcttttgaaagagaccaaatttataacatatagatccaaaaaattaatccaagaatcagatcagcacctgaaagatgtagaaaaaattttacagaatgacaaacggtatctagtactggactgtgtgccagaggagaggcgtaaactgattgtggcatatgttgatgacctggatcgccggggtccacccccacctcccacagcatcggagcccacgagacgatcaacaaaataattctaaatactcttccataggggcatctattcaaaatgcttgcatgagccaattttcaggtttttacatatatgtgcattagtcaacctattgcgaaaccatctgacaaacagaaggagaagcatttgtgaacagtttctgaacagaacactttggaaatatttatgcttttctttgtgtggcatgactgacatacatactcaaatataggctgtctctagtaaatcttaaaatcttgaagctaaaattcatccttttatgaggtgtggaagtcagtgacttggtgacgttcttcctagcagtgttaatacatgcaagaagtaagagcatttgtggcttgaacttgccagatgcaaataccacagactccaagaaaacccgagttggggtttgttttgttttgattttttttttttaaagcgggtaaaagagaaaacactgaaaattgaattcttatcttccagaggctacaattattataatggacaatacttttacctttgtctctaaagatcagattagttttatttgttcacttacgtgctttgattatcccctctgaattatagaccgagtcttgttgtttagcctaagagaagatttatgtagtaatttcttctcaggtatggaaccacggtcataactaacatgttggccagaatagaaccactggttaaacatattttattcaccattaagtgatctttatcaatattctggattagacaacaaattacctttctgggtgtttcttgtaaactatactcctgtttgaatgttaaactttgttgctaaagtttaattttaagatgtttgaatgttcagtttatgtatttgaactacaataaaccaaccctttttataaaaaaaaaaaaaaaaaaaaaaaaaaaaaaaaa

SEQ ID NO: 3050 - DNA, 2071 bp, Homo Sapiens
  NM_006708
agcggtctcccgcccgcggcgccatcgcgccattcctagttaaggcggcacagggccgaggcgtagtgtgggtgactcctccgttccttgggtcccgtcgtctgtgatactgcagcgcagccatggcagaaccgcagcccccgtccggcggcctcacggacgaggccgccctcagttgctgctccgacgcggaccccagtaccaaggattttctattgcagcagaccatgctacgagtgaaggatcctaagaagtcactggatttttatactagagttcttggaatgacgctaatccaaaaatgtgattttcccattatgaagttttcactctacttcttggcttatgaggataaaaatgacatccctaaagaaaaagatgaaaaaatagcctgggcgctctccagaaaagctacacttgagctgacacacaattggggcactgaagatgatgagacccagagttaccacaatggcaattcagaccctcgaggattcggtcatattggaattgctgttcctgatgtatacagtgcttgtaaaaggtttgaagaactgggagtcaaatttgtgaagaaacctgatgatggtaaaatgaaaggcctggcatttattcaagatcctgatggctactggattgaaattttgaatcctaacaaaatggcaaccttaatgtagtgctgtgagaattctcctttgagatttcagaagaaaggaaacaatgtgattcaagatatttacataccagaagcatctaggactgatggatcactgtcccgattcaaattattcttcagtccatttccccttcctatttcagctgttccttttcacctaactgttcagtcattctggttttcaagcagtgctttatctcatgtccttgaatatagttgtgtaactttattttttaggtaataattagaacagttcccttcagaggctgcatttgccttcttctgccacctaaatattacttcccttcaaatctgcctttgaatcatcatttttaaaaaaaaattaacatgtttttgttgtagttatcttctggggtttcaattcctcagaaacaacttttttcacaacggaaaggaaagaacactagtgttctttcagtaaagtacaaagtgtttattttacaaaagagtaggtactcttgagagcaattcaaatcatgctgacaaggatactgatagaaaaagtgatttcttcttattataaagtacatttaaagttcaaggactaaccttatttatttgggaaaggggaggaggaaggaaatgatatggtacccagacactgggctaggctgcaactttatctcatttaatactcccagctgtcatgtgagaaagaaagcaggctaggcatgtgaaatcactttcatggattattaatggatttaagagggcatcaatcagctcaactcaagatttcataatcatttttagtatttagattgtgcctcaaagttgtagtacctcacaatacctccactggtttcctgttgtaaaaaccttcagtgagtttgaccattgtgctcttggctcttgggctggagtaccgtggtgagggagtaaacactagaagtctttagtacaaaactgctctagggacacctggtgattcctacacaagtgatgtttatatttctcataaagagtcttccctatcccaaggtcttcatgatgccagtagccatatatgataaattatgttcagtgataacttagttatcagaaatcagctcagtggtcttccccgccatgattcacatttgatgagtttttaaaaatcaaagtgattttgaaaatctctaatggctcagaaaataaaaacatccagtttgtggatgactatatttagatttctctagactctagtggaagacctttggaaaggccatgccaaccgtgcttgtactgctagaagcactttatgtttcctttttgggtgaaatggatttatgtgagtgctttaaacaaatagcaatacttatagactgaaataaaatgaaacttcaaataagactatgtttaatttgtaaaaaaaaaaaaaaaaaaaaaaaaaaa

SEQ ID NO: 3051 - DNA, 2210 bp, Homo Sapiens
  NM_006714
gctttgcaaccagctgcggatgcctggacgtctaattgctcaaaggtgttatctgagactgaagaaacagacttttcccctggattctttgaaaatccccctctcttattctctagcagaataaaaactccctgctttttcctttttacacacggatttgagagatcttgttctccctccttctggcttttactaaattgaatgtctttctctatccccaagcaccagtatgtcagtgtttgacatcaactgcaccactgatacacgagtcggaatttgagcttctacaagtacattccttcctaggccaaacactgacgctaagaaatacgagaacagatcatcgctaaacagcagctgaaggtcaggcgaactgactcgctgcggaatctgcctttgcacgtgatcagtcggacgtctacacccgcagccgtcttctgtctccgcctcaccctcaggcctgacggtccgagtggagctgcgggacagcccgaacctccaggtcagccccgcggccctccatggcgctggtgcgcgcactcgtctgctgcctgctgactgcctggcactgccgctccggcctcgggctgcccgtggcgcccgcaggcggcaggaatcctcctccggcgataggacagttttggcatgtgactgacttacacttagaccctacttaccacatcacagatgaccacacaaaagtgtgtgcttcatctaaaggtgcaaatgcctccaaccctggcccttttggagatgttctgtgtgattctccatatcaacttattttgtcagcatttgattttattaaaaattctggacaagaagcatctttcatgatatggacaggggatagcccacctcatgttcctgtacctgaactctcaacagacactgttataaatgtgatcactaatatgacaaccaccatccagagtctctttccaaatctccaggttttccctgcgctgggtaatcatgactattggccacaggatcaactgcctgtagtcaccagtaaagtgtacaatgcagtagcaaacctctggaaaccatggctagatgaagaagctattagtactttaaggaaaggtggtttttattcacagaaagttacaactaatccaaaccttaggatcatcagtctaaacacaaacttgtactacggcccaaatataatgacactgaacaagactgacccagccaaccagtttgaatggctagaaagtacattgaacaactctcagcagaataaggagaaggtgtatatcatagcacatgttccagtggggtatctgccatcttcacagaacatcacagcaatgagagaatactataatgagaaattgatagatatttttcaaaaatacagtgatgtcattgcaggacaattttatggacacactcacagagacagcattatggttctttcagataaaaaaggaagtccagtaaattctttgtttgtggctcctgctgttacaccagtgaagagtgttttagaaaaacagaccaacaatcctggtatcagactgtttcagtatgatcctcgtgattataaattattggatatgttgcagtattacttgaatctgacagaggcgaatctaaagggagagtccatctggaagctggagtatatcctgacccagacctacgacattgaagatttgcagccggaaagtttatatggattagctaaacaatttacaatcctagacagtaagcagtttataaaatactacaattacttctttgtgagttatgacagcagtgtaacatgtgataagacatgtaaggcctttcagatttgtgcaattatgaatcttgataatatttcctatgcagattgcctcaaacagctttatataaagcacaattactagtatttcacagtttttgctaatagaaaatgctgattctgattctgagatcaatttgtgggaattttacataaatctttgttaattactgagtgggcaagtagacttcctgtctttgctttctttttttttttctttttgatgccttaatgtagatatctttatcattctgaattgtattatatatttaaagtgctcattaatagaatgatggatgtaaattggatgtaaatattcagtttatataattatatctaatttgtacccttgttgaaattgtcatttatacaataaagcgaattctttatctctaaaaaaaaaaaaaaaaaa

SEQ ID NO: 3052 - DNA, 3254 bp, Homo Sapiens
  NM_006715
ggagcgagagcccggcgatggcggctgcgccggccttgaagcactggcgcaccacgctggagcgggtggagaagttcgtgtcgccgctctactttaccgactgtaacctccgcggcaggctttttggggccagctgccctgtggctgtgctctccagcttcctgacgccggagagacttccctaccaggaggcagtccagcgggacttccgccccgcgcaggtcggcgacagcttcggacccacatggtggacctgctggttccgggtggagctgaccatcccagaggcatgggtgggccaggaagttcacctttgctgggaaagtgatggagaaggtctggtgtggcgtgatggagaacctgtccagggtttaaccaaagagggtgagaagaccagctatgtcctgactgacaggctgggggaaagagacccccgaagcctcactctctatgtggaagtagcctgcaatgggctcctgggggccgggaagggaagcatgattgcagcccctgaccctgagaagatgttccagctgagccgggctgagctagctgtgttccaccgggatgtccacatgctcctggtggatctggagctgctgctgggcatagccaagggcctcgggaaggacaaccagcgcagcttccaggccctgtacacagccaatcagatggtgaacgtgtgtgaccctgcccagcccgagaccttcccagtggcccaggccctggcctccaggttctttggccaacatgggggtgaaagccaacacaccattcatgccacagggcactgccacattgatacagcctggctttggcccttcaaagagactgtgaggaaatgtgcccggagctgggtgaccgccctgcagctcatggagcggaaccctgagttcatctttgcctgctcccaggcgcagcagctggaatgggtgaagagccgctaccctggcctgtactcccgcatccaggagtttgcgtgccgtgggcagtttgtgcctgtggggggcacctgggtggagatggatgggaacctgcccagtggagaggccatggtgaggcagtttttgcagggccagaacttctttctgcaggagtttgggaagatgtgctctgagttctggctgccggacacctttggctactcagcacagctcccccagatcatgcacggctgtggcatcaggcgctttctcacccagaaattgagctggaatttggtgaactccttcccacaccatacatttttctgggagggcctggatggctcccgtgtactggtccacttcccacctggcgactcctatgggatgcagggcagcgtggaggaggtgctgaagaccgtggccaacaaccgggacaaggggcgggccaaccacagtgccttcctctttggctttggggatgggggtggtggccccacccagaccatgctggaccgcctgaagcgcctgagcaatacggatgggctgcccagggtgcagctatcttctccaagacagctcttctcagcactggagagtgactcagagcagctgtgcacgtgggttggggagctcttcttggagctgcacaatggcacatacaccacccatgcccagatcaagaaggggaaccgggaatgtgagcggatcctgcacgacgtggagctgctcagtagcctggccctggcccgcagtgcccagttcctatacccagcagcccagctgcagcacctctggaggctccttcttctgaaccagttccatgatgtggtgactggaagctgcatccagatggtggcagaggaagccatgtgccattatgaagacatccgttcccatggcaatacactgctcagcgctgcagccgcagccctgtgtgctggggagccaggtcctgagggcctcctcatcgtcaacacactgccctggaagcggatcgaagtgatggccctgcccaaaccgggcggggcccacagcctagccctggtgacagtgcccagcatgggctatgctcctgttcctccccccacctcactgcagcccctgctgccccagcagcctgtgttcgtagtgcaagagactgatggctccgtgactctggacaatggcatcatccgagtgaagctggacccaactggtcgcctgacgtccttggtcctggtggcctctggcagggaggccattgctgagggcgccgtggggaaccagtttgtgctatttgatgatgtccccttgtactgggatgcatgggacgtcatggactaccacctggagacacggaagcctgtgctgggccaggcagggaccctggcagtgggcaccgagggcggcctgcggggcagcgcctggttcttgctacagatcagccccaacagtcggcttagccaggaggttgtgctggacgttggctgcccctatgtccgcttccacaccgaggtacactggcatgaggcccacaagttcctgaaggtggagttccctgctcgcgtgcggagttcccaggccacctatgagatccagtttgggcacctgcagcgacctacccactacaatacctcttgggactgggctcgatttgaggtgtgggcccatcgctggatggatctgtcagaacacggctttgggctggccctgctcaacgactgcaagtatggcgcgtcagtgcgaggcagcatcctcagcctctcgctcttgcgggcgcctaaagccccggacgctactgctgacacggggcgccacgagttcacctatgcactgatgccgcacaagggctctttccaggatgctggcgttatccaagctgcctacagcctaaacttccccctgttggctctgccagcccccagcccagcgcccgccacctcctggagtgcgttttccgtgtcttcacccgcggtcgtattggagaccgtcaagcaggcggagagcagcccccagcgccgctcgctggtcctgaggctgtatgaggcccacggcagccacgtggactgctggctgcacttgtcgctgccggttcaggaggccatcctctgcgatctcttggagcgaccagaccctgctggccacttgacccttcgggacaaccgcctgaagctcaccttttctcccttccaagtgctgtccctgttgctcgtgcttcagcctccgccacactgagtccctggggctggggttttgtttgtagaaggctctggggactcctaatttctgcttccccagcctaaagcagggatcagtcttttcttgtggaataaatccttggatcgggaa

SEQ ID NO: 3053 - DNA, 6850 bp, Homo Sapiens
  NM_006720
gaggagaggaggcgtgagagagcgtgcctgcccgccgcacacggggctggtttccggagtgcgtctctagagggatgcacgttgccttagccgagcttcggagagaagcctgatatgtaacccaggcaggtgggagcctcagtctgtcgggctgaggtctggcatctacaaagcctcttggccgtgttctgaacttgaagcctggaggagttctctgctcagcacagccaaggaacagaattagaagaaaaggaaccctggcctgaggcaggtgacaaacattaccaccccagctgtgcacgatgcagcagatgcaaccagatgttcacagaaggagaggaaatgtatcttcaaggctccaccgtttggcatcccgactgtaagcaatctacgaagaccgaggaaaagctgcggctgccaaacattcggcgttcttcatccgatttcttttattccaaaagtctgattcgacgcacaggacggtctccgtctctgcagcctaccaggacatcctcggaaagtatttattctaggccaggctccagtattcctggctcaccaggtcatactatctatgcaaaagtagacaatgagatcctggattacaaggatttagcagccattccgaaggtcaaggcaatttatgacattgaacgtccagatcttattacctatgagcctttctacacttcgggctatgatgacaaacaggagagacagagccttggagagtctccgaggactttgtctcctactccatcagcagaagggtaccaggatgttcgggatcggatgatccatcggtccacgagccagggctccatcaactcccctgtgtacagccgccacagctacactccaaccacgtcccgctctccccagcatttccacagacctgatcaaggaatcaacatttaccgaaagccacccatctacaaacagcatgctgccttggcagcccagagcaagtcctcagaagatatcatcaagttttccaagttcccagcagcccaggcaccagaccccagcgagacaccaaagattgagacggaccactggcctggtcccccctcatttgctgtcgtaggacctgacatgaaacgcagatctagtggcagagaggaagatgatgaggaacttctgagacgtcggcagcttcaagaagagcaattaatgaagcttaactcaggcctgggacagttgatcttgaaagaagagatggagaaagagagccgggaaaggtcatctctgttagccagtcgctacgattctcccatcaactcagcttcacatattccatcatctaaaactgcatctctccctggctatggaagaaatgggcttcaccggcctgtttctaccgacttcgctcagtataacagctatggggatgtcagcgggggagtgcgagattaccagacactcccagatggccacatgcctgcaatgagaatggaccgaggagtgtctatgcccaacatgttggaaccaaagatatttccatatgaaatgctcatggtgaccaacagagggcgaaacaaaatcctcagagaggtggacagaaccaggctggagcgccacttagcccctgaagtgtttcgggaaatctttggaatgtccatacaggagtttgacaggttacctctttggagacgcaacgacatgaagaaaaaagcaaaactcttctaagtcccactcgtgaatggcaattagagaaaggactgacagtggcggtgccccataggatgtcatattgaggcccaaacttgattggagaatttgcaaactaccgtcgctcagcaacaccaaaaagagaaagtctggttaaaacaccatgagtcaaatgtcgggccagccaacagtaacacttgccaagaagcatggcgtagaaatttctatgttccgaaacacagagtagtgtccacatgtgagcttttcacattaccttatgtatacaacaggagctgcgttgttttcttctttttcttttcctttatctgttgtccaacaacagtgctgactgtccggataagagctggcaagtgcccttaggatgccgcatgggaaaaatcggttatcataatttcaaagtataaatatatttattaagtagcgctgcggctaagaaggaagagtgaggggtctgtccatggggtggcagtgatttcacacccgcctttcttgaatggcttcgtgttactcagccgtgccctggcaggaatggaactccatcagggaacagggcagctctgtttgaatggggtgaaaaacagcaaaattaattcttagcaagctccttgttctctactgttcaccgggacctggctggcaaatgacttagctattagtatatttaaaaactgttcaaaagcaaaagagaaggaacaggaatgaaaggaaaccttcccttaactctttctgcttcccatagcaggtctggttcctgctccccgcctaggacaggagctgtctggagctccacctttgcaaagaaaggaaaaacacaaattgcccccagattggcccagtggcatgccattaggtgattttgcataggggccatatcattcatggccaaaaaaaaccaaaaagcaaaaaacaaaaacaagtcccatgtcctactgactctagttcttccagtcgttatcctctgctgtctctctggcatcctatgaatcagatcaagcccatgctgttgttggtttttaaggtttctttcaataataggctaaggaaagacatgtttttctcttttaaatctctgcaactccaaagtagactccttcgaacgtatttaatttggccttttcagctttcttcttgcccagctctgtcgaattcatgggtgtgtgtgcacatgttggtttcactcacccagagtaattttgtgagcatgcatgtgctttttaatttctgcttgaatgtttgtcctgctgtgttgcagcttctaaagacattgtcaccgagtgtgtgtgactcaaagatcaagagtgaggctaaactgcgaccccaacatcacttccttcatggaaaggtgttggcgctgatgtagctcatggaaggatcagactgggaaccacagaggaaggatgaggtgggatgtggaggtcagagcatctcacgagagtccctcaggctctgcaacactagattcgaatatgagcctagggtttccccaacacgtgcgtgcatatgaaaccacatcatgattcccgacgtgagttagatgagggagagtttgtgtaactccacacccaggagggtaagccactttattatcatgctttggggctgtgcttaagaatttaagctctgttttaaagccgaagaagaaaacatttgaatttaccttcatatgccactaagaacaaaagctctgaagttcttcctgctggcaccaaatattaggattacaagctgtctctctgacaccagtggtaaaaaagcaagtagaatagtttctgagtctgtgttgcagcctctgacacgtggctcaccgctgtcatttgggggatggaatgaacagtcactgttctatagcatcctcctgtgctcttacctaaggaatctaaattgtcctagccttccattgctatgcactgaatgaggactactctcgtgtgtgtgtgtgtgtgtgtgtgtgtgtgtgtgtgtgtgtgtgtgtgtgttggatctactaacatgtttagcaaatggctctgacagggtggccatgagcagatgagaccagctcttgcttggttggaagccacactgcagtttgcagtttagcctttggtgtctcagtggcttcttgcttattccatgctttttctatcccatcctctctctgtgccctcctgcaatggcagccttggcacaatgcctgggtgtcctcatccttgctttactctggaaagtgtggggatggagaggatggtgcatttccagtgcttccttacctgtcaataacaatggtggccacctgggtcccagcacttggctggtggagagatttttttcattatggagctaataaagggtccctacgttttacattgattaatgaattatcacccagacatgtgcagatgaaatgtcaatataagaaaaatcaaggtatttgggaaacatgggcataatcaggtagttttgctaaaattcctcttccttggtctacataaagaagacatgggtctgtcatagaatggggacattagactgaaaactgggacaacccccttccttattttatagagactaggagttaaggggcctgcctaagattgcagtgataaagaactgaaccctaaatcagctcccactaatgaaaccctgctttccttgtatcttttaaactcagttctgcatccaacttgagaagaaaaaaagcttctttccatatcaagtaccatatgagttcatttaaactgcaccttgcagaaatgcattgccagaaagcaccagtagcctcctatctgcaagcagagtagtgctctgctctggggaggggtcattggaaaccataatgcagagtgggccccctactccatttcccagcaaaaggctccagctggagggatgggttgtggggcaacctggttcctgctaactgccagattgaatgtgtgggctagaatgcctgcacatttagttaaactgggctcagcatgcttgtcctcaaaatgtccatcctggtcacagcacacaagatggctattggtctgcttttaccctaccctgtactatacatgaaaattccagttattaacacactcaaactggtggagcttgttcaccctaggaaggggattgtatatatggcaggcttccctggtgccgatgtaaagggctacatttgggaacatttgacttccttgggactcttaagtgcataatgatggcatgaagtaaaaggggcctcaatgatgataggaaaatcagttcttttaaaatttcttcaagaaaatccaggctatcacatagtctttctgtgtgacttattaggagataggaagagcattgggaaacttgcacagctagctatgcatctacattttggtttggggttagttatgaaatgttcttaatatgacgtgttcaataacttcacataaacttcctgttctccaaaacctcaaagagatagagttaatgagttgttgtttttttttaaatgggggtagttttctatctgtcatgggctctagcatctactccgctacccaattctgtcatctccaagctgagtttcctcttctgaggcagaggctggagcagttctttttcagttctcatcctctccatcccaatccagtatatcaatcaactctaactcggagacgtctagctggcaatgtttctaaaactttcactggatttctttagacattgaagcaaacatttttttctaagaattgcttctcagatgatgatatcaaatgtatatgcttttgcaagtttgaaaagttcaaattaaccacttttgactaggtaagtctttctaaaaaccatttaaagctaactgggtcttagcatcctcctgtgtatggaagagacaggtgaccgctccaggttgggtgctcacagaacccttttcctgactctcatggaagatggtggaaggaaaatagactgtctcatcaaccctcctgtgtcctctgaagcaatctcagtttttattaaccacctcttctgtgtttctggtagctatttaacctgtatttaatctgtacttcctatgccagcctcaattttatttgatttttacaattattctcttctaaccaatgaagtgtttgtcagtatgccccaaagcttgctcttttgtgctcccttttgaataactttctatccagaaaaagagattatttgggacttgagatttgcagtgataccaacttatagcaatgatgtactttaagggaactacccaactatgttgtgatagaagaaagagaaaccttcactttggcatttttttttaatcactgtttatttttctgtttgcggcccaggaagcagtgggaggtggtggcagatatgctttgcatatggattgttatgtttttatttgggcaagtttaatcatggaaaactcaaaaagaaggggggaaatggtcagtttaagccaaaagaaactttctaaacaatgtataggtacacagcaaaattaaacaaatccaacaatttctgaagcttagtgtaattgagtggtggttgttattcaataaaattattcccaaaagtgtttctcctaagagtgcagttcccatgagtcacttcctgaacccattgaccaaaggtggacagagacaatcctgtagaccttgacattcagaaagatgtgagctgcttactgatcatatatgcatacgtttctttacagcagaggaaaccattgtccacaaaactgatgttcttttggggttttatgtacagacttgtccaatcatgtgtgtggttcctgcgagttgctgatgactccgcattgaagctctctgagttctttgattttaagttgggtttatggaattttttcaaatgttggaaggtgtgtggttcttcctgccctccctccccttttggaaatatgaaagcaaatgtttagaagaattccttttgaaaagctgtgtcgtgttccctgtgaaactgagcaggtgtgtgttggcgcgctaagtgccacatgcttgtgtgtagaggaggaggtggccctgccggctccgcgctgctgtgcctgtgatccctacctgctccccgctcctgttgccagcagcactcactgcactcctttgtcatatactctgcatcactgtcatactcacaacttcgtgaataaagttgtgtgctttattcgtagaaaaaaaaaaaa

SEQ ID NO: 3054 - DNA, 3307 bp, Homo Sapiens
  NM_006725
agaccaaaaccacaagcagaacaagcaggcgtgagacactcacaggttgggtttgatcgcatgcgtgtcggagaggagagagcagagagagacacaggaacaagaacagcaaagggtagagcagacctgcgccaggggcgcacaacggccgtgtccacctcccggccccaagatggtgcttcccacaggcagccacgcgtagcagccagagacagctccagacatgtggctcttcttcgggatcactggattgctgacggcagccctctcaggtcatccatctccagccccacctgaccagctcaacaccagcagtgcagagagtgagctctgggagccaggggagcggcttccggtccgtctgacaaacgggagcagcagctgcagcgggacggtggaggtgcggctcgaggcgtcctgggagcccgcgtgcggggcgctctgggacagccgcgccgccgaggccgtgtgccgagcactgggctgcggcggggcggaggccgcctctcagctcgccccgccgacccctgagctgccgcccccgcctgcagccgggaacaccagcgtagcagctaatgccactctggccggggcgcccgccctcctgtgcagcggcgccgagtggcggctctgcgaggtggtggagcacgcgtgccgcagcgacgggaggcgggcccgtgtcacctgtgcagagaaccgcgcgctgcgcctggtggacggtggcggcgcctgcgccggccgcgtggagatgctggagcatggcgagtggggatcagtgtgcgatgacacttgggacctggaggacgcccacgtggtgtgcaggcaactgggctgcggctgggcagtccaggccctgcccggcttgcacttcacgcccggccgcgggcctatccaccgggaccaggtgaactgctcgggggccgaagcttacctgtgggactgcccggggctgccaggacagcactactgcggccacaaagaggacgcgggcgcggtgtgctcagagcaccagtcctggcgcctgacagggggcgctgaccgctgcgaggggcaggtggaggtacacttccgaggggtctggaacacagtgtgtgacagtgagtggtacccatcggaggccaaggtgctctgccagtccttgggctgtggaactgcggttgagaggcccaaggggctgccccactccttgtccggcaggatgtactactcatgcaatggggaggagctcaccctctccaactgctcctggcggttcaacaactccaacctctgcagccagtcgctggcagccagggtcctctgctcagcttcccggagtttgcacaatctgtccactcccgaagtccctgcaagtgttcagacagtcactatagaatcttctgtgacagtgaaaatagagaacaaggaatctcgggagctaatgctcctcatcccctccatcgttctgggaattctcctccttggctccctcatcttcatagccttcatcctcttgagaattaaaggaaaatatgccctccccgtaatggtgaaccaccagcacctacccaccaccatcccggcagggagcaatagctatcaaccggtccccatcaccatccccaaagaagttttcatgctgcccatccaggtccaggccccgccccctgaggactcagactctggctcggactcagactatgagcactatgacttcagcgcccagcctcctgtggccctgaccaccttctacaattcccagcggcatcgggtcacagatgaggaggtccagcaaagcaggttccagatgccacccttggaggaaggacttgaagagttgcatgcctcccacatcccaactgccaaccctggacactgcattacagacccgccatccctgggccctcagtatcacccgaggagcaacagtgagtcgagcacctcttcaggggaggattactgcaatagtcccaaaagcaagctgcctccatggaacccccaggtgttttcttcagagaggagttccttcctggagcagcccccaaacttggagctggccggcacccagccagccttttcagcagggcccccggctgatgacagctccagcacctcatccggggagtggtaccagaacttccagccaccaccccagcccccttcggaggagcagtttggctgtccagggtcccccagccctcagcctgactccaccgacaacgatgactacgatgacatcagcgcagcctaggccggggccagccgaggctcctggggtggctctgaccctctggcctcctgctctacctactccctttcccctttcccaccctcccagctcacctccccatggagctgagaggcctcccttggagagatggaaggaaacgttataccttgtacccctcggtctccatccatcaagccaaacctgctgccacagccctcccccggccccagatagcagccccagggaggatgctgcctccaagaggtgtgagccctctgtctcggggatgaacaagcagagtctgggctacctcttgacagctggtggaggggagttggggagctggactggatgactctggaggccccttccaaacctcaagtgtccggcgctttgattgcctgagtttctgacacttcagggcccagaggtcctgcgaggggcagaactggacccccatgccagtgctgctgcaggagggcccatatactagggtctgctgagctgttgtcactgatcggtgggcgctgggggggtagggtagcacaccagctgtcccaggctttgctccgggcggtaactgcacttgggcagggaatatagccttcctgggcacaactagctgacaatgacaggttgactgtgtacccccaaccaaggagctggggcccaaggccagtcctgccccagagacactccaagtccgccaggggcacagaccagttctgcagtgactgtccctggacaatgggtctttattctgagtttcctatggtttacaaagagggccccagcccagccccaccacagatcccagagataggggcccagtctccatgggggcaaggagcatagagatgttttccaggaaggggctcagaagctgcactaggccccgagtccccatgtgtctccttgaattgatgaggatgctcctgggagggatgcgtgactatgtggtgttgcacccggggctgcaaacgtctccgtgcagcccccagagagaggcccatgggctcagaccaggctttgttgtcctgctctgagtatcctgagattaaactgaattgctgaatgaaaaaaaaaaaaaaaaaaaaa

SEQ ID NO: 3055 - DNA, 10122 bp, Homo Sapiens
  NM_006726
agggaaacttggaggctgcgaccagggtttggcgttgttgtcagcctcggggagagagattggacaaatattctccaagaggaggagggcgacgccaaggactttccacatcaactgctttggggtatctccacaagttggaagagggaccctttcgttttgcattgcgtgtgttgtgctcattaccagtgcagcgactgccgtcccagggtgactctgagttgtcctttatcgtgagctagcaatggctagcgaagacaatcgtgtcccttccccgccaccaacaggtgatgacgggggaggtggagggagagaagaaacccctactgaagggggtgcattgtctctgaaaccagggctccccatcaggggcatcagaatgaaatttgccgtgttgaccggtttggttgaagttggagaagtatccaatagggatattgtagaaactgtctttaacctgttggtaggaggacagtttgatctggaaatgaatttcattatccaagaaggtgagagtattaactgcatggtggacctactggaaaaatgtgacattacgtgccaagcagaagtctggagcatgtttacagccattctgaagaaaagcatacggaatcttcaagtctgcactgaagtaggccttgttgaaaaagtgcttgggaaaattgaaaaagttgacaatatgatagcagatcttttggttgacatgttgggagtgctggctagctataatttgacagttcgcgagctaaagcttttcttcagtaaacttcaaggagataaaggacgatggcctccacatgctgggaagttgctgtctgtgttaaagcatatgcctcagaagtatggtcctgatgccttttttaactttccaggaaagagtgctgcagctattgcattacctcctatagccaaatggccataccagaatggttttacatttcatacatggcttagaatggatcctgtaaataacatcaatgtagataaggataaaccatatttgtattgtttcagaaccagcaaaggtcttggctattctgctcattttgttggaggctgtttgattgtaacatcaataaagtcaaaaggaaaaggctttcaacactgtgtgaaatttgatttcaagccacaaaagtggtatatggttaccatagtacacatctataaccgatggaagaatagtgaacttcgatgttatgtgaatggtgagctggcttcctatggagagataacatggtttgtcaacactagcgatacctttgacaaatgtttcctgggctcatcagaaacagcagatgctaatagagtattctgtggtcagatgactgcagtttaccttttcagtgaagctctaaatgcagctcagatatttgctatttatcagttgggcctgggatacaagggtacatttaaattcaaagcagaaagcgaccttttccttgctgagcatcacaaacttttattgtacgatgggaaactctctagtgccattgcattcacgtacaatccacgggctacagatgcccagctttgtcttgaatcatctcctaaggacaacccttcaatttttgttcattcaccacatgcactcatgctccaggatgtaaaggcagttttaacacattccatccaaagtgcaatgcattcaattggaggagtacaagtactatttccactttttgcacagttggattacaggcaatatttgtctgatgagattgatttgactatatgttcaaccttgctggcctttatcatggaattgttgaagaactcaattgctatgcaggaacagatgcttgcctgtaagggcttcttggtaataggatatagccttgaaaagtcttccaaatctcatgttagcagagcagtacttgaactttgccttgcattttcaaaatatctgagtaatctgcagaatgggatgcccctgctcaagcaattgtgtgatcacgttcttcttaatcctgccatatggattcataccccagccaaggttcaactgatgctctatacttatctgtccacggaattcattggtacagtcaacatatataacaccattcggagagttggaacagtgcttctcatcatgcacacgctgaagtactactactgggcagtgaatcctcaggatcgaagtggtatcaccccaaaaggattagatggaccgcgacctaatcaaaaagaaatgctttctctacgagcattcttgttgatgttcattaagcaattagtgatgaaggattctggagtaaaggaagatgaattacaggccattcttaattacctactgactatgcatgaggatgacaatctaatggatgtcctacagctgcttgttgcattaatgtcagaacaccctaactctatgattcctgcttttgaccaaaggaatgggttacgtgttatctacaaacttctggcatcgaaaagtgaaggaatcagggtacaagctcttaaggcaatgggttattttttaaaacatctggccccaaagaggaaagcagaagtcatgcttggacatggattgttttcattgctagctgaaaggctcatgcttcagacaaatttaatcacaatgaccacatataatgtgctgtttgagattcttatagaacagattggtactcaggtgatacataaacagcatccagatcctgattcttcagtgaagatacaaaaccctcagatactaaaagtaattgcgaccctacttcgaaattctccccagtgcccagagagcatggaggttcgcagagcctttctttctgacatgattaaactttttaataacagtagagaaaacaggaggagcttgctacaatgctctgtgtggcaagaatggatgctttctctctgctattttaatcctaagaattcagatgagcaaaagataacagaaatggtatacgccatattcagaatcctgctttaccatgcagtcaaatatgagtggggtggctggcgtgtatgggtagacactttatcaatcactcattcaaaggtcacttttgaaatacacaaagaaaaccttgccaatatatttagggaacagcaaggaaaagttgatgaagaaatagggctgtgttcttcaacttcagttcaagcagcctctggcattagaagggatattaatgtttcagtaggatcccagcaaccagatacgaaggattctcctgtctgtcctcatttcaccacaaatggtaatgaaaattcaagtatagagaagacaagttcactagaatctgcatctaatattgaactgcaaactactaatacatcttatgaagaaatgaaagctgagcaagaaaatcaggagttaccagatgaaggcactttggaagaaacactgacaaatgagacaaggaatgcagatgatttagaagtatcttctgacataatagaagctgtggctatttcctctaattcttttataacaactggcaaagattcaatgactgtcagtgaagtaactgcttctataagttctccttcagaagaggatgcctcagagatgccagaattcttggataaatctatagtagaggaagaggaagatgatgattatgtggaactgaaagtagaaggcagtcctactgaggaagctaatctacccacagagctccaagataacagtttgtctccagctgcatctgaagccggtgaaaaactggacatgtttggtaatgatgacaaattaatatttcaagaaggaaaacctgttactgaaaagcaaactgatactgaaactcaagattctaaagattctggaattcagactatgacagcatcagggtcttcagctatgtcaccagaaactactgtttcccaaatagctgtagaatcagaccttggtcagatgctggaggaagggaagaaagcaactaacctcactagagaaaccaaattaattaatgattgtcatggtagtgtctctgaggcttcttctgagcaaaagattgcgaagttggatgtttccaatgttgctacagatactgagaggctggagttgaaggccagtcccaacgtggaagcacctcaacctcatcgacatgtgcttgagatatcaaggcaacatgagcagccagggcaaggaatagcaccagatgcagttaatggacaaaggagggattccagatctactgtgtttcgtattcctgagttcaactggtctcagatgcatcaacgtttgctcactgatctattattttcaatagaaacagatatacagatgtggagaagccattcaacaaagacagttatggacttcgtgaatagcagtgataatgtcatctttgtacacaacacaattcatctcatctctcaagtgatggacaatatggtcatggcttgtgggggtatactgccattgctttcagctgctacatcggctacacatgaactggaaaatattgaacctactcaaggcctttcaatagaagcctctgtgacatttttgcagaggctaattagccttgtggatgtgcttatatttgcaagttctcttggctttactgaaattgaagctgaaaaaagtatgtcatctggaggaattttgcggcagtgtctccgactagtttgtgcagtcgcagtaaggaattgcttggagtgtcaacagcattcacaactgaaaactaggggagataaagccttgaaaccaatgcatagccttattcctttagggaaatctgcagcgaagagcccagtggacattgtgactggcggtatatctccagtaagagatcttgacaggcttctacaggacatggatattaatcggcttagggcagttgttttcagagacatagaggatagcaaacaagctcaatttttagccttggcagtagtatactttatctctgttcttatggtctccaagtacagagacattttggaaccccaaaatgaaaggcatagccagtcatgtacagaaactggcagtgaaaatgagaatgtatcactctctgaaatcacaccagcagcattcagcactttaactacggcatcagtggaagaatctgaaagcacatcatctgctcgaaggagggactcaggcattggggaagaaacagccactggtttaggaagccatgtggaagtaactcctcacacagcacctcctggtgtcagtgcaggcccagatgcaatcagcgaggtgctatctactctttctttagaagtcaataagtctccggaaaccaaaaatgatagaggaaatgacttggacactaaggctacaccgtcagtttcagtttcaaaaaacgtcaatgtgaaagacattctccgaagcttggttaacataccagcagatggagtcacagtggatcctgcccttctgccaccagcctgccttggagcccttggtgatctatctgtggaacaacccgtgcagttcagatcttttgacagaagtgtcattgttgcagcaaaaaagtcagcagtctcaccttccacctttaatacaagcatacctaccaatgctgtcagtgtggtttcctcagtagattcagcccaagcctcagatatgggaggagaatcaccaggcagtagatcatctaatgcaaaattgccctcagttccaacagttgattcagtttcacaagatccggtttcaaatatgagtattacagagaggcttgaacacgctttggaaaaggcagctcctctccttcgtgagatttttgtggattttgcaccttttctttctcggacacttttgggtagccatggacaagaactgcttatagaaggaacaagtctggtttgcatgaagtcgagtagttcagttgtggaattggttatgctactgtgttctcaggagtggcaaaattctattcagaagaatgcaggccttgcttttatcgaacttgtcaatgaaggaaggttgcttagccagacaatgaaggatcatctagtaagagtagcaaatgaagctgaatttatcctgagcaggcagagagcagaagatattcacagacatgcggaatttgagtcactgtgtgcccagtattctgcagacaaacgagaagatgagaagatgtgtgatcatttgataagagcagcaaaatatcgtgaccacgtgacagcaactcaactaatccagaaaattatcaacattctcacagacaagcatggagcctggggaaattctgcagtgagtcgtcctcttgagttctggcgccttgactactgggaagatgacttgcggcgccggcgacgatttgtgcgtaaccctctaggatcgacacatcctgaagcgacactaaaaacagccgtggaacatgtgtgcatttttaaattgagagagaacagcaaagccacagatgaagatatccttgctaaaggaaaacagtccatcaggagtcaggctttaggaaatcagaactcagaaaacgagatcctcctggaaggcgatgatgatactctgtcatccgtggatgagaaagatttagagaatcttgccggtcctgttagcctgagcacaccagctcagcttgtggccccctctgttgtagtaaagggcactctttctgtcacctcctccgaactctattttgaggtggatgaagaggatcctaacttcaaaaaaatcgaccccaagatcttggcatatacagaagggctgcatggaaaatggctgttcacagagatacgatcaatcttttctcgtcgttatcttttgcaaaatacagccctggagatctttatggcaaacagagttgctgtgatgttcaacttcccagaccctgcaacagtaaagaaagtggttaactatctacctcgtgttggcgttggaacaagttttggattgcctcaaaccagacgtatttcattagctagtccacgtcagctttttaaggcttctaatatgacccagcgatggcaacacagagagatatctaattttgagtacttgatgtttctcaacacgatagcaggacggagttataatgacttaaatcagtatccagtgtttccttgggtcatcactaattatgaatcagaagaactggatcttaccttgcccaccaacttcagagatttgtccaagccaataggagctctgaacccaaaaagagcagcattcttcgctgagcgttatgaatcatgggaagatgatcaagttccaaagtttcactatggtactcattactcaactgcaagttttgttcttgcatggctgctaagaatagaaccctttacaacttatttcctaaatttgcaaggaggcaaatttgatcatgcagatcgaactttttcatcaatttccagagcttggcgaaacagtcagcgtgatacctctgatattaaggagttgatccctgaattttattatctccctgagatgtttgtcaacttcaataattataatcttggagtgatggatgatgggacagtagtgtctgatgtcgaacttcctccttgggccaaaacctcagaagaatttgttcacataaacagattggccctggagagtgaatttgtttcctgccagcttcaccaatggattgatctcatttttggctataaacagcaaggaccagaagctgtccgagccctcaatgtgttctattacttgacctatgaaggagctgtcaatctgaattcaataactgatcctgtgttgagagaggctgttgaagctcaaatccgaagttttggacagactccttctcaactactcatagagccccatcctcccagaggttctgccatgcaagtgagtccattgatgttcacagacaaagcccagcaggatgttatcatggtcctcaagtttccctccaactcccctgttactcacgtggcagccaacacccagcctggtttggcaactcccgctgtgatcacagtcactgctaacaggttatttgcggtgaacaaatggcacaaccttcctgctcatcaaggtgctgtacaagaccagccataccagctgccagtggaaatcgatcctctcatagccagcaatacaggaatgcacaggaggcaaatcactgaccttttagaccaaagtattcaagtgcattcccagtgctttgtcatcacttcagacaaccgctatattctcgtctgtggcttctgggataaaagtttcagagtctattctacagacacaggaagattgatccaagtggtgtttggccattgggatgtcgtcacttgccttgctcgttctgagtcatatattgggggaaattgctacattctctcagggtcacgtgatgcaactcttttgctgtggtattggaatggaaaatgcagtgggattggagataacccaggcagtgagactgctgctcctcgggccattttgaccggccatgactatgaggtcacatgtgctgcggtgtgtgcggagctaggcctggtgttgagtggttcacaagaaggaccatgtctcatacattccatgaatggagacttgttgaggaccttggagggtcctgaaaactgcctgaaaccaaaactcattcaggcttcaagagagggtcattgtgtcatattctatgaaaacggcctcttctgtacattcagtgtgaatggaaaactccaggccacgatggaaacagatgataacataagagccatccagctgagccgagatgggcagtacctgctcacaggaggagacagaggagtggtcgtggtccggcaggtgtcggacctcaagcagctctttgcctatccaggatgtgacgctggaatccgggccatggcgctgtcttacgaccagaggtgcatcatttctggcatggcttcaggaagcattgtgctattttacaacgactttaaccggtggcatcatgaataccaaacccgctactgatggtgacagctgtacatcaactctgcccctaggatgagcagaagtacctggagcatcattctcttctaccacatctgaatgtaacttaaatttgctcaaagaagcaaaatattttttaaagttattaataattgctatttttgtagtctttgcttgacttttttgggggggattagcaaagcagaaaactggctgctgggttctgtagttttaaaaaatctatatttttagtcataatgagaagtctattttcaccaattatggaaacatacagtggagcaagtaaaccacttattccagctataatattatgaagaacatttcccatgcatctacaagcttgagaaataggattttcacagtggggaagtgggttacaatattggaataggaaaatttgatgctgtaatttgggtcctgtatttttccaaacaactgtgcttcttcagcactaatatttctgggatttaaatagtaatgtttaaattatggtaaatgtaatttaaaacatctcaattaagtctgtctatcaatattgttcttcaagcatgttttagacctagaaaagtatggtttgggggaggctattttattgtgtggttagcacaaggaatctaatttatagcaagtgtgaaatagttaccattttttcctgatctgtcatcttcatagcacaacaaaacgaaatgatggaaatgctcttgagctcacaacatttgtttttcttttaaagtaaatgcaagtaccaaagctcactactgcggtttgcctgtgcctggacaatgaggcggagccactgttgttttgttggggcacccccttccctccccgggtttgcaaatagaggctaccgggtgctgtattcagcaacacctgttttactatttgttattaaactatcatctccaccttccttttgattagcaatttgtactaagaaacgaaacaatgttatttggtggtgtataattctacttttctagtagattactgtgtggaattctgtgaaaaatatttgagaaaaggcctgtattgcataaataaattctttgtatgttgtgaactttgatctctatttctcttgcaacagacttcaagtggtccctctttttttcctacacactcagctcttctctaaaagcaaggatttggaatgaacaattcagtttgacagaaaaagctgaataaaatggcatctgtaattgaattgttggaaatgccttttttgctcctaaattttaaacatcattaataaaataatgattcacaaagaaagaaaaaaaaaa

SEQ ID NO: 3056 - DNA, 4983 bp, Homo Sapiens
  NM_006729
ctcggctgcgggagtaggaagcagctttgcgcgcccgggcggccgatgcgggcactttgaagaatcacgtgtgttgaggccctcttaaagagataggcacctacttttccctccaccctaaacaccgccctgagggcggcggcgaccgtggtaattgcaactgctcaggggcagggcttgccccagcgccgagtagtggcaacggcgtggttgcgtcgggggtgcctgggagcctggagtcccgggggcctgaaatcggcagcttcccgggcagacactctctccctcaggaagaggtgccgccgagtcagcgcggggcagtgtgagcgccccgaggtgctttctcagttgaggagaggtggggttacagggcacaggtgacagggccggagaaagatggagcagcccggggcggcggcgtcgggagcgggaggcggcagcgaggaacccggtgggggccggagcaacaagcggagcgcggggaaccgggccgccaatgaagaggaaacgaaaaacaaacccaaattgaacattcaaataaaaactttggcagatgatgtgcgtgaccgaattacaagttttagaaaatctactgtcaaaaaagaaaaacctcttattcaacatcctattgattctcaagtcgcgatgagtgagtttcctgcagctcagccattatatgatgaacgatctttgaatttgtcagaaaaggaagtattggatctctttgaaaaaatgatggaggacatgaaccttaacgaagagaaaaaagctcctttacgaaacaaagactttaccaccaaacgtgagatggttgtccagtatatttctgccactgccaaatctggtgggctgaaaaacagcaaacatgaatgcaccctgtcttcacaagaatatgttcatgaattacgatcgggtatatcagatgagaaacttcttaattgcctagaatccctcagggtttctttaaccagcaatccggtcagctgggttaacaactttggccatgaaggtcttggactcttattggatgagctggaaaagcttctggacaaaaaacagcaagaaaatattgacaagaagaatcagtataaacttattcaatgcctcaaagcatttatgaataataagtttggattacaaaggattctaggagatgaaagaagtcttttactattggcaagagcaattgaccccaaacaacccaacatgatgactgaaatagtaaaaatactttctgctatttgcattgttggagaagagaacattctagataaacttttaggggctataacaacagcagcagaaagaaataacagggaacgattttcaccaattgtggaaggtttagaaaatcaggaagccttgcaattacaggtggcctgcatgcagtttataaatgcccttgtcacttctccttatgagcttgattttcgaatacatttaaggaatgaattcctccgttcaggactaaaaacaatgttaccagatctaaaagaaaaagagaatgatgagcttgatattcagttgaaagtatttgatgaaaacaaagaagatgacctaactgaattatcacaccgtctcaatgacattcgagcagaaatggatgatatgaatgaagtctaccatcttctatataatatgctgaaggacactgctgctgaaaattacttcttatctattctacaacattttttgcttatcagaaatgattattatatcaggccacaatattataaaataattgaggaatgtgtttcacagatagtgctacactgcagtggtatggatccagacttcaaatacaggcaaagattagacatcgatttaactcatctgatagattcttgtgtgaacaaggcgaaagttgaagaaagtgaacaaaaagctgcagagttttcaaagaagttcgatgaagaattcacagctcgacaggaagctcaagcagagcttcaaaaaagagatgagaaaatcaaagaacttgaagcagaaatccagcaacttcgaacccaggcacaagtactctcaagttcatcaggaattccaggtcctcctgcagcacctccattgccaggtgtagggccgcctccaccaccacccgcgccacctctacccggaggagctcctcttcctcctccaccacctcctttacctggaatgatggggataccaccaccacccccaccaccacttttatttgggggacctcctccaccaccaccccttggaggagttcctcctcccccaggaatatcacttaatctaccttatggaatgaagcagaaaaaaatgtataaacctgaagtgtccatgaagagaatcaattggtcaaagattgaacccacagaattatctgagaactgtttctggttaagagtcaaagaagacaagtttgagaatccagatctctttgccaaattggcattgaattttgctactcagataaaagttcaaaagaacgcagaagcattagaagaaaagaagactgggcctacaaagaagaaagtgaaagaactgagaattttggatcccaaaacagctcagaatctgtccatctttctgggatcatatcgcatgccatatgaagacataagaaacgttattctggaggttaatgaagacatgctgagtgaggctttaattcagaaccttgtgaaacatcttcctgagcagaagatactcaacgaattagcagagcttaagaatgaatatgatgacctctgtgagcctgaacaatttggagttgtgatgagctctgtgaaaatgttacagcctcgtctcagtagtatcctgttcaagctcacatttgaagaacacataaacaacatcaaaccaagcatcatagcagtaactcttgcctgtgaagaactgaagaaaagtgaaagctttaacagacttttagagttagttcttcttgttggaaactacatgaactcaggctcaagaaatgcccagtctttgggatttaagatcaacttcctttgtaagatcagagatactaaatcagcggatcaaaaaacaacccttttgcattttattgccgacatttgtgaggaaaaatatcgagatatcctaaaatttcctgaagaactggaacacgtagaaagtgcaagcaaagtttcagctcaaattctcaagagcaaccttgcatcaatggaacaacaaattgttcatctggaacgtgacatcaagaaattcccccaagcagaaaatcaacacgataagtttgtggaaaagatgaccagctttacaaagactgcccgagaacagtatgaaaaactctccaccatgcacaacaacatgatgaagctctatgagaatcttggagaatacttcatttttgactcaaagacagtgagcatagaagagttctttggtgatctcaacaacttccgaactttgtttttggaagcagtgagagaaaacaataagagaagagaaatggaagagaagaccaggagggcaaaacttgcaaaagagaaagctgaacaagaaaagttagaacgccagaagaaaaagaaacaactcattgatataaacaaagagggtgatgagactggtgtgatggataatcttctagaagccctacaatcaggtgcagcattcagagaccgtcgaaagcggattccaaggaatccagataacagacgagtacctttggaaaggtcacgctctcgccacaatggagctatctcatctaagtgattcctgatgccaaagaatatgaaaatatttaagtaaaaacaaaatgatgcattttgagaagaacaaagtgtgcactcagcggctggaaaggaaataagtgcatttctgcaaagatcaagataagctggatgaagtagtgtgcatttgtaatactattgcaagactcctcccacaattattctaatctgaacacagttatcaggattacaaaatgtgttccattttagtgtaaagatgtgtatcatttgtaattgtgtgtgacctgactgtgatgatggaagtgtaagaaattgaagagttctaaggctttcaaaaacactcagtcaaaaatttaaaatcttaaatgtgtaagtcacccccaccaaaaacaaaagagaagaaaaagaatagaaagaattatccagtgtcagcttccaatccctagtacatatataatagaaaagggccaagaaaaatatgcatcttgatttggagagaggctaatattatgcacactgtaagagaagccattttggaaattcacgaaagtactgctccaccccagttgagttatttagaattttatctcaagtgaaagctgatggattcatctgctttggctgaaattaaacttatcattagtctagctagcatttcagcatgatattgcaagcacttctcattgctaaaaataaataaaccaaagtttaaccgaatcagttagggaaagtgatttaaactttatttaaagaggtattttctaattatgcacagatatctactttatacaaatactttatatggctatttttgagaaaaccctcacattttaatgtttatgctagggatgaacctgaaaattctattacgtttatttagatttcaaaggcaaatattgattcctatgctctgtggtttatttcttttttctattgcttctttctcccttgagtcccttgaaggcagggaatagacttctagaaaacctgagaggaaaaagaattctttttacaggaggcagcagaaaactgtctgaaaggtcaattgttttatctccctttccactctctttccaatttcactttggtggtctgaagaagaaaaagaaattttatgtatgtatgtgtaaatatgtgtatatatttctatctcttgctacaataattccaactaagtgaacttctcaattatcatcatacttacttaccttatattaacaaattaagatgatgctgccaaaacaagtctagcagggaaaacaggttctacatttttcttaaataaattagggagtaaaagtta

SEQ ID NO: 3057 - DNA, 3147 bp, Homo Sapiens
  NM_006730
ggctcaggaacacagcctcttcctcttttttttcccctcctagccctattcaggcaggagctgctcttctggggtatcgcgatccacttaaggatgaggcagacttggtgacaagctggtctgagcaggtatgggagccccctggggagacggaagaagggaggaagttgccttctgcctggggagggtttgagagggagagggaagcctagggctcccaccaaggctgatattgacagccagggtttggggctgaagccaggaaccgtcactctctctggttcttactggtagccctcatgggggtccctgacgccagagcctccaaggctgcatgtgccagcccagggctgcccacatacccatgtatatcccagaataggcaccagggtagggaacccaaactagcatgagtgacagagcaggtggtcagggagaaacagacatcaaacccagccaggagagagacaccgcaacagagagacagagaagggaaaccagagacgagagggaaagtgagacagagacggacagagcctcagagaggtaggaagtgagcccgaagggaaggtgacaggttgatagagaaaagcaggcagacagagcagaggaactcatgcctcaggatgcaaaagccacatggacagggcgtggagcaaggagccgagccctgcaaggtcagcgcttccagagccagaactgagcccagtgagagcgcaccctggagcagcctggattcctggggtgtccccggcagccacacacagccatgcactacccaactgcactcctcttcctcatcctggccaatggggcccaggcctttcgcatctgcgccttcaatgcccagcggctgacactggccaaggtggccagggagcaggtgatggacaccttagttcggatactggctcgctgtgacatcatggtgctgcaggaggtggtggactcttccggcagcgccatccccctcctgcttcgagaactcaatcgatttgatggctctgggccctacagcaccctgagcagcccccagctggggcgcagcacctacatggagacgtatgtgtacttctatcggtcacacaaaacacaggtcctgagttcctacgtgtacaacgatgaggatgacgtctttgcccgggagccatttgtggcccagttctctttgcccagcaatgtccttcccagcctggtgttggtcccgctgcacaccactcctaaggccgtagagaaggagctgaacgccctctacgatgtgtttctggaggtctcccagcactggcagagcaaggacgtgatcctgcttggggacttcaatgctgactgcgcttcactgaccaaaaagcgcctggacaagctggagctgcggactgagccaggcttccactgggtgattgccgatggggaggacaccacagtgcgggccagcacccactgcacctatgaccgcgtcgtgctgcacggggagcgctgccggagtctgctgcacactgcggctgcctttgacttccccacgagcttccagctcaccgaggaggaggccctcaacatcagtgaccactaccccgtggaggtggagctgaagctgagccaggcgcacagcgtccagcctctcagcctcactgttctgttgctgctatcactcctgtcccctcagctgtgccctgctgcctgagcgtccccctacccccccagggcctgctgccttttgggacttaaaccccagcctcccccgtccatccagccctggggctggggggcttcaactatagttgccctgtgactgtagtccacccctgcctgccttgtttgatttggctcttgttctttggttgggcttgtgcctagattaggagaggaagccaggggccctgcactcatgccacctgccaggtagtgtagtatcaggagtggagacaaagtgggctctgggttggggtaggggaagggagggttcagaaagaggaatgaagatgttgtatgacaagaaggaaagttactgagaacaaaaacccagattggtgagataggacacttgtgcagcagatatgccaatgggccatgtttattgtggattggtaagaatcaccaggaaaccattaagccccaatagctacaaggagggtggttaatctgctatatcaaactccttccctgaaaccagcaaacaccgggaaacattttggctcattataatccggtgaacaatgcagtcaggcctgttataaccgctgagcagccacactcgcacctcctgggtgctgtagtctgtgttggtacaggcttctgcatgcctggtaaagtccagccaaggctggtcaaggcaacatctccacacagaaaatctgcaccagttatgtaagctaaaaagctgtgtgaacccaggtgtcccggaaaggggctgcaggacacagcaaaatgccagcagcgtgccggacccctcccttccatcctcctctccaaagaacagaggtcaggaaaaacactggctgggacgctagaagggtcatgtgttaactataatcacatttatggtttggaaccatcaccccaaggtaaaaaaaaaataaaaggtattcccaggtatgtttggcaaaataaaataaaggtaattaaaaacctaagaaatggctgtaaactgagattacaaaaaaccagaggccttttgggagccacaggctgggggctggggccaacataccccagctctgggaccaaaagcctttggagtcctgtccctggatacagatgctcaggccacccacctagcactcctctcatttttgctgctcccccaaaagccagcgctgttctacaatagttcaggtcagacatctaagatccccaggccaaaccatgccacacacgtgtctgttccgaggtcttgttacaaatgaccaaaggttagcctagacctttggtcaggtggtgaaggccctgggaatgcaggttctagaaggggtgggggcatggggcccaggaggttgctagagataggaaatggggcaaatcgcaggtgacctcagcagtacctggatgattcccaccaaggaggaatggccaaaccagatgggtgagaacaagcccaatgtgatgcacacctacccttgctaaataaacgctgctggtcagcctctagcccac

SEQ ID NO: 3058 - DNA, 3776 bp, Homo Sapiens
  NM_006732
cattcataagactcagagctacggccacggcagggacacgcggaaccaagacttggaaacttgattgttgtggttcttcttgggggttatgaaatttcattaatctttttttttccggggagaaagtttttggaaagattcttccagatatttcttcattttcttttggaggaccgacttactttttttggtcttctttattactcccctccccccgtgggacccgccggacgcgtggaggagaccgtagctgaagctgattctgtacagcgggacagcgctttctgcccctgggggagcaacccctccctcgcccctgggtcctacggagcctgcactttcaagaggtacagcggcatcctgtgggggcctgggcaccgcaggaagactgcacagaaactttgccattgttggaacgggacgttgctccttccccgagcttccccggacagcgtactttgaggactcgctcagctcaccggggactcccacggctcaccccggacttgcaccttacttccccaacccggccatagccttggcttcccggcgacctcagcgtggtcacaggggcccccctgtgcccagggaaatgtttcaggctttccccggagactacgactccggctcccggtgcagctcctcaccctctgccgagtctcaatatctgtcttcggtggactccttcggcagtccacccaccgccgccgcctcccaggagtgcgccggtctcggggaaatgcccggttccttcgtgcccacggtcaccgcgatcacaaccagccaggacctccagtggcttgtgcaacccaccctcatctcttccatggcccagtcccaggggcagccactggcctcccagcccccggtcgtcgacccctacgacatgccgggaaccagctactccacaccaggcatgagtggctacagcagtggcggagcgagtggcagtggtgggccttccaccagcggaactaccagtgggcctgggcctgcccgcccagcccgagcccggcctaggagaccccgagaggagacgctcaccccagaggaagaggagaagcgaagggtgcgccgggaacgaaataaactagcagcagctaaatgcaggaaccggcggagggagctgaccgaccgactccaggcggagacagatcagttggaggaagaaaaagcagagctggagtcggagatcgccgagctccaaaaggagaaggaacgtctggagtttgtgctggtggcccacaaaccgggctgcaagatcccctacgaagaggggcccgggccgggcccgctggcggaggtgagagatttgccgggctcagcaccggctaaggaagatggcttcagctggctgctgccgcccccgccaccaccgcccctgcccttccagaccagccaagacgcaccccccaacctgacggcttctctctttacacacagtgaagttcaagtcctcggcgaccccttccccgttgttaacccttcgtacacttcttcgtttgtcctcacctgcccggaggtctccgcgttcgccggcgcccaacgcaccagcggcagtgaccagccttccgatcccctgaactcgccctccctcctcgctctgtgaactctttagacacacaaaacaaacaaacacatgggggagagagacttggaagaggaggaggaggaggagaaggaggagagagaggggaagagacaaagtgggtgtgtggcctccctggctcctccgtctgaccctctgcggccactgcgccactgccatcggacaggaggattccttgtgttttgtcctgcctcttgtttctgtgccccggcgaggccggagagctggtgactttggggacagggggtgggaaggggatggacacccccagctgactgttggctctctgacgtcaacccaagctctggggatgggtggggaggggggcgggtgacgcccaccttcgggcagtcctgtgtgaggattaagggacgggggtgggaggtaggctgtggggtgggctggagtcctctccagagaggctcaacaaggaaaaatgccactccctacccaatgtctcccacacccaccctttttttggggtgcctaggttggtttcccctgcactcccgaccttagcttattgatcccacatttccatggtgtgagatcctctttactctgggcagaagtgagccccccccttaaagggaattcgatgcccccctagaataatctcatccccccacccgacttcttttgaaatgtgaacgtccttccttgactgtctagccactccctcccagaaaaactggctctgattggaatttctggcctcctaaggctccccaccccgaaatcagcccccagccttgtttctgatgacagtgttatcccaagaccctgccccctgccagccgaccctcctggccttcctcgttgggccgctctgatttcaggcagcaggggctgctgtgatgccgtcctgctggagtgatttatactgtgaaatgagttggccagattgtggggtgcagctgggtggggcagcacacctctggggggataatgtccccactcccgaaagcctttcctcggtctcccttccgtccatcccccttcttcctcccctcaacagtgagttagactcaagggggtgacagaaccgagaagggggtgacagtcctccatccacgtggcctctctctctctcctcaggaccctcagccctggcctttttctttaaggtcccccgaccaatccccagcctaggacgccaacttctcccaccccttggcccctcacatcctctccaggaagggagtgaggggctgtgacatttttccggagaagatttcagagctgaggctttggtacccccaaacccccaatatttttggactggcagactcaaggggctggaatctcatgattccatgcccgagtccgcccatccctgaccatggttttggctctcccaccccgccgttccctgcgcttcatctcatgaggatttctttatgaggcaaatttatattttttaatatcggggggtggaccacgccgccctccatccgtgctgcatgaaaaacattccacgtgccccttgtcgcgcgtctcccatcctgatcccagacccattccttagctatttatccctttcctggtttccgaaaggcaattatatctattatgtataagtaaatatattatatatggatgtgtgtgtgtgcgtgcgcgtgagtgtgtgagcgcttctgcagcctcggcctaggtcacgttggccctcaaagcgagccgttgaattggaaactgcttctagaaactctggctcagcctgtctcgggctgacccttttctgatcgtctcggcccctctgattgttcccgatggtctctctccctctgtcttttctcctccgcctgtgtccatctgaccgttttcacttgtctcctttctgactgtccctgccaatgctccagctgtcgtctgactctgggttcgttggggacatgagattttattttttgtgagtgagactgagggatcgtagatttttacaatctgtatctttgacaattctgggtgcgagtgtgagagtgtgagcagggcttgctcctgccaaccacaattcaatgaatccccgacccccctaccccatgctgtacttgtggttctctttttgtattttgcatctgaccccggggggctgggacagattggcaatgggccgtcccctctccccttggttctgcactgttgccaataaaaagctcttaaaaacgca

SEQ ID NO: 3059 - DNA, 2568 bp, Homo Sapiens
  NM_006739
accgcctcttgtttttcccgcgaaactcggcggctgagcgtggaggttcttgtctcccctggtttgtgaagtgcggaaaaccagaggcgcagtcatgtcgggattcgacgatcctggcattttctacagcgacagcttcgggggcgacgcccaggccgacgaggggcaggcccgcaaatcgcagctgcagaggcgcttcaaggagttcctgcggcagtaccgagtgggcaccgaccgcacgggcttcaccttcaaatacagggatgaactcaagcggcattacaacctgggggagtactggattgaggtggagatggaggatctggccagctttgatgaggacctggccgactacttgtacaagcagccagccgagcacctgcagctgctggaggaagctgccaaggaggtagctgatgaggtgacccggccccggccttctggggaggaggtgctccaggacatccaggtcatgctcaagtcggacgccagcccttccagcattcgtagcctgaagtcggacatgatgtcacacctggtgaagatccctggcatcatcatcgcggcctctgcggtccgtgccaaggccacccgcatctctatccagtgccgcagctgccgcaacaccctcaccaacattgccatgcgccctggcctcgagggctatgccctgcccaggaagtgcaacacagatcaggctgggcgccccaaatgcccattggacccgtacttcatcatgcccgacaaatgcaaatgcgtggacttccagaccctgaagctgcaggagctgcctgatgcagtcccccacggggagatgcccagacacatgcagctctactgcgacaggtacctgtgtgacaaggtcgtccctgggaacagggttaccatcatgggcatctactccatcaagaagtttggcctgactaccagcaggggccgtgacagggtgggcgtgggcatccgaagctcctacatccgtgtcctgggcatccaggtggacacagatggctctggccgcagctttgctggggccgtgagcccccaggaggaggaggagttccgtcgcctggctgccctcccaaatgtctatgaggtcatctccaagagcatcgccccctccatctttgggggcacagacatgaagaaggccattgcctgcctgctctttgggggctcccgaaagaggctccctgatggacttactcgccgaggagacatcaacctgctgatgctaggggaccctgggacagccaagtcccagcttctgaagtttgtggagaagtgttctcccattggggtatacacgtctgggaaaggcagcagcgcagctggactgacagcctcggtgatgagggacccttcgtcccggaatttcatcatggagggcggagccatggtcctggccgatggtggggtcgtctgtattgacgagtttgacaagatgcgagaagatgaccgtgtggcaatccacgaagccatggagcagcagaccatctctatcgccaaggctgggatcaccaccaccctgaactcccgctgctccgtcctggctgctgccaactcagtgttcggccgctgggatgagacgaagggggaggacaacattgacttcatgcccaccatcttgtcgcgcttcgacatgatcttcatcgtcaaggatgagcacaatgaggagagggatgtgatgctggccaagcatgtcatcactctgcacgtgagcgcactgacacagacacaggctgtggagggcgagattgacctggccaagctgaagaagtttattgcctactgccgagtgaagtgtggcccccggctgtcagcagaggctgcagagaaactgaagaaccgctacatcatcatgcggagcggggcccgtcagcacgagagggacagtgaccgccgctccagcatccccatcactgtgcggcagctggaggccattgtgcgcatcgcggaagccctcagcaagatgaagctgcagcccttcgccacagaggcagatgtggaggaggccctgcggctcttccaagtgtccacgttggatgctgccttgtccggtaccctgtcaggggtggagggcttcaccagccaggaggaccaggagatgctgagccgcatcgagaagcagctcaagcgccgctttgccattggctcccaggtgtctgagcacagcatcatcaaggacttcaccaagcagaaatacccggagcacgccatccacaaggtgctgcagctcatgctgcggcgcggcgagatccagcatcgcatgcagcgcaaggttctctaccgcctcaagtgagtcgcgccgcctcactggactcatggactcgcccacgcctcgcccctcctgccgctgcctgccattgacaatgttgctgggacctctgcctccccactgcagccctcgaacttcccaggcaccctcctttctgccccagaggaaggagctgtagtgtcctgctgcctctgggcgcccgcctctagcgcggttctgggaagtgtgcttttggcatccgttaataataaagccacggtgtgttcaggtaaaaaaaaaaaaaaaaaaaaaaa

SEQ ID NO: 3060 - DNA, 2214 bp, Homo Sapiens
  NM_006745
cccggctccacccccaagccaggcgaggcaggttccgaggttggaacacctggcgagtcctcggtgtcggtggccggcagtcatctcgcggccgttcagaattataaggctgtctgcagagatttgaaaaatggcaacaaatgaaagtgtcagcatctttagttcagcatccttggctgtggaatatgtagattcacttttacctgagaatcctctgcaagaaccatttaaaaatgcttggaactatatgttgaataattatacaaagttccagattgcaacatggggatcccttatagttcatgaagccctttatttcttattctgtttacctggatttttatttcaatttataccttatatgaaaaaatacaaaattcaaaaggataagccagagacatgggaaaaccaatggaagtgtttcaaagttcttctctttaatcacttctgtatccagctgcctttgatttgtggaacctattattttacagagtatttcaatattccttatgattgggaaagaatgccaagatggtattttcttttggcaagatgctttggttgtgcagtcattgaagatacttggcactattttctgcatagactcttacaccacaaaagaatatacaagtatattcataaagttcatcatgagtttcaggctccatttggaatggaagctgaatatgcacatcctttggagactctaattcttggaactggatttttcattggaatcgtgcttttgtgtgatcatgtaattcttctttgggcatgggtgaccattcgtttattagaaactattgatgtccatagtggttatgatattcctctcaaccctttaaatctgatccctttctatgctggttctcggcatcatgatttccaccacatgaacttcattggaaactatgcttcaacatttacatggtgggatcgaatttttggaacagactctcagtataatgcctataatgaaaagaggaagaagtttgagaaaaagactgaataaatatctcacgtaaaccttcctgaaagataaacgttttcctgaattcagaaactagtagctaacattgcttctggagagcagaaataagcatgtcttctggctactaagtgataaaaagaacattaacaacctttaattaccttcctagtgggaactttttctactttacctacaagttctatatatgtagaaatgaataaatatatatttaagtacagttttcatgaggaagttttaaaagaccatgttcctaagcttccaagaaggttttggatactagaagtattaatctatggcttttctcccagtaaaaccataggcctgaagttcacattgggtctttaaatcttttagatatatactggtcatttcagaaaattcttcatagtggtattggccttatatttaactttttttttattttttttttgagacaaagccacactctgtctccttggctggagtgtggtggcacagtctcagctcactgcaacctctgcctcccagttcaagcaattcttctgcctcagcctcccaagtagctgggattacaggcacccgccaccacgcccagctaatttttgtatttttgtagagatggggtttcacgatgttggccaggctggtctcaaacttctgacctcaagtgatctgcccaccttggcctcccaaagtgctgggattacaggtgtaagccactgcgcccggcctttttaactttaaacatgttttagaattcacctaaagatcaaaatatcatggattgaacctcatcaattgatagcagtgagtgactgaagcttccaaatcaagaaaagccggcaccaagaacttccattctaatctagagctgaccagtttgagctgattctctctttgaagagtccttcttgattgcagtgcagtactggcatttctgaatggatgtaagtggagtattttagtctaaaggcttttcaaattacttgaatttttttaaaaattgaggagctttatttctatttacccttccatttttgtatatcaaatttccattgtcattaaaaactgtatcttgaaactttgtgaactgacttgctgtatttgcactttgagctcttgaaataaatgtgatttttgtgtgattaaaacaaaaaaaaaaaaaaaaaaaaaaaaaaaaaaaaaaaaaaaaaaaaaaaaaaaaaaaaaaaaaaaaaaaaaaa

SEQ ID NO: 3061 - DNA, 2872 bp, Homo Sapiens
  NM_006748
aaccaatcttcaccaatctcatcttcacatataaacagccgcctttcaagaagcaagctgccagaaaaatgatgcacgatgctctctaaactgggtcattctccacttggagggctcagggcacggttgactttccccgtctgtctcctataccacaggctctgggcatcaccagcggccccagggaaaaagaaagaaatgggaaacagcatgaaatccacccctgcgcctgccgagaggcccctgcccaacccggagggactggatagcgacttccttgccgtgctaagtgactacccgtctcctgacatcagccccccgatattccgccgaggggagaaactgcgtgtgatttctgatgaagggggctggtggaaagctatttctcttagcactggtcgagagagttacatccctggaatatgtgtggccagagtttaccatggctggctgtttgagggcctgggcagagacaaggccgaggagctgctgcagctgccagacacaaaggtcggctccttcatgatcagagagagtgagaccaagaaagggttttactcactgtcggtgagacacaggcaggtaaagcattaccgcattttccgtctgcccaacaactggtactacatttccccgaggctcaccttccagtgcctggaggacctggtgaaccactattctgaggtggctgatggcctgtgctgtgtgctcaccacgccctgcctgacacaaagcacggctgccccagcagtgagggcctccagctcacctgtcaccttgcgtcagaagactgtggactggaggagagtgtccagactgcaggaggaccccgagggaacagagaacccgcttggggtagacgagtcccttttcagctatggccttcgagagagcattgcctcttacctgtccctgaccagtgaggacaacacctcctttgatcgaaagaagaaaagcatctccctgatgtatggtggcagcaagagaaagagctcattcttctcatcaccaccttactttgaggactagccaagaacagacacaatggttcatgcccaaaaggaacagaagttccaactattgcctgggatcttgcgaaaagcgaggttccctgatccctgggagcctcacgtattttagaagccaagagaagccacatggagactcaaattcgcatcttctctatccacatcatgaccaaaggaacccctccctggtgtctgatcagggctgtggcatcacgaaacattggatcatgacatgtcgggcgatgcttggaagagcccagcatgtatgtatgcacacattgtgtgtgtgggaaggacaaagccactctcacaagaaagggcaccaggactgctctccaaggaactggacctgtccagacagttacactccaaggtcattggagagaacttctgtatgggcaagcctgagagggagaggaaacaaaagctgtgtcctggcagaaggtctgggtttgcagatgggtgccctgaatggaactactttaactaatccatagggacttctggtatgctttcctctctttttaaaggaacttcgtgacactaaacattagcccaaaggacttcttagccttcaattgggagatacctttggtctgctcctgcaccaaagccatatgggtggaagtcagttggcctccctggttctgcagagggccagaagaatgagagagaggaagactgctggcagggaaatcgaggaggcgagactagaactgcaccagcttccctgatgtctgcagccatggctttgcagcgcagacagagcttctctgggatgctgggattcttgcctgtatgaatgcatcaagtattcatttattgcccgaataggcattgcattaagtcctctgtaaggtgtcaggcaagccaaaaaaaaaaaaaagatgcgtaagtcctaacccccaacagaggtgttcacagtgtagacagggaaaaaatgtataaacaaatgtgtaaaaagagaaatcagctcatggcttaggatggaattagagacaggtgagggacactcaggagctcattttccagctgctcttcagagtggaagggctggctggatcgggtaggtaagaatagctggattttttagaaaagaaatggatacagtctaaagaattaactcacccggtactttattctaagaagggtctggcatccatatgaggaaaaatgctcagctccaggaaagatggggagtccaagtggattaatgatgtcatgcataattttaagagacaagggagaaaacacaatgtatagccagagaaggagaagctcccatccaaatcctactaggaagagagtgggctgcagatgaatctgtgactcatgtttccctgtttcaaagggatcctggggaaggaggggaacatgcttgcagtatctctccctgtctgtctgctcacataagcattccgtccatctgagctcatcgtgctactggtatgtgtatgtgcagttacacagttttctgtatcatagattctagtgtgtttatacaaggagacatctgtggtttccccaaccgttccaaaaggctatttcaaaggaaccagccaacgtatgagaaatgaatgtaacactgtggacattgacttcccgcataaggcagggtgaccccctgaactccagatgtctgcacagtatcttatgtgttgttttccgttgtgacgaatgtgattggaacatttggggagcacccagagggatttctcagtgggaagcattacactttgctaaatcatgtatttattcctgattaaaacaaacctaataaatatttaacccttggcaaaaaaaaaaaaaaaaaaaaaaaaaaaaaaaaaaaaaaaaaaaaaaaa

SEQ ID NO: 3062 - DNA, 3685 bp, Homo Sapiens
  NM_006749
gcttccggaagcgggcgactcgcagctccacgcgacgccgaggggctccgcgccgggaccgggcgggtgctcggagtttcggggaccgcacgggaccgagggcaggaggagacatcacagctttcccagatcgggaggaaaaatatggaatgtgttttaccgctgactgaacacaaccaaatgaactgtcctgacagtagtttgcaaaccagcagctagcagtttgtccagcctctaacattgtccagcactttccagagcaaactcactgtttacaagaactcttggccttacgaagtttataacctcaagctttgtttatttaaaatattcctgcaaaagaaaagtacccggcacccactttccaaaatggccatggatgagtatttgtggatggtcattttgggtttcatcatagctttcatcttggccttttctgttggtgcaaacgatgttgccaactcctttggtacagccgtgggctctggtgtggtgaccttgaggcaggcatgcattttagcttcaatatttgaaaccaccggctccgtgttactaggcgccaaagtaggagaaaccattcgcaaaggtatcattgacgtgaacctgtacaacgagacggtggagactctcatggctggggaagttagtgccatggttggttccgctgtgtggcagctgattgcttccttcctgaggcttccaatctcaggaacgcactgcattgtgggttctactataggattctcactggtcgcaatcggtaccaaaggtgtgcagtggatggagcttgtcaagattgttgcttcttggtttatatctccactgttgtctggtttcatgtctggcctgctgtttgtactcatcagaattttcatcttaaaaaaggaagaccctgttcccaatggcctccgggcactcccagtattctatgctgctaccatagcaatcaatgtcttttccatcatgtacacaggagcaccagtgctcggccttgttctccccatgtgggccatagccctcatttcctttggtgtcgccctcctgttcgctttttttgtgtggctcttcgtgtgtccgtggatgcggaggaaaataacaggcaaattacaaaaagaaggtgctttatcacgagtatctgacgaaagcctcagtaaggttcaggaagcagagtccccagtatttaaagagctaccaggtgccaaggctaatgatgacagcaccatcccgctcacgggagcagcaggggagacactggggacctcggaaggcacttctgcgggcagccaccctcgggctgcatacggaagagcactgtccatgacccatggctctgtgaaatcgcccatctccaacggcaccttcggcttcgacggccacaccaggagcgacggtcatgtgtaccacaccgtgcacaaagactcggggctctacaaagatctgctgcacaaaatccacatcgacaggggccccgaggagaagccagcccaggaaagcaactaccggctgctgcgccgaaacaacagttacacctgctacaccgcagccatttgtgggctgccagtgcacgccacctttcgagctgcggactcatcggccccagaggacagtgagaagctggtgggcgacaccgtgtcctactccaagaagaggctgcgctacgacagctactcgagctactgtaacgcggtggcagaggcggagatcgaggcggaggagggcggcgtggagatgaagctggcgtcggagctggccgaccctgaccagccgcgagaggaccctgcagaggaggagaaggaggagaaggacgcacccgaggttcacctcctgttccatttcctgcaggtcctcaccgcctgtttcgggtcctttgctcacggcggcaatgacgtgagtaatgccatcggtcccctggtagccttgtggctgatttacaaacaaggcggggtaacgcaagaagcagctacacccgtctggctgctgttttatggaggagttggaatctgcacaggcctctgggtctgggggagaagagtgatccagaccatggggaaggacctcactcccatcacgccgtccagcggcttcacgatcgagctggcctcagccttcacagtggtgatcgcctccaacatcgggcttccagtcagcaccacgcactgtaaggtgggctcggtggtggccgtgggctggatccgctcccgcaaggctgtggactggcgcctctttcggaacatcttcgtggcctggttcgtgaccgtccctgtggctgggctgttcagcgctgctgtcatggctcttctcatgtatgggatccttccatatgtgtgatttgtcttcttccagctgcaaacagctaaagggatggtctggtgttggcgtgtgggagacatgtgtgctcgtgccacacatacacatcctggccgtgcacggctctctcatgaccagctctctgcctcccttccaggaggctccatcccacactgttcacccaggctgcggagactcaccttcccgagctaacttaactactgtacataataatatgtattaaactggtatcgtggtgatataatgtggtgcagttacttatatattaaatatctattgtatccatagaataggcagcattatttcaaacatattcaagttgggagtggagatcattgcctagaagtcaatattcaataaatcttgtacataactatttcgatggcaaatgttaagccttctaaaaggaaagtgtagattggaaaatgattttttttccaaatgatgtttttgccttctaatatactgtaaggtaatgagcttcagaacaggcaacctgaccctgcagaggtcgcgtgctgtgggatgacagcgggacgggagctcacaagtgctttcactgaagatttgttcatatactgtgtattgattgttgtgtaatatatcatcattgcttttgtaaatacgtaaaactgtaattttttaatggtgtgcttcccttatacttttttgatcagagaattttggaaagtaccaaagaagcaggggaatcattggccagtgttacgttttcacattgtctgtctcccaccctcactgatcacgcctgccccagagcagtgtgtggcggtgacaccgtcacccagcatgcgccacgccgtggctcccaccagcagtgccaccgccaccacaccccagatcccacccaccttgcagtggcctttccttgtcatcagagtagagaatgcacaggtgttggtgagggcgtgtggctgagcactacatgtcaagtccagagtcagtttctatcccaattctccctgcagcctgaagaacggatccttgtctccaatgtcagcacaaaggaggctttttctgtgctttgacattctagcacttcagggatgagagggagggagaatcctggatgctggatggagtatttctctgaggcccacacaaagctggacacccccaggctctactccatcccattggagtctcttctttttttgatagcgggagggaggaagtacgactaatgttggagcctgaaactatggaaatgctgctaaaatttttatattgacaaacattttcttggtacttcattgtcatttttcattaatcaaccatattaaatttataataaaaaatgcccctcagaaaaaaaaaaaaaaagaaaaaaaaaaaaaaa

SEQ ID NO: 3063 - DNA, 2352 bp, Homo Sapiens
  NM_006753
ggtggtttccggcggaggtggtgagagtcgcacgcgcagcggggaaggtgtgagtcgtgaacggcccgggtctccgccatggcctctctactcgccaaggacgcctacctgcagagcctggccaagaagatctgctcccattcggccccggaacagcaggcgcgcacgcgggctggcaaaactcaaggctcagaaactgcagggcccccaaaaaagaaaaggaagaaaacacaaaagaaattccggaagcgagaagagaaggctgctgagcacaaggccaagtccttgggggagaaatctccagcagcctctggggccaggaggcctgaggcagccaaagaggaagcagcttgggcttccagctcagcagggaaccctgcagatggcctggccactgagcctgagtctgtctttgctctggatgttctgcgacagcgactgcatgagaagatccaggaggcccggggccagggcagtgccaaggagctgtcccctgccgccttggagaaaaggcggcggagaaagcaggaacgggaccggaagaagaggaagcgaaaggagctgcgggcgaaagagaaggccaggaaggctgaggaggccacggaggcccaggaggtggtggaggcaaccccagagggggcctgcacggagccgcgggagccgcccgggctgatcttcaataaggtggaggtgagcgaagacgagccggccagcaaggcgcagcgcagaaaagagaagaggcagagggtgaaggggaacctcacgccgctgaccgggaggaactaccggcagctgctggagcgcctgcaggcacggcagagccggctggacgagctgcgcggccaggatgaggggaaggcgcaggagctggaggcgaagatgaagtggaccaacctcctctacaaggcggagggcgtgaagatccgtgacgacgaacgcctgctgcaggaggccctgaagcgcaaggagaagcgcagggcgcagcggcagcgccggtgggagaagcgcacggccggcgtggtggagaagatgcagcagcgccaggaccggcggcggcagaacctgcgcaggaagaaggcggcccgcgccgagcgccgcctgctcagagcccgcaagaagggccgcatcctgccgcaggacctggagcgcgcaggcctggtctgagtctttcccacctggggccgccgtcttccgtcctaggagactccaggacaccctctgagtccttgacgctggctctgtcccaggatctccacagacctcggcctctccatgtgagggggacacagtggtgctctgctgagttgtgagggcccagatcacagatcccatgtgagaaagagagagtttcagcgtcatccttgaacgcaggatccgggaccttcagacccagggaaagggtgagggagactggggcctggtctgctttcccgggcctgaaagcttccccgaggtttgcagggtcagggaggaggaacggtgggggtgggcagtcactgcctgttccccactgcctgtgttcgcaggagccacgggacagaagacggtggcctctgctgccgggccacgttagtccgcagctcacccgaacagaggacaaccctgaggtgtggcatatgggcacctggcactgggagtcgggggagcacgtccaggcgtggtgcatcctggggcagaacgccatggctcctccccgctctcttggcttctgcctgttggggtctcattcctttctgttccccagtgccccggggcggcattttactgctcagaatttggagggagggagcagtaccttcccggagtccacgcatgtgagttgggtcaagtgcattggacctagggaaagagaaagaaagaataaaagctggagagagagtgaagtgaatgcaagataaaaagtgggatggaagaattaaatccagagttccaggcaatcaaaatgagtgcaggttgaaagaaaacaggtgaattttagtggcatatggatgataaagctgtaaataaaattcttttgatgaaactctccggttacgagacaaagactgtaactgaacaggagctggtgtgactgttaccagacagaggcaactgatgaaaaagccctgtgaaagataggatgtgaggtgagcatgagcttgagctgagagacagacacaacagtatctgaaaagaatacatactctttccatgcatatatggaacatggatggaaactgaccacctactttgtccagaaaagaagtcttaagatatttcaaggaatcagtgtcgttatctgaccgtatcccaatgtcattaaaaaaaatttgagctaaaaaaaaaaaaaaaaaaaaaaaaaaaaaaaaaaaa

SEQ ID NO: 3064 - DNA, 2183 bp, Homo Sapiens
  NM_006754
gagcgcacgcgtacacgcgtgcgcaggggaagaccgagtgccaggggctgaaccgcagggaagggggcgcggcgcacgcagtatggcgcccaacatctacttggttcgccagcggatcagtcgactcggccagaggatgtccggcttccagatcaacctcaacccgctcaaggagccactcggcttcatcaaggtcctcgagtggattgcttctatctttgcttttgccacctgtggaggttttaagggccaaacagaaattcaagtgaattgtcctcctgcagttactgagaataaaactgttacagctacttttggttatccattcaggttgaatgaggcatcatttcagccacctccaggtgtaaacatatgtgatgtaaattggaaagattacgtcctcataggcgattactcttcttctgcacaattctatgttacctttgcagtctttgtgttcctgtactgcattgctgcccttctgctttatgttggctacacgagtctgtatctggatagtcgtaaacttcctatgatagactttgttgttacacttgttgccacttttttgtggttggtgagcacttcagcctgggctaaagctctgacagatattaaaatagctactggtcacaatattattgatgaacttccgccttgtaagaagaaagcagtactgtgttactttggctctgtgaccagtatgggatccctaaatgtatctgtgatatttggctttctaaatatgatactctggggaggaaatgcttggtttgtgtacaaggagaccagcctacacagtccatcaaatacatctgcccctcatagccaaggaggtattccacctcctaccggaatataattaaagggagaaatacactgtatgaagtatatgttgatactatgacatgttgccaacaccttgagaagcattatttgtttctaataaaagtaatggctttgtcaatatattggtgggtttaaaactttgctgcttttttacataaagcctgtgcctttcctagaaagttaagatgtaaatgtattctcacatgtaaatttgaaagttcaggggtctattatgaaatgatacacatttttaaatgaaccataatttttttcactaagctgtttgccttccaaagtgtttacaccttaagccttaacatgtatcttcattcagaaaacagttatattgtcataccatagtaggaagaaaaacctttatttggaatatacactactgtaagtttgtacagatcatatacctaccacctgtctttgcttaaagagccttgattacataaatatgtaggaaaaaacatattgagttcaaaatttatatctaacattgtttatgttatgatttttttttaattgcaaagactaggtgtatatttttttctgtttttctaaatgacccgtggtacttaataggtgtactaaaattgtgttgggagcagggatttggaaatttctgagagatgtgtagttaatttagtaattctgtttcatgagatatgatctgttatgctagtggtttaataggcttgctatgtaagtagaacgtggctcaactagatatctttatatgtatgggcattactcttagtgatatttgtttcctgtcctttgttgctcatgctgtttaagtgcaggctgagacccagcctctttgtaagtacagtaaaataatccaccgttttttacagaccctagtcaaagggttaaaaaaattaagattgctttccatgtttgaaatttaccattgagagtcaatgaagttgctattttgagtttagcattgatattgtgaaaataagtgcaatttggatttcatgtttcttaatattcattcttgtttcacaaatgaatgattaaggaattatgcatcataaaggaacctaagtgaggtatatgatgagtgtattgtctttgcacacacatataggtatattctgaatacaagcttattcacattttgcttcctaatctttttgttgtacagggattcaggtttcttattcttacaacatgattgtttatatgtgaagcacatcttgctgttgccttatttttgatgcttttattcatgacaagaattgtcaatataagaatgtatatcttttttgcaaccaatttaataaaggagttgaaagaaaaaaaaaaaaaaaaaaaaaaaa

SEQ ID NO: 3065 - DNA, 1319 bp, Homo Sapiens
  NM_006755
cgcgcccgtcccgtcgccgccgccgccgccgcagacccctcggtcttgctatgtcgagctcacccgtgaagcgtcagaggatggagtccgcgctggaccagctcaagcagttcaccaccgtggtggccgacacgggcgacttccacgccatcgacgagtacaagccccaggatgctaccaccaacccgtccctgatcctggccgcagcacagatgcccgcttaccaggagctggtggaggaggcgattgcctatggccggaagctgggcgggtcacaagaggaccagattaaaaatgctattgataaactttttgtgttgtttggagcagaaatactaaagaagattccgggccgagtatccacagaagtagacgcaaggctctcctttgataaagatgcgatggtggccagagccaggcggctcatcgagctctacaaggaagctgggatcagcaaggaccgaattcttataaagctgtcatcaacctgggaaggaattcaggctggaaaggagctcgaggagcagcacggcatccactgcaacatgacgttactcttctccttcgcccaggctgtggcctgtgccgaggcgggtgtgaccctcatctccccatttgttgggcgcatccttgattggcatgtggcaaacaccgacaagaaatcctatgagcccctggaagaccctggggtaaagagtgtcactaaaatctacaactactacaagaagtttagctacaaaaccattgtcatgggcgcctccttccgcaacacgggcgagatcaaagcactggccggctgtgacttcctcaccatctcacccaagctcctgggagagctgctgcaggacaacgccaagctggtgcctgtgctctcagccaaggcggcccaagccagtgacctggaaaaaatccacctggatgagaagtctttccgttggttgcacaacgaggaccagatggctgtggagaagctctctgacgggatccgcaagtttgccgctgatgcagtgaagctggagcggatgctgacagaacgaatgttcaatgcagagaatggaaagtagcgcatccctgaggctggactccagatctgcaccgccggccagctgggatctgactgcacgtggcttctgatgaatcttgcgttttttacaaattggagcagggacagatcatagatttctgattttatgtaaaattttgcctaatacattaaagcagtcacttttcctgtgctgtttcaaaaaaaaaaaaaaaaaaaaaaaaaaaaaaaaaaaaaaaaaaaaaaaaaaaaaaaaaaaaaaaaaaaaaaaaaaaaa

SEQ ID NO: 3066 - DNA, 2185 bp, Homo Sapiens
  NM_006759
tggttttaccttttccgggagtctccagctggccctcatttgtgtccggagctcaggagttcccaaaccgactcagtcgcaccaagtttccgtcttttggaattggggaaggagtttctttctttcttttcttttttcttgagccagttttaatcgctttgaataaatactcccttaagtagttaaatataggaggagaaagaatacatcggttgttaaagcaggagaggaagagagacctgccctgtagcgtgactcctctagaaaaaaaaaaaaaaagccggagtattttactaagcccctaaaatgtcgagatttgtacaagatcttagcaaagcaatgtctcaagatggtgcttctcagttccaagaagtcattcggcaagagctagaattatctgtgaagaaggaactagaaaaaatactcaccacagcatcatcacatgaatttgagcacaccaaaaaagacctggatggatttcggaagctatttcatagatttttgcaagaaaaggggccttctgtggattggggaaaaatccagagaccccctgaagattcgattcaaccctatgaaaagataaaggccaggggcttgcctgataatatatcttccgtgttgaacaaactagtggtggtgaaactcaatggtggtttgggaaccagcatgggctgcaaaggccctaaaagtctgattggtgtgaggaatgagaatacctttctggatctgactgttcagcaaattgaacatttgaataaaacctacaatacagatgttcctcttgttttaatgaactcttttaacacggatgaagataccaaaaaaatactacagaagtacaatcattgtcgtgtgaaaatctacactttcaatcaaagcaggtacccgaggattaataaagaatctttacttcctgtagcaaaggacgtgtcttactcaggggaaaatacagaagcttggtaccctccaggtcatggtgatatttacgccagtttctacaactctggattgcttgatacctttataggagaaggcaaagagtatatttttgtgtctaacatagataatctgggtgccacagtggatctgtatattcttaatcatctaatgaacccacccaatggaaaacgctgtgaatttgtcatggaagtcacaaataaaacacgtgcagatgtaaagggcgggacactcactcaatatgaaggcaaactgagactggtggaaattgctcaagtgccaaaagcacatgtagacgagttcaagtctgtatcaaagttcaaaatatttaatacaaacaacctatggatttctcttgcagcagttaaaagactgcaggagcaaaatgccattgacatggaaatcattgtgaatgcaaagactttggatggaggcctgaatgtcattcaattagaaactgcagtaggggctgccatcaaaagttttgagaattctctaggtattaatgtgccaaggagccgttttctgcctgtcaaaaccacatcagatctcttgctggtgatgtcaaacctctatagtcttaatgcaggatctctgacaatgagtgaaaagcgggaatttcctacagtgcccttggttaaattaggcagttcttttacgaaggttcaagattatctaagaagatttgaaagtataccagatatgcttgaattggatcacctcacagtttcaggagatgtgacatttggaaaaaatgtttcattaaagggaacggttatcatcattgcaaatcatggtgacagaattgatatcccacctggagcagtattagagaacaagattgtgtctggaaaccttcgcatcttggaccactgaaatgaaaaatactgtggacacttaaataatgggctagtttcttacaatgaaatgttctctaggattctaaaataggcaggtactttactatgttactgtaccctgcagtgttgatttttaaaatagagttttctgcagtatgcttttagtctaagaaaagcacagatggagcaatactttccttctttgaagagaatcccaaaagttagttcatcttaaagtgcaatattgtttaatcttaaaactgggcaactttggaagaacttttaacagaagcctcaatgatgatcactttgaattgcttgtgatttcaaaaataaagcagtgaagcaataaaaaaaaaaaaaaaaaa

SEQ ID NO: 3067 - DNA, 4332 bp, Homo Sapiens
  NM_006767
accgtcagcgcagggctcgccgggaaatgtggtttctccagccggcccggggcggtggccgcaagttgggcttacagcgcggccgatccggcgtggacccgggatggctggaccgggcagcacgggggggcagatcggggctgcggccctggcaggcggcgcgcggtccaaggtagccccgagcgtggacttcgaccatagctgctcggacagtgtcgagtacctgacgctcaacttcgggcccttcgaaacagtgcatcgctggcggcgcctcccgccctgcgacgagttcgtgggtgcccggcgcagcaagcacacagtggtggcctataaagatgccatttatgtatttggtggagacaatgggaagaccatgctcaatgacctcctgcggttcgatgtgaaagactgctcctggtgcagggcctttaccactgggaccccaccggccccccgttaccaccactcggccgtcgtctatgggagcagcatgtttgtctttgggggttacactggggacatttattccaattctaacttgaagaataaaaacgacctctttgaatacaagtttgcaactggccagtggacggagtggaaaattgaaggacggttgccagtcgctaggtcagcccatggggccacggtgtacagtgacaagctgtggatctttgctggctatgacggcaacgccaggttgaatgacatgtggacaattggcctccaggaccgagagctcacctgctgggaggaggtggcccagagtggcgagatccccccatcttgctgcaacttccccgtggctgtgtgccgggacaagatgtttgtattctctgggcaaagcggagccaaaataaccaacaacctcttccagtttgaattcaaggacaagacgtggacacgcatcccaactgaacacctgctccggggctccccaccacccccgcagcggcgctacgggcataccatggtggcctttgaccgccacctctatgtgtttgggggtgcggccgacaacacgctgcccaacgagctgcactgctatgacgtggacttccagacctgggaggtcgtccagcccagctccgacagcgaggttggtggggctgaagtgcccgagcgagcctgtgcttccgaggaggtgcccaccctgacctatgaggagcgggttggcttcaagaagtcccgagatgtgtttggcctggactttggcaccacctcagccaagcagcccacccagcctgcctcggagctgcccagtgggaggctcttccacgcggctgctgtcatctcggacgccatgtacatcttcgggggcacggtggacaacaacatccgcagcggggagatgtacaggttccagttctcctgttaccctaaatgcacgctgcacgaggactacgggcggctgtgggagagccgccagttctgcgacgtggagttcgtgctgggtgagaaggaggagtgcgtgcagggccacgtagccattgtcacagcgcggagccgctggcttcgcaggaagatcacgcaggcgcgggagaggctggcccagaagctggagcaggaggccgccccagttcccagggaggcccccggcgtggctgctggtggggcccggccgcccctgctgcacgtggccatccgggaggccgaggcccggcccttcgaggtgctcatgcagttcctctacaccgacaagatcaaatacccacggaaaggccatgtggaggatgtgctgctcatcatggatgtgtacaaactggcactgagcttccagttgtgccgcctggagcagctgtgccgccagtacatcgaggcctccgtggacctgcagaacgtgctggttgtgtgcgagagtgccgcccggctgcagctgagccaactcaaggagcactgcctgaacttcgtggtaaaggagtcccacttcaaccaggtgatcatgatgaaggagttcgagcgcctctcctctccactgatagtggagattgtgcggcggaagcagcagccgccccctcgcactcccttggaccagccagtggacattggcacatctctgatccaggacatgaaggcatacctggagggagcgggcgcggaattctgtgacatcactctgttgcttgacgggcacccacggccagcccacaaggctatcctggccgcccgctccagctactttgaagccatgttccggtccttcatgcccgaagatgggcaggtgaacatctccatcggggagatggtgcccagcaggcaggccttcgagtccatgctgcgctacatctactacggcgaggtcaacatgccgcccgaggactcgctctacttgtttgcggccccctactactacggcttctacaacaaccggctgcaggcgtactgcaagcagaacctggagatgaacgtgacggtgcagaacgtgctgcagatcctggaggcagctgacaaaacgcaggcactggacatgaagcggcactgcctgcacatcattgtgcaccagttcaccaaggtctccaagttgcccaccctgcggtcgctgagccagcagctgctgctggacatcatagactccctggcctcccacatctcagacaagcagtgcgcagagctgggcgccgacatctgaggccctgtggcgcctgcccattgtgaagaatcgccgtgcctgcctgccctgcctactgagaagactaccggctatgcgcatgcctatggcagtgggtgcacctgccaggccaagggtcagggtgcccagagcctccaaagagagctgaggggatgtggggccccaaactcattaattcactgaagacacaggtcccacagggagcggatgatgaagcagaccccctcctgtcatcaccctctcctggtgtagtgtggatgcgaggccacggctcagtgatgggctcaccacccagaagtggggagagactttgggcctcccacccagtggggcttggcctggcttctgtggcctgggcgtgttgtggactcaggcactggggcctgtcaccaaggctcctccaacatgcgggaggaggcttagcagacttgcgctgcaccagcgaatctgcctgggctgctcctgtcccacccaccctcactgagatccatgtaaggggctcctcttcccacctggaacttgtgagtggggacccatgatgtatgggtctcacctgacttgaggtgaattttggagtgaagggccctgaggtcagctcccaggtcggtcgtgctgggccaggcctggttttcacaggggctgaaggatcccagtccacctgtgtgcatgtcagggctcggccgggaagaagccagcaaagtcccccgtgtcccttgctgagtattctgtcacagacaagcctccattaaagccacagcagtgctacccaccacacacaccttgctggcccggccaccactgctggcttcagccccttgagcagcccatggcttagcagacccccagatgtaggtcagtggccttacctgtctctatccatgctgtcaactcctgcctccacctggggtcacccagtcacattgggaagggctgtgaaggcctccaggctggccccttccaggggaatcctggaggcctggggtgggctcctgccccttctgccctgccttgcccctgcactatgctcttggctcctgtggaaggagggctgccctcttgccctagtgagggccccatgtggatccactctagtgctgggagccagcgctcccttactgggaacaggattccaggacccctttcttgttgtggctgccatgaagccacagctccttggggaagtgacctgctctcctttgggtgtatgcaggtgtgtggggggccctgagtggcaagttgcttagctaacaggagatccataggcagcctgcaggctaggaagtggcctagtgcaagatgagctgggaacaagggaggagagagcaggagctggggcagaggctgagccgggaggcccttgaggtgaggacacagcaggcccaggaccatggctggggaggatatgtcagcacctggaagtggagtgcaggctgcagcgcccagccatgtgggccaggtgcattcactcagagtggggccacacacccatctacccagtttccacaagatgtggctcctgccacacccacagggcagcctcctccaaatccctcctggaggggcctacccagaagcctccttgaaccagtctgcaaccctgctctatgctgacccttgtcactgaaccctgatctagacttatatgaataaatgaaattacatgccaagggccctaaaaagcaaattttaaaaaaaaaaaaaaaaaa

SEQ ID NO: 3068 - DNA, 3790 bp, Homo Sapiens
  NM_006773
gccgagctgcgcacgtgcggccggaagggaagtaacgtcagcctgagaactgagtagctgtactgtgtggcgccttattctaggcacttgttgggcagaatgtcacacctgccgatgaaactcctgcgtaagaagatcgagaagcggaacctcaaattgcggcagcggaacctaaagtttcagggggcctcaaatctgaccctatcggaaactcaaaatggagatgtatctgaagaaacaatgggaagtagaaaggttaaaaaatcaaaacaaaagcccatgaatgtgggcttatcagaaactcaaaatggaggcatgtctcaagaagcagtgggaaatataaaagttacaaagtctccccagaaatccactgtattaaccaatggagaagcagcaatgcagtcttccaattcagaatcaaaaaagaaaaagaagaaaaagagaaaaatggtgaatgatgctgagcctgatacgaaaaaagcaaaaactgaaaacaaagggaaatctgaagaagaaagtgccgagactactaaagaaacagaaaataatgtggagaagccagataatgatgaagatgagagtgaggtgcccagtctgcccctgggactgacaggagcttttgaggatacttcgtttgcttctctatgtaatcttgtcaatgaaaacactctgaaggcaataaaagaaatgggttttacaaacatgactgaaattcagcataaaagtatcagaccacttctggaaggcagggatcttctagcagctgcaaaaacaggcagtggtaaaaccctggcttttctcatccctgcagttgaactcattgttaagttaaggttcatgcccaggaatggaacaggagtccttattctctcacctactagagaactagccatgcaaacctttggtgttcttaaggagctgatgactcaccacgtgcatacctatggcttgataatgggtggcagtaacagatctgctgaagcacagaaacttggtaatgggatcaacatcattgtggccacaccaggccgtctgctggaccatatgcagaataccccaggatttatgtataaaaacctgcagtgtctggttattgatgaagctgatcgtatcttggatgtggggtttgaagaggaattaaagcaaattattaaacttttgccaacacgtagacagactatgctcttttctgccacccaaactcgaaaagttgaagacctggcaaggatttctctgaaaaaggagccattgtatgttggcgttgatgatgataaagcgaatgcaacagtggatggtcttgaacagggatatgttgtttgtccttctgaaaagagattccttctgctctttacattccttaagaagaaccgaaagaagaagcttatggtcttcttttcatcttgtatgtctgtgaaataccactatgagttgctgaactacattgatttgcccgtcttggccattcatggaaagcaaaagcaaaataagcgtacaaccacattcttccagttctgcaatgcagattcgggaacactattgtgtacggatgtggcagcgagaggactagacattcctgaagtcgactggattgttcagtatgaccctccggatgaccctaaggaatatattcatcgtgtgggtagaacagccagaggcctaaatgggagagggcatgccttgctcattttgcgcccagaagaattgggttttcttcgctacttgaaacaatccaaggttccattaagtgaatttgacttttcctggtctaaaatttctgacattcagtctcagcttgagaaattgattgaaaagaattactttcttcataagtcagcccaggaagcatataagtcatacatacgagcctatgattcccattctctgaaacagatctttaatgttaataacctaaatttgcctcaggttgctctgtcatttggtttcaaggtgcctcccttcgttgatctgaacgtcaacagtaatgaaggcaagcagaaaaagcgaggaggtggtggtggatttggctaccagaaaaccaagaaagttgagaaatccaaaatctttaaacacattagcaagaaatcatctgacagcaggcagttctctcactgaacacatgccttcctttcatcttgaataactttgtcctaaaatgaattttttttccccttgatttaacaggatttttgtagactttagaatttggacttacctaacaagagtataaattgacttgggttgcaagcactgagcactgttacttctatcacgtctctcttttatttctgggatataaaacaggctttaagtttcttggttgcccaagggcagagcaaggaatatctggtgtttcttgtgatgataatattttaattttaaatatccctccctcatacaagtgtatgttaccattttaatataattctttttgtacctttccttcttgttttgcgaagatttttgtggcatggattgctgtgctcactgctgtaaaaggtgacctagtgtactgggcagctggtggcggtgcagaaaagagtctcaggttattttttgtttttagttatttcttggaccttgacagtatctaatgactcctcctgaaaatgctgcagtataaaagagcaaagagctttgggaaatacctaagaagcaccttaagattagggtggcattgcttttatagattcttgattttaaagcaacaggcctttctcaggtgttgcattttttggagcaaaaactatgggttgtaatttgaataaagtgtcactaagcagttataacgtttgatggctggggggtaggaagaggatggaattgagatgtttgagcctcatttacatcaatagaggtgtaatgtactgcatttcttcatttggtaacataacaaagactttcatacaaagaacgatgatgctcctcattaagatttgtttaattcaaggtggtttggatttggtaagcctttgcactctgtagagtacttagaagacaagggcaacttacttggagttagagccaagctgtcagacggtgcccagcacacattaatgttagcttctttctgagaaaaaaatacctcttccaggccctgaaacaaaaaatacatttgctgtgaagattgaaaatgaacaaagttagaaaaaaaaacagcaaaatcagtgatttagtcagatgagtttttcgttgtaggagcacttgatttctagtgtgttttgtacagtatataactacaagatagtacattttgtagcagttcaaagccaaagttgctagcatcattttgctgttgtgccagttaatcataggatcccattaaataagtgtgctaacatcgaatatagagaaaactggtaaagaacattccagtaggaaaagaaaagaacaatcttccatttctgggcttggccaccatcaccctggtcggacctgtcctggacttccaaccttgactgctgagctcctggcttagcttcttgggttcctaattcctggtgtttaataattctctccacgatcatgtttttctgattttttttttcagaaataatgttttttaaaagacaaaaacaaagggaagaatatttaattactgagcagaagtaaatactgttggcattttgtacataatctaatttttatatgcatgttcatgctttttaatttttttatcaaaaattaagtcatctacctactacttgtaaccagcttgtttcataacatgttattttcctgtgtcattaaataattacttcaatgttgaaaaaaaaaaaaaaaaaaaaaaaaa
